United States Patent Application Publication US 2023/0272434 A1 - sequence listing, part 8

SEQ ID NO: 12316 - protein, 1198 aa, Xestia xanthographa
MLTRSAAARRARLPPPDSSLSSASPPPEPSPIVSAVTPAVAVASSSSDEYFSPPTTPPPARRRGGRRPPDGLGPRGPPASDRVPAPGGSVQRMRWTQSINANVMRAYYGATEGGNNLTAYRVRMLSLFQVLEPAVNVSAQRLSDQVRVIQRNRMLDDTVLDRLRTEIQSNHVIATPSQAVVPPQSSIIPNCDNDVSNDMVTNVSTQCNVEMRSALEGAIREYRFMQPDLRPRIPRLPMHNKNRALVAVLDSQLSNYFDNCEDLTDVHSILYCAAVATCRVAHVKFPSDRATRPKPAVPAWQYRIERRIGGARALIGKLVCFREGNTRPRVMRFVRQAFSGTDISPRDYMSRVTERIDFLKQKVYAWANRIRRYKRRVDRYTQNRTFQKDERWVYRAWERPDQGVADTHLPDDDAMFSFWRSIWSVPVSHAEGEWTRVIERACDPISEMGAITISPQDVARAVRPLPNWKSPGPDGLHNFWIKWFTRSHARLATLFQSALESGSLPEFLTTGITHLLHKSGSTAEPKNYRPITCLPTVYKVLTSILRTKISKHIDDNSVMSASQNGCRNGSRGTKELLLIDMAISHQVRRSRKDLSTCWIDYKKAYDSVPHTWLMRVLQLYKVDATLRTFLMSCMGQWRTVLHYPGCRQIQRNSEPIRIERGIFQGDSLSPLWFCLALNPLSTLLEDSGLGYRLRKDGQVISHLLYMDDLKLFAPNDLRLMELLKVTETFSNAIRMEFGVDKCAVMHVKRGEIVESVGTQLSDSITLRSLSATETYKYLGMSEALGVNVADMKQSLKERFFGRLKKVLNSLLSGGNKVRAFNGWVMPVLMYSFGILKWTQTELDALDTKVRKLLTAYRMHHPRSSVMRLYIPRKCGGRGFLNAKTLHNREICSLREYFLGTDVGMHRDVVTMDKGLTPLSLAKENWRKPPVLDTNDRREVWQSKELHGRFFRALHGPDVDLSASVAWLRSGDLFGETEGFVCAIMDEVMMTNNYRRFIVKDGTVDICRACHRPGESIRHIISGCSRLANGEYLHRHNLVARIIHQQLALKYNLVESEVPYYRYVPDPVLDNGCITLYWDQSIITDRTIVANKPDIVVVDRSERRAMIVDITVPHDENLVKAEKDKQIKYLDLAREVVDMWEVDSAIIVPIVVSAHGLIAKSLDQYLRRLSLGSWIKGLIQKAVLLDTARIVRRFLSLEP

SEQ ID NO: 12317 - protein, 1209 aa, Xestia xanthographa
MITRSRAKQHQEAHPPSPGSSLSSASQRPKRATPVSTVSPVAAVASSSSDEFFSPPSTPSPSPRRGRRRGRGRPPAGLGPRGQQAPSRVPAAGGNVSRIRWTQSMNENVMRAYYGATEGGINLTAYRGQMLSLFQVLEPGVSASAQRLSDQVRVIQRNHMLDDTVLDRLRSESRSNLVMPASPLLAVQVQNVSSAPPRSDRDGEEDDSEVISVSTQCNAQLRSALESAFREYRSTPPELRPRLPRLPMHNKNKALVCALDSQLSNCFDSSKDLADTHSILYCGAVAACRVAHVKFPNNDRATRPKLAAPAWQCRIERRIGEARALIGKLICFREGNTRPRVMRFVRRAFSGTDISFRDYLARVTERIDSLKQKICAWASRIRRYKRRVERYTQNRTFQSDERWVYRAWERPDQGVTDTCLPDDNAMCSFWRSIWSVPVSHTEGDWTREVEQACNPIPEMGAIVISPQDVARAVRPLPNWKSPGPDGLHNFWIKWFQRSHACLASQFQSALESGSLPQFLTTGITHLLHKSGSAAKPKNYRPITCLPTVYKVLTSILRAKINQHIESNSIMSASQNGCRNGSRGTKELLLIDMAISQQVRRSRKNLSTCWIDYKKAYDSVPHTWLMRVLELYKVDATLRTFLTSCMGQWRTVLRSPGCRPIQGTSEPIRIERGIFQGDSLSPLWFCLALNPLSTLLERSGLGYLLRRDGRVISHLLYMDDLKLFAPNNLQLMKLLKVTETFSSAIRMEFGVDKCAVMHVKRGEIMESVGTQLSDSIHLRSLSSTETYKYLGMSEALGINTADMKQSLRERFFGRLNKVLGSLLSGGNKVRAFNGWVMPVLMYSFGILKWTQTELDALDRRVRTLLTANRMHHPRSSVMRLYIPRKCGGRGFLNAKALHNREVCSLREYFLEADGEMHRDVVSVDKGLTPLSLANENWRKPKVLNTNDRKEEWQSKELHGRFYRALHGPDVDFLASVSWLRFGDLFGETEGFVCAIMDEVMMTNNYRKYIVKDGTVDICRACHRPGESIRHIISGCSSLANGEYLHRHNLVARIIHQQLAMKYNLVESEVPYYRYAPDPVLDNGNITLYWDRPITTDRTVVANRPDIVVIDRLERRAMIVDITVPHDENLVKAEKDKQFKYLDLAREVVDMWDVNTAVIVPIVVSANGLIAKSLDQHLRRLSLGSWIKGLIQKAVLLDTARIVRRFLSQEP

SEQ ID NO: 12318 - protein, 1210 aa, Xestia xanthographa
MSPMLTRHRAKLQKEAHPPSPGSSLSSASQPPGRATPVSTVSPVAAVASSSSDEFFSPPSTPSPPPRGRRRGRGRPPAGLGPRGQQAPSRVPAAGGNVSRMRWTHSINENVMRAYYGATEGGSNLTAYRSRMLSLFQVLEPAVSVEAQRLSDQVRVIQRNHMLDDTVLDRLRSESRSNLVTPASPMIAVQQQNIPSAPPRSDYDGEEDRDEVISASQCNAQLRSALEGAFREYRSTPPELRPRLPRLPMHNKNKALMCALDSQLSNCFDSSKDLADTHSILYCGAVAACRVAHVKFPNNDRATRPKLAVPAWQCRIERRIGEARALIGKLICFREGNTRPRVMRFVRRAFSGTDISFRDYLPRVTERIDSLKQKICAWASRIRRYKRRVERYTQNRTFQSDERWVYRAWERPDQGVTDTRLPDESATYSFWRNIWSVPVSHTEGDWTREVEQACDPIPEMGAIIISPQDVARAVRPLPNWKSPGPDGLHNFWIKWFQRSHARLASQFQSALESGSLPQFLTTGITHLLHKSGSVAEPKNYRPITCLPTVYKVLTSILRAKINQHIDSNSIMSASQNGCRNGSRGTKELLLIDMAISQQVRRSRKNLSTCWIDYKKAYDSVPHTWLMKVLELYKIDATLRTFLMSCMGHWRTVLCYPGCRQIQGNSEPIRIERGIFQGDSLSPLWFCLALNPLSTLLERSGLGYLLRRDGQVISHLLYMDDLKLFAPNNLQLMKLLKVTETFSSAIRMEFGVDKCAVMHVKRGEIMESVGTQLSDSIHLRSLSSTETYKYLGMSEALGINTADVKQSLRERFFGRLNKVLGSLLSGGNKVRAFNGWVMPVLMYSFGILKWTQTELDALDRRVRTLLTANRMHHPRSSVMRLYILRKCGGRGFLNAKTLHNREVCSLREYFLEADGEMHRDVVSVDKGLTPLSLANENWRKPKVLDTNDRKVEWQGKELHGRFYRALHGPDVDFLPSVSWLRFGDLFGETEGFICAIMDEVMMTNNYRKYIVKDGTVDICRACHRPGESIRHIISGCSSLANGEYLHRHNLVARIIHQQLALKYNLVESEVPYYKYAPDPVLDNGHITLYWDRPITTDRTVVANRPDIVVIDRLERRTMIVDITIPHDENLVKAEKDKQFKYLDLAREVVDMWDVGTAVIVPIVVSANGLIAKSLDQHLRRLSLGSWIKGLLQKAVLLDTARIVRRFLSQEP

SEQ ID NO: 12319 - protein, 1205 aa, Cosmia trapezina
MLTRSRAQHLRNTHPTSSGSSLSSASQLPEPAPDVSQVIPAAAVASSSSDEYFSPPTTPPPVRRRGRGRPPASLGPRGPPASDRVPAPGGSVQRMRWTQTVNENVMRAYFGATEGGSNLTAYRGRMLSLFQVLEPAVNVSAQRLSDQVRVIQRNHMLDDVVLDRLRLESRNSRVTSDSPMVAVQLQNLPSASPRPDRVGEEDDSGAISVSSQCNVQLRSALEDAFREYRSAPPGLRPRLPRLPMHKKNKALVCALDSQLSNCFDGSKDLADTHSILYCAAVAACRVAHVKFHNNDRVTRPKPAVPTWQCRIERRIGEARALIGKLICFREGNTRPRVMRFVRRAFSGMDISPRDYLTCVTERIDFLKQKICAWANRIRRYRRRVERYTQNRTFQSDERWVYRAWERPDQGVADTRLPDDDAMCSFWRSIWSVPVSHTEGDWTREVERACDHIPQMGALTISPQDVARAVRPLPNWKSPGPDGLHNFWIKWFQRSHARLASQFQSALQSGSLPQFLTTGITHLLHKSGSTAEPRNYRPITCLPTVYKVLTSILRAKINKHIDTNSIMSASQNGCGNGSRGTKELLLIDMTISQQVRRSRKDLSTCWIDYKKAYDSVPHTWLMRVLELYKIDATLRTFLMSCMGQWRTVLRYPGCRNIQRNSEPIRIERGIFQGDSLSPLWFCLALNPLSTLLEDSGLGYRLRRGGQVISHLLYMDDLKLFAPNNLQLMELLKVTETFSSAIRMEFGVDKCAVMHVKRGEIVESVRTQLSDSIHLRSLSSLETYKYLGMSEALGINAADMKQSLRERFFGRLNKVLNSLLSGGNKVRAFNGWVMPVLMYSFGILKWTQTELDALDRRVRTLLTANRMHHPRSSVMRLYIPRKCGGRGFLNAKTLHNREVCSLREYFLEADVGMHREVVSVDKGLTPLSLANENWRKPIVLDTNDRREVWQSKELHGRFYRVLHGPDVDFLASVSWLRFGDLFGETEGFVFAIMDEVMMTNNYRKYIVKDGTVDICRACHRPGESIRHIISGCSRLANGDYLHRHNLVARIIHQQLALKYSLVESEVPYYRYVPDPVLENGNITLYWDWSIITDRTIVANKPDIVVIDRLERRTVIVDIAVPHDENLVKAEKDKQIKYLDLAREVVDMWDVDTAIIVPIVVTANGIIAKSLDQHLRRLSLGGWIKGLIQKAVLLDTARIVRRFLSQQP

SEQ ID NO: 12320 - protein, 868 aa, Cosmia trapezina
MRFVRRAFSGTDVSPQDYMSRVTERIDFLRQKVYAWANRIRRYKRRVDRYTQNRTFQSDERWVYRGWERPDQGVTDTRLPDDDAMCSFWRSIWSVPVSHTEGDWAREVRRACDPIPEMGAITICPQDVARAVRPLPNWKSPGPDGLHNFWIKWFLGSHARLAAQYQSALQSGSLPQFLTTGITHLLHKSGSTTEPKNYRPITCLPTVYKVLTSILRAKINEHIDTNSIMSASQNGSRNGSRGTKELLLIDMAISQQVRRSRRDLSTCWIDYKKAYDSVPHTWLMRVLELYKVDATLRTFLMSCMGQWRTVLRYPGCRNIQRNSEPIRIERGIFQGDSLSPLWFCLALNPLSTLLEDSGLGYRLRRGGQVISHLLYMDDLKLFAPSNLQLMELLKVTETFSSAIRMEFGVDKCAVMHVKRGEIVESVGTQLPDSINLRTLSAAETYKYLGMSEALGINVADMKQSLKERFFGRLKKVFNSLLSGGNKVRAFNGWVMPVLMYSFGILKWTQTELDALDRRVRTLLTAYRMHHPRSSVMRLYIPRKCGGRGFLNAKTLHNREICSLREYFLETDVGMHRDVVAVDKGLTPLSLAKENWRKPVVLDANDRMEVWQSKELHGRFFRALHGPDVNLLASVAWLRSGDLFGETEGFVCAIMDEVIMTNNYRRFIVKDGTVDICRACHRPGESIRHIISGCSRLANEEYLHRHNLVARIIHQQLALKYSLVESEVPYYRYVPDPVLENGHITLYWDRSIITDRTIVANKPDIVVVDRTERRAMIVDITVPHDGNLVKAEKDKQIKYIDLAREVVDMWDVDSAVIVPIVVSANGLIAKSLDQHLRRLSLGSWIKGLIQKAVLLDTARIVRRFLSLEP

SEQ ID NO: 12321 - protein, 1205 aa, Cosmia trapezina
MLTRSRAQHLRNTHPTSSGSSLSSASQLPEAAPDVSQVIPAAAVASSSSDEYFSPPTTPPPVRRRGRGRPPASLGPRGPPASDRVPAPGGSVQRMRWTQTVNENVMRAYFGATEGGSNLTAYRGRMLSLFQVLEPAVNVSAQRLSDQVRVIQRNHMLDDVVLDRLRLESRNSRVTSDSPMVAVQLQNLPSASPRPDHVGEEDDSGAISVSSQCNVQLRSALEDAFREYRSAPPGLRPRLPRLPMHKKNKALVCALDSQLSNCFDGSKDLADTHSILYCAAVAACRVAHVKFHNNDRVTRPKPAVPTWQCRIERRIGEARALIGKLICFREGNTRPRVMRFVRRAFSGMDISPRDYLTCVTERIDFLKQKICAWANRIRRYRRRVERYTQNRTFQSDERWVYRAWERPDQGVADTRLPDDDAMCSFWRSIWSVPVSHTEGDWTREVERACDHIPQMGALTISPQDVARAVRPLPNWKSPGPDGLHNFWIKWFQRSHARLASQFQSALQSGSLPQFLTTGITHLLHKSGSTAEPRNYRPITCLPTVYKVLTSILRAKINKHIDTNSIMSASQNGCGNGSRGTKELLLIDMTISQQVRRSRKDLSTCWIDYKKAYDSVPHTWLMRVLELYKIDATLRTFLMSCMGQWRTVLRYPGCRNIQRNSEPIRIERGIFQGDSLSPLWFCLALNPLSTLLEDSGLGYRLRRGGQVISHLLYMDDLKLFAPNNLQLMELLKVTETFSSAIRMEFGVDKCAVMHVKRGEIVESVRTQLSDSIHLRSLSSLETYKYLGMSEALGINAADMKQSLRERFFGRLNKVLNSLLSGGNKVRAFNGWVMPVLMYSFGILKWTQTELDALDRRVRTLLTANRMHHPRSSVMRLYIPRKCGGRGFLNAKTLHNREVCSLREYFLEADVGMHREVVSVDKGLTPLSLANENWRKYIVLDTNDRREVWQSKELHGRFYRVLHGPDVDFLASVSWLRFGDLFGETEGFVFAIMDEVMMTNNYRKYIVKDGTVDICRACHRPGESIRHIISGCSRLANGDYLHRHNLVARIIHQQLALKYSLVESEVPYYRYVPDPVLENGNITLYWDRSIITDRTIVANKPDIVVIDRLERRTVIVDIAVPHDENLVKAEKDKQIKYLDLAREVVDMWDVDTAIIVPIVVTANGIIAKSLDQHLRRLSLGGWIKGLIQKAVLLDTARIVRRFLSQQP

SEQ ID NO: 12322 - protein, 1077 aa, Cosmia trapezina
MHSLFQVLEPALNVSAQRLSDQVRVIQRNHMLDDTVLDRLRSEMQSSRVIAPLSQTIVAPPPPQYNTIQADEGSDGTAANVSTQCNEELRSALEGAIQEYRFVSPELRPRLPRLPMHNKNRALVAALDSQLSNYFDDCEDLTDTHSILYCAAVAACRVAHVKFANDSRAIRPKPAVPAWQCRIERRIGGARALIGKLICFREGNTRPRVMRFVRRAFSGTDVSPQDYMSRVTERIDFLRQKVYAWANRIRRYKRRVDRYTQNRTFQSDERWVYRGWERPDQGVADTRLPDDDAMCSFWRSIWSVPVSHTEGDWTREVERACDPIPEMGAITICPQDVARAVRPLPNWKSPGPDGLHNFWIKWFRGSHARLAAQYQSALQSGSLPQFLTTGITHLLHKSGSTAEPKNYRPITCLPTVYKVLTSILRAKINEHIDTNSIMSASQNGSRNGSRGTKELLLIDMAISQQVRRSRKDLSTCWIDYKKAYDSVPHTWLMRVLELYKVDATLRTFLMSCMEQWRTVLRYPGCRNIQKNSEPIRIERGIFQGDSLSPLWFCLALNPLSTLLEDSGLGYRLRRGGQVISHLLYMDDLKLFAPNNLQLMELLKVTETFSNAIRMEFGVDKCAVMHVKRGEIVESVGTQLSDSINLRTLSASETYKYLGMSEALGINVADMKQSLRERFFGRLKKVFNSLLSGGNKVRAFNGWVMPVLMYSFGILKWTQTELDALDRRVRTLLTAYRMHHPRSSVMRLYIPRKCGGRGFLNAKTLHNREICSLREYFLEADVGMHRDVVAVDKGLTPLSLAKENWRKPVVLDTNDRMEVWQSKELHGRFFRALHGPDVDLLASVAWLRSGDLFGETEGFVCAIMDEVIMTNNYRRFIVKDGTVDICRACHRPGESIRHIISGCSRLANEEYLHRHNLVARIIHQQLALKYSLVESEVPYYRYVPDPVLENGNITLYWDRSIITDRTIVANKPDIVVVDRTERRAMVIDITVPHDGNLVKAEKDKQIKYLDLAREVVDMWDVDSAIIVPIVVSANGLIAKSLDQHLRRLSLGSWIKGLIQKAVLLDTARIVRRFLSLEP

SEQ ID NO: 12323 - protein, 1200 aa, Mamestra brassicae
MLTRSRARAQTAQPTSSGSSLSTASQPPGPAPAVSPEIPVAAVASSSSDEYFSPPTTPPPARRRGRGRPPTSLGPRGPPASDRVPAIGGSVQRMRWTQTINENVMRSYYGATEGGTNLTAYRGRMLSLFQVLEPAVNVSAQRLSDQVRVILRNRMLDDAVLDRLRLESRSGRVSPASPPAAVQIQSSISPRSNNVGEDDDDGAISVSTQCNERLRSALEDAFREYRYTPPELRPRLPRLPMHNKNRALVCALDSQLTNCFDSSEDLADTHSILYCAAAAACRVAHVKFLNSDRATRPAVPAWQCRIERRIGEARALIGKLICFREGNTRRRVMRFVRRAFSGTDTSPRDYLTRVTERIDFLKQKIYAWANRIRRYKRRVERYTQNRTFQSNERWVYRAWERPDQGVTDTRLPDDDVMCSFWRNIWSVPVSHTEGDWIREVERACDPILEMGATTISPQDVARAVRPLPNWKSPGPDGLHNFWIKWFTGSHARLASQFQSALESGSLPQFLTTGITHLLHKSGSTAEPKNYRPITCLPTVYKVLTSILRAKINHHIESNSIMSASQNGCRNGSRGTKELLLMDIAISQQVRRSRKDLSTCWIDYKKAYDSVPHTWLMRVLELYKVDAVLRTFLMSCMGQWRTVLRYPGCRQIQVNGDPIRIERGIFQGDSLSPLWFCLALNPLSTLLEGSGQGYRLRRGGQVISHLLYMDDLKLFAPNNLQLMELLKVTETFSSAISMEFGVDKCAVMHVKRGEIMESVGTQLSDSIHLRSLSSTETYKYLGMSEALGINANDMKQSLKERFFGRLNKVLNSLLSGGNKVRAFNGWVMPVLMYSFGILKWTQTELDALDRRVRSLLTANRMHHPRSSVMRLYIPRKCGGRGFLNAKTLHNREICSLREFFLEADVGMHRDVVAVDKGLTALSLANENWRKPVVLDTNDRRKVWQSKELHGRFYRVLHGPDVDFLASVAWLRFGDLFGETEGFVCAIMDEVMMTNNYRKYIVKDGTVDICRACHRPGESIRHIISGCSSLANGDYLHRHNLVARIIHQQLALKYNLVESEVPYYRYVPDPVLENGNCTLYWDRSIITDRTIVANKPDIVVIDRLERRAMIVDIAVPHDENLVKTEKDKQTKYLDLAREVVDMWDVNTAVIVPIVVTANGIIAKSLDQHLKRLSLGSWIKGLIQKAVLLDTARIVRRFLSQGP

SEQ ID NO: 12324 - protein, 1200 aa, Mamestra brassicae
MLTRSRARAQTAQPTSSGSSLSTASQPPGPAPAVSPEIPVAAVASSSSDEYFSPPTTPPPARRRGRGRPPTSLGPRGPPASDRVPAIGGSVQRMRWTQTINENVMRSYYGATEGGTNLTAYRGRMLSLFQVLEPAVNVSAQRLSDQVRVILRNRMLDDAVLDRLRLESRSGRVSPASPPAAVQIQSSISPRSNNVGEDDDDGAISVSTQCNERLRSALEDAFREYRSTPPELRPRLPRLPMHNKNRALVCALDSQLTNCFDSSEDLADTHSILYCAAAAACRVAHVKFLNSDRATRPAVPAWQCRIERRIGEARALIGKLICFREGNTRRRVMRFVRRAFSGTDTSPRDYLTRVTERIDFLKQKIYAWANRIRRYKRRVERYTQNRTFQSNERWVYRAWERPDQGVTDTRLPDDDVMCSFWRNIWSVPVSHTEGDWIREVERACDPILEMGATTISPQDVARAVRPLPNWKSPGPDGLHNFWIKWFTGSHARLASQFQSALESGSLPQFLTTGITHLLHKSGSTAEPNNYRPITCLPTVYKVLTSILRAKINHHIESNSIMSASQNGCRNGSRGTKELLLMDIAISQQVRRSRKDLSTCWIDYKKAYDSVPHTWLMRVLELYKVDAVLRTFLMSCMGQWRTVLRYPGCRQIQVNGDPIRIERGIFQGDSLSPLWFCLALNPLSTLLEGSGQGYRLRRGGQVISHLLYMDDLKLFAPNNLQLMELLKVTETFSSAISMEFGVDKCAVMHVKRGEIMESVGTQLSDSIHLRSLSSTETYKYLGMSEALGINANDMKQSLKERFFGRLNKVLNSLLSGGNKVRAFNGWVMPVLMYSFGILKWTQTELDALDRRVRSLLTANRMHHPRSSVMRLYIPRKCGGRGFLNAKTLHNREICSLREFFLEADVGMHRDVVAVDKGLTALSLANENWRKPVVLDTNDRRKVWQSKELHGRFYRVLHGPDVDFLASVAWLRFGDLFGETEGFVCAIMDEVMMTNNYRKYIVKDGTVDICRACHRPGESIRHIISGCSSLANGDYLHRHNLVARIIHQQLALKYNLVESEVPYYRYVPDPVLENGNCTLYWDRSIITDRTIVANKPDIVVIDRLERRAMIVDIAVPHDENLVKTEKDKQTKYLDLAREVVDMWDVNTAVIVPIVVTANGIIAKSLDQHLKRLSLGSWIKGLIQKAVLLDTARIVRRFLSQGP

SEQ ID NO: 12325 - protein, 1198 aa, Noctua fimbriata
MLTRSAARRARLSPPDPSLSSASPPPESSPVVSAVTPAVAVASSSSDEYFSPPTTPPPVRRRGGRRPPDGLGPRGPPASDRVPAPGGSVQRMRWTQSINANVMRAYYGATEGGNNLTAYRVRMLSLFQVLEPAVNVSAQRLSDQVRVIQRNRMLDDTVLDRLRTEMQSSHVIATPPPQAVVPPQSTIIPNRDNDVSNDIVTNVSTQCNEEMRSALEGAIREYRFMQPDLRPRVPRLPMHNKNRALVAVLDSQLSNYFDNCEDLTDAHSILYCAAVAACRVAHVKFYDDRATRPKPVVPPWQYRIERRIGGARALIGKLICFREGNTRPRVMRFVRRAFSGTAISPRDYMSRITERIDFLKQKVYAWASRIRRYKRRVDRYTQNRTFQRDERWVYRAWERPDQGVADTRIPDDDAMCSFWRSIWSVPVSHTEGEWTREVERACDLVPEMGAITISPQNVVRAVRPLPNWKSPGPDGLHNFWIKWFTRSHARLAILFQSALESGSLPEFLTTGITHLLHKSGSTAEPKNYRPITCLPTVYKVLTSILKAKINKHIDDNSIMSASQNGCRNGSRGTKELLLIDMAISQQVRRSRSDLSTCWIDYKKAYDSVPHTWLMRVLELYKVDATLRTFLMSCMGQWRTVLRYPGCRQIQRNSEPIRIERGIFQGDSLSPLWFCLALNPLSTLLEDSGLGYRLRRGGQVISHLLYMDDLKLFAPNDLQLMELLKVTETFSSAIRMEFGVDKCAVMHVKRGEIVESVGTQLSDSINLRSLSATETYKYLGMSEALGINVADMKQSLKERFFGRLKKVFNSLLSGGNKVRAFNVWVMPVLMYSFGILKWTQTELDALDRRVRTLLTAYRMHHPRSSIMRLYIPRKCGGRGFLNAKTLHNREICSLREYFLETDVGMHRDVVAVDKGLTPLSLAKENWRKPLVLDTNDRMEVWQSKELHGRFFRALHGPDVDLSASVAWLRCGDLFGETEGFVCAIMDEVMMTNNYRRFIVKDGTVDICRACHRPGESIRHIISGCSRLANGEYLHRHNLVARIIHQQLALKYNLVESEVPYYKYVPDPVLENGSITLYWDQSIITDRTIVANKPDIVVVDRSERRTMIVDITVPHDENLVKAEKDKKIKYLDLAREVVDMWDVDSAIIVPIVVSAHGLIAKSLDQYLRRLSLGSWIKGLIQKAVLLDTARIVRRFLSLEP

SEQ ID NO: 12326 - protein, 1046 aa, Noctua fimbriata
MLDDTVLDRLRTEMQSSHVIATPPPQAVVPPQSTIIPNRDNDVSNDIVTNVSTQCNEEMRSALEGAIREYRFMQPDLRPRIPRLPMHNKNRALVAVLDSQLSNYFDNCEDLTDAHSILYCAAVAACRVAHVKFSDDRATRPKPAVPPWQYRIERRIGGARALIGKLICFREGNTRPRVMRFVRRAFSGTDISPRDYMSRITERIDFLKQKVYAWANRIRRYKRRVDRYTQNRTFQRDERWVYRAWERPDQGVADTRLPDDDAMCSFWRSIWSVPVSHTEGEWTQGVERACDLVPEMGAITISPQDVVRAVRPLPNWKSPGPDGLHNFWIKWFTRSHARLAILFQSALESGSLPEFLTTGITHLLHKSGSTAEPKNYRPITCLPTVYKVLTSILRAKINKHIDDNSIMSASQNGCRNGSRGTKELLLIDMAISQQVRRSRSDLSTCWIDYKKACDSVPHTWLMRVLELYKVDATLRTFLMSCMGQWRTVLRYPGCRQIQRNSEPIRIERGIFQGDSLSPLWFCLALNPLSTLLEDSGLGYRLRRGGQVISHLLYMDDLKLFAPNDLQLMELLKVTETFSSAIRMEFGVDKCAVMHVKRGEIVESVGIQLSDSINLRSLSATETYKYLGMSEALGINVADMKQSLKERFFGRLKKVFNSLLSGGNKVRAFNGWVMPVLMYSFGILKWTQTELDALDRRVRTLLTAYRMHHPRSSVMRLYIPRKCGGRGFLNAKTLHNREICSLREYFLETDVGMHRDVVAVDKGLTPLSLAKENWRKPLVPDTNDRMEVWQSKELHGRFFRALHGPDVDLSASVAWLRCGDLFGETEGFVCAIMDEVMMTNNYRRFIVKDGTVDICRACHRPGESIRHIISGCSRLANGEYLHRHNLVARIIHQQLALKYNLVESEVPYYKYVPDPVLENGSITLYWDQSIITDRTIVANKPDIVVVDRSERRTMIVDITVPHDENLVKAEKDKKIKYLDLAREVVDMWDVDSAIIVPIVVSAHGLIAKSLDQYLRRLSLGSWIKGLIQKAVLLDTARIVRRFLSLEP

SEQ ID NO: 12327 - protein, 1169 aa, Noctua fimbriata
MRYNKNNNKLAVASSSSDEYFSPPTTPPPVRRRGGRRPPDGLGPRGPPASDRVPAPGGSVQRMRWTQSINENVMRSYYGATEGGNNLTAYRVRMLSLFQVLEPAVNVSAQRLSDQVRVIQRNRMLDDTVLDRLRTEMQSSHVIATPPPQAVVPPQSTIIPNRDNDVSNDIVTNVSSQCNEEMRSALEGAIREYRFMQPDLRPRIPRLPMHNKNRALVAVLDSQLSNYFDNCEDLTDAHSILYCAAVAACRVAHVKFSNDRATRPKPAVPPWQYRIERRIGGARALIGKLICFREGNTRPRVMRFVRRAFSGTDISPRDYMSRITERIDFLKQKVYAWANRIRRYKRRVDRYTQNRTFQRDERWVYRAWERPDQGVADTRLPDDDAMCSFWRSIWSVPVSHTEGEWTQGVERACDLVPEMGAITISPQDVVRAVRPLPNWKSPGPDGLHNFWIKWFTRSHARLAILFQSALESGSLPEFLTTGITHLLHKSGSTAEPKNYRPITCLPTVYKVLTSILRAKINKHIDDNSIMSASQNGCRNGSRGTKELLLIDMAISQQVRRSRRDLSTCWIDYKKAYDSVPHTWLMRVLELYKVDATLRTFLMSCMGQWKTVLRYPGCRQIQRNSEPIRIERGIFQGDSLSPLWFCLALNPLSTLLEDSGLGYRLRRGGQVISHLLYMDDLKLFAPNDLQLMELLKVTETFSSAIRMEFGVDKCAVMHVKRGEIVESVGTQLSDSINLRSLSATETYKYLGMSEALGINVADMKQSLKERFFGRLKKVFNSLLSGGNKVRAFNGWVMPVLMYSFGILKWTQTELDALDRRVRTLLTAYRMHHPRSSIMRLYIPRKCGGRGFLNAKTLHNRELCSLREYFLETDVGMHRDVVAVDKGLTPLSLAKENWRKPLVLDTNDRMEVWQSKELHGRFFRALHGPDVDLSASVAWLRSGDLFGETEGFVCAIMDEVMMTNNYRRFIVKDGTVDICRACHRPGESIRHIISGCSRLANGEYLHRHNLVARIIHQQLALKYNLVESEVPYYKYVPDPVLENGSITLYWDQSIITDRTIVANKPDIVVVDRSERRTMIVDITVPHDENLVKAEKDKKIKYLDLAREVVDMWDVDSAIIVPIVVSAHGLIAKSLDQYLRRLSLGSWIKGLIQKAVLLDTARIVRRFLSLEP

SEQ ID NO: 12328 - protein, 1106 aa, Atethmia centrago
MRWTRSINENVMRSYYGATEGGNNLTAYRVRMLSLFQVLEPAVNVSAQRLSDQVRVIQRNHMLDDTVLDRLRSETQSGHAIAPPSQTVVVSTQLRTNQADEGSDDRATNVSTQYNVELRSALEDAIREYRFMSPELRPRLPRLPMHKKNRALVAALDSQLSNYFDDCEDLTDTHSILYCAAVAVCRVAHVKFAKDSRATRPKPTVPAWQRRIERRIGGARALIGKLICFREGNTRPRVMRFVRRAFSGTDIGPQDYMSRVTERIDFLKQKVYAWANRIRRYKRRVERYTQNRTFQSDERWVYRGWERPDQGVTGTRLPDDDVMCSFWRSIWSVPVSHTEGDWVREVERACDPIPEMGAITISPQDVARAVRPLPNWKSPGPDGLHNFWLKWFLRSHARLAAQYQTALESGSLPQFLTTGVTHLLHKSGSTAEPKNYRPITCLPTVYKVLTSILRAKINEHIDTNSIMSASQNGCRNGSRGTKELLLIDITITQQVRHSRKDLATCWIDYKKAYDSVPHTWLMRVLELYKVDATLRTFLMSCMGQWRTVLRYPGCRNIQRNSEPIRIERGIFQGDSLSPLWFCLALNPLSTLLEDSGLGYRLRRGSQAISHLLYMDDLKLFASNNLQLMELLKITETFSSAIRMEFGVDKCAVMHVKRGKIMESVGTQLSDSINLRALSASETYKYLGMSEALGINVTDMKQSLKERFFGRLKKVFNSLLSGGNKVRAFNGWVMPVLMYSFGILKWTQTELDALDRRVRTLLTAYRMHHPRSSVMRLYIPRKCGGRGFLNAKTLHNREVCSLREYFLKADVGMHRDVVAVDKGLTPLSLAKENWRKLVVLDTNDRREVWQSKELHGRFFRALHEPDVDFQASVAWLRFGDLFGETEGFVCAIMDEVIMTKNYRRFIVKDGTVDVCRACQRPGESIRHIISGCSRLANEEYLHRHNLVARIIHQQLALKYNLVESEVPYYRYVPDPVLENGNITLYWDRSIITDRTIIANKPDIVVVDRTERRAMIVDITVPHDGNLVKAEKDKQIKYLDLAREVVDMWDVNSAIIVPIVISANGLIAKSLDQHLRRLSLDSWIKGLIQRAVLLDTARIVRRFLSLEP

SEQ ID NO: 12329 - protein, 1106 aa, Atethmia centrago
MRWTRSINENVMRSYYGATEGGNNLTAYRVRMLSLFQVLEPAVNVSAQRLSDQVRVIQRNHMLDDTVLERLRSEIQSSHVIAPPSQTVVVLPQLDTHQADEGSDDRATNVSTQCNVELRSALEDAIREYRFMSPEVRPRLPRLPMHKKNRALVAVLDSQLSNYFDDCEDLTDTHSILYCAAVAVCRVAHVIFPNDSRATRPKPTVPIWQCRIERRIGGARALIGKLICFREGNTRPRVMRFVRRAFSGTDISPQDYMSRVTERIDFLKQKVYAWANRIRRYKRRVDRYTQNRTFQSDERWVYRGWEQRDQGVTDTRLPDDDVMCSFWRSIWSVPVSHTEGDWARKVERACDPLPEMGAITICPQDVARAVRPLPNWKSPGPDGLHNFWLKWFLGSHARLAAQYQTALESGSLPQFLTIGVTHLLHKSGSTAEPKNYRPITCLPTVYKVLTSILRAKINKHIDTNSIMSASQNGCRNGSRGTKELLLIDMTISQQVRRFRKDLSACWIDYKKAYDSVPHTWLMRVLELYKVDATLRTFLMSCMGQWRTVLRYPGCRNIQRNSEPIRIERGIFQGDSLSPLWFCLALNPLSTLLEDSGLGYRLRRGGQVISHLLYMDDLKLFASNNLQLMELLKITETFSSAIRMEFGVDKCSVMHVKRGEIVESVGTQLSDSINLRALSASETYKYLGMSEALGINVTDMKQSLKQRFFDRLKKVFNSLLSGGNKVRAFNGWVMPVLMYSFGILKWTQTELDALDRRVRTLLTAYRMHHPRSSVMRLYIPRKCGGRGFLNAKTLHNREVCSLREYFLEADVGMHRDVVAVDKGLTPLSLAKENWRKLVVLDTNDRREVWQSKELHGRFFRALHEPDVDFQASVAWLRFGDLFGETEGFVRAIMNEVIMTKNYRRFIVKDGTVDMCRACHRPGESIRHIISGCSHLANEEYLHRHNLVARIIHQQLALKYSLVESEVPYYRYVPDPVLDNGNITLYWDRSIITDRTIVANKPDIVVVDRTERRAMIVDITVPHDGNLVKAEKDKQIKYLDLAREVVDMWDVDSAIIVPIVVSANGLIAKSLDQHLRRLTLDGWIKGLIQKAVLLDTARIVRRFLSLEP

SEQ ID NO: 12330 - protein, 1194 aa, Autographa gamma
MLIRSRTRTPARPPYPDPSPSSASQLPDHVPAPAPEVASSSSDEYYSPPTTPTPVRRQGRRRPPSSLAPAGQPASSRAPAPGGDVRRMKWTLSINENVMRAYYGATEGETNLTAYRARMLSLFQGLEPDVNVSAQRLSDQVRVIQRNHRLDDATLDRLRSEVQRSPATSTPCPAVVPVTGSPPTNLVDGEEEDGAITVSTQCSENIRSTLEDTIREFRSTPPDIRPRLPRLPMHNRNKAIMGVLDSLLLAYFGSSEDLSDTHSILYCAALAACRVANVKINNQNLDTRPKPAVPAWQCRIERRVAEARALIGKLIAFKDGNSRPRVMRFVRRAFTGTSISPSEYTARVTERIDFFKQKVCAWANRIRRYKRRVDRFHLNRMFQRDQRWVFRTWERPVLGVDDGRLPDEDATNSFWRNIWSVPVSHSEGDWMRDVEESCEPIQEMGAITISPQDVANAIRPMSNWKAPGPDGLQNFWLKWFKSSHGCLASQFQCAIESESLPQFFTTGSTHLLHKTGSTTDPKNYRPITCLPTIYKLLTSILRVKINEHIDNHSIMSASQNGCRNGSRGTKELLLIDMAICQQVRRSKKNLSTCWIDYKKAYDSVPHSWLMRVLELYKINTTLRAFLLSCMRRWTTVLRYPGCRDIQQSGGPIRVERGIFQGDSLSPLWFCLALNPLSTLLENSRLGYSLRRGSQVISHLLYMDDLKLFASNELQLMGLLKITESFSNSIRMEFGVDKCAVMHVKQGGIVESQSIQLSDSINLRSLSAADTYKYLGMSEALGINVADMKQSLLTRFFGRLNKVLKSLLSGGNRVRAFNGWVMPVLMYSFGILKWTQTELDALDRRVRTLLTANRMHHPRSSVMRLYIPRKCGGRGFLNAKTLHNREVCNLREYFLQVDVGMHRDVVVVDKGFTPLSLGKENWHKPVVLSVKDRKDVWQSKELHGRYYRSLHGPDVDFLASVAWLRFGDLFGETEGFVCAIMDEVVMTNNYRKYIIKDGTVDRCRACHCPGESIRHIISGCSRLANGEYLHRHNQVARIIHQQLALRYKLVEAEVPYYRYVPDPVLDNGHVTLYWDRSIITDRTIVANKPDIVVIDRSERRALIVDVTIPHDENLVKAEKEKQLKYLDLAHEVVDMWEVDSAVIVPIVVTANGIIAKSLDQHLKRLSLGIWVKGLMQKAVLLDTARIVRRFLSLEP

SEQ ID NO: 12331 - protein, 1194 aa, Agrotis ipsilon
MLTRAASRRARPPSPESSLSSASPPPHTEPPATPAAAVASSSSDEYFSPPTTPPPARRRGGRRPPGCLGPRGPPASDRVPAPGGSVQRMRWTQPINENVMRSYYGATEGGNNLTAYRARMLSLFQVLEPAVNVSAQRLSDQVRVIQRNRMLDDSVLDRLRSETQCNHVIVPLSQAVVPSQSNQTTSQTDVVSNDMVTNVSNQCSEEMRSTLEGAIREYRFMSPELRPRLPRLPMHNKNRALVAVLDSQLSNYFDNCEDLTDAHSILYCAAVAACRMAHVKFSDDRATRPKLAIPAWQYRIERRIGGARTLIGKLICFREGNTRPRVMRFVRRAFSGTDINPRDYLSRVTERIDFLKQKVCAWANRIRRYKRRVERYNQNRTFQRDERWVYRSWEQPDQGVADRDLPDDDTMCSFWRSIWSVPVTHTEGEWTRDVERACDPITEMGVVLINPEDVARAVRPLPNWKSPGPDGLHNFWIKWFKRSHVRLAALFQSALESGSLPEFLTTGITHLLHKSGSTAEPKNYRPITCLPTLYKVLTSILRAKISKHIAENSIMSASQNGCRNGSRGTKELLLIDMAISQQVRRSRKDLSTCWIDYKKAYDSVPHTWLMRVLELYKVDTTLCTFLMSCMRQWRTVLHYPGCRHIQRTSEPIRIERGIFQGDSLSPLWFCLALNPLSTLLEDSGLGYRLRRGGQVISHLLYMDDLKLFAPNNLRLMELLKITETFSSAIRMQFGVDKCAVMHVKRGEIVESVSTQLSDSISLRSLSATETYKYLGMSEALGINVTDMKQSLKERFFGRLKKVFSSLLSGGNKVRAFNGWVMPVLMYSFGILKWTQTELDALDRRVRTLLTAYRMHHPRSSVMRLYIPRKCGGRGFLNAKTLHNREICNLREYFLKADVGMHRDVVAVDRGLTPLSLAKENWRKPVVLDTNDRMEVWQSKELHGRFFRALHGPDVDLSASVAWLRSGDLFGETEGFVCAIMDEVMMTNNYRRFIVKDGTVDICRACHRPGESIRHIISGCSRLANGEYLHRHNLVARIIHQQLALRYSLVESEVPYYRYVPDPVLESGNITLYWDQSIITDRTVVANRPDIVVVDRSERRTMIVDITVPHDENLVKAEKDKQIKYIDLAREVVDMWDVDSAVIVPIVVSAHGLIAKSLDQHLKRLSLGSWIKGQIQRAVLLDTARIVRRFLTLEP

SEQ ID NO: 12332 - protein, 1198 aa, Mesoligia furuncula
MLTRSALRKARLPPPDSSLSSASPPPVPSLTVSAVTTPAVAVASSSSDEYFSPPTTPPPARRRGGRRPPDGLGPRGPPASDRVPAPGGSVQRMRWTRSINENVMRSYYGATEGGNNLTAYRVRMLSLFQVLEPAVNVSAQRLSDQVRVIQRNHMLDDTVLDRLRNEMQSSHVIAPQPQTAVLLPQCNTNHADEGSNDRATNVSTQCNEELRSALEDAIREYRFMSPEHRPRLPRLPMHNKNRALVAALDSQLSNYFDDCEDLTDTHSILYCAAVAVCRVAHVKFANDSRATRPKPAIPAWQCRIERRIGGARALIGKLICFREGNTRPRVMRFVRRAFLGTDISPQDYMSCVTERIDFLKQKVYAWANRIRRYKRRVERYTQNRTFQSDERWVYRSWERPDQSVADTCLPDDEAMCSFWRNIWSVPVSHTEGDWAREVERACDPIPEMGAITICPQDVARAVRPLPNWKSPGPDGLHNFWIKWFLRSHARLASQFQTALESGSLPQFLTTGITHLLHKSGSTTEPKNYRPITCLPTVYKVLTSILRAKIDKHINTNSIMSVSQNGCKNGSRGTKELLLIDMAISQQVRRSRKDLSTCWIDYKKAYDSVPHTWLMRVLELYKIDATLRTFLMSCMGQWRTVLRYPGCRNIQRNSEPIRIERGIFQGDSLSPLWFCLALNPLSTLLEDSGLGYRLRRGGQVISHLLYMDDLKLFAPNNLQLMELLKVTQTFSSAIRMEFGVDKCAVMHVKRGEIVESVGTQLSDSTNLRALSASETYKYLGMSEALGINVTDMKQSLKERFFGRLKKVLNSLLSGGNKVRAFNGWVMPVLMYSFSILKWTQTELDALDRRVRTLLTANRMHHPRSSVIRLYIPRKCGGRGFLNAKTLHNREICSLREYFLETDVGMHRDVVAVDKGLTPLSLAKENWRKPVVLDTNDRMEVWQSKELHGRFFRALHGPDVDLLASVAWLRFGDLFGETEGFVCAIMDEVMMTNNYRRFIVKDGTVDICRACHRPGESIRHIISGCSRLANGEYLHRHNLVARIIHQQLALKYSLVESEVPYYRYVPDPVLENGNISLYWDRSIITDRTIVANKPDIVVVDRSERRAMIVDITVPHDENLVKAEKDKQIKYLDLAREVVDMWDVDSAIIVPIVVTANGLIAKSLDQHLRRLSLGSWIKGLIQKAVLLDTARIVRRFLSLEP

SEQ ID NO: 12333 - protein, 1206 aa, Mesoligia furuncula
MLTRSRARHLLKNTHPTSSGSSLSSASQLPDPAPDVSSVRPAAAVASSSSDEYFSPPTTPPPVCRRGRGRPPASLGLRGPPASDRVPAPGGSVQRMRWTQTVNENVMRAYFGATEGGSNLTAYRGRMLSLFQVLEPAVNVSAQRLSDQVRVIQRNHMMDNVVLDRLRLESRNSHVTPASSLIAVQLQNVPSVSPRPDHVYVEDDDEAITVSSQCNARLRSALEDAFREYRSIPPELRPRLPRLPMHKKNKALVCALDLQLSNCFNNSKDLTDTHSILYCAAVAACRVAHVKFPNSDRAPRPKPAVPAWQCRIECRIGEARALIGKLICFREGNTRPRVMRFVRRAFSGTDISSRDYLSRVTERIDFLKQKIYAWANRIRRYRRRVERYTQNRTFQNDERWVYRAWERPDQGVTDTPLPDDDAMCSFWRNIWSVPVSHTEGDWTAKIERACDLIPEMGVLTISPQDVARAVRPLPNWKSPGPDGLHNFWIKWFQGSHARLASQFQSALESGSLPQFLTTGITHLLHKSGSTADPKNYRPITCLPTVYKVLTSILRAKINKHIDTNSIMSVSQNGCRNGSRGTKELLLIDMTISQQVRRFRKDLSTCWIDYKKAYESVPHTWLMRVLELYKVDTTLRTFLMSCMGQWRTVLRYPGCRNIQRNSEPIRIERGIFQGDSLSPLWFCLALNPLSTLLEDSGLGYRLRRGGQVISHLLYMDDLKLFAPNNLRLMELLKITETFSSAIRMEFGVDKCAVMHVKRGEIVESVGTQLSDSTNLRALSASETYKYLGMSEALGINVTDMKQSLKERFFGRLKKVFNSLLSGGNKVRAFNGWVMPVLMYSFGILKWTQTELDALDRKVRTLLTANRMHHPRSSVMRLYIPRKCGGRGFLNAKTLHNREICSLREYFLETDVGMHRDVVAVDKGLTPLSLGKENWRKPVVLDTNDRMEVWQSKELHGRFFRALHGPDVDLLASVAWLRFGDLFGETEGFVYAVMDEVMMTNNYRRFIVKDGTVDICRACHRPGESIRHIISGCSRLANGEYLHRHNLVARIIHQQLALKYSLVESEVPYYRYVPDPVLENGNITLYWDRSIITDRTIVANKPEIVVVDRSERRAMIVDITVPHDENLVKAEKDKQVKYLDLAREVVDMWDVDSAIIVPIVVTANGLIAKSLDQHLKRLSLGSWIKGLIQKAVLLDTARIVRRFLSLEP

SEQ ID NO: 12334 - protein, 962 aa, Mesoligia furuncula
MHKKNKALVCALDSQLSNYFNDSKDLTDTHSILYCAAVAACRVAHVKFPNSDRAPRPKPAVPAWQCRIECRIGEARALIGKLICFREGNTRPRVMRFVRRAFSGTDISSRDYLSRVTERIDFLKQKICAWANRIRRYRRRVERYTQNRTFQSDERWVYRTWERPDHGVTDTRLPDDDAMCSFWRNIWSVPVSHTEGDWTRKIERTCDLLPEMGVLTISPQDVVRAVRPLPNWKSPGPDGLHNFWIKWFQGSHARLASQFQSALESGSLPKFLTTGITHLLHKSGSTADPKNYRPITCLPTVYKVLTSILRAKINKHIDTNSIMSVSQNGCGNGSRGTKELLLIDMTISQQVRRFRKDLSTCWIDYKKAYDSVPHTWLMRVLELYKVDTTLRTFLMSCMGQWRTVLRYPGCRNIQRNSEPIRIERGIFQGDSLSPLWFCLALNPLSTLLEDSGLGYRLRRGGQVISHLLYMDDLKLFAPNNLQLMELLKITETFSSAIRMEFGVDKCAVMHVKRGEIVESVGTQLSDSTNLRALSASETYKYLGMSEALGINVTDMKQSLKERFFGRLKKVFNSLLSGGNKVRAFNGWVMPVLMYSFGILKWTQTELDALDRKVRTLLTGNRTHHPRSSVMRLYIPRKCGGRGFLNAKTLHNREICSLREYFLETDVGMHRDVVAVDKGLTPLSLGKENWRKPVVLDTNDRMEVWQSKELHGRFFRALHGPDVDLIASVAWLRFGDLFGETEGFVCAIMDEVMMTNNYRRFIVKDGTVDICRACHRPGESIRHIISGCSRLANGEYLHRHNLVARIIHQQLALKYSLVESEVPYYRYVPDPVLENGNITLYWDRSIITDRTIVANKPDIVVVDRSERRAMIVDITVPHDENLVKAEKDKQVKYLDLAREVVDMWDVDSAIIVPIVVTANGLIAKSLDQHLKRLSLGSWIKGLIQKAVLLDTARIVRRFLSLEP

SEQ ID NO: 12335 - protein, 1207 aa, Mesoligia furuncula
MLTRSRARQLNKTTHPTSSGSSLSSASPLPEPAPDVSPETPAAAVASSSSDEYFSPPTTPPPPVCRRGRGRPPASLGLRGPPASDRVPAPGGSVQRMRWTQTVNENVMRAYFGATEGGSNLTAYRGRMLSLFQVLEPAINVSAQRLSDQVRVILRNHMLDNVVLDRLRLESRNSHVTSASSSVAVQLQNLPNVSQRPDRVDVEDGDEAISVSPQCNARLRSALEDAFCEYRSVPPGLRPRLPRLPMHKKNKALVCALDSQLSNYFNDSKDLTDTHSILYCAVVAACRVAHVKFPNSDRAPRPKPAVPAWQCRIECRIGEARALIGKLICFREGNTRPRVMRFVRRAFSGTDISSRDYLSRVTERIDFLKQKICAWANRIRRYRRRVERYTQNRTFQSDERWVYRTWERPDHGVTDTRLPDDDAMCSFWRNIWSVPVSHTEGDWTRKIERTCDLLPEMGVLTISPQDVARAVRPLPNWKSPGPDGLHNFWIKWFQGSHARLASQFQSALESGSLPKFLTTGITHLLHKSGSTADPKNYRPITCLPTVYKVLTSILRAKINKHIDTNSIMSVSQNGCGNGSRGTKELLLIDMTISQQVRRFRKDLSTCWIDYKKAYDSVPHTWLMRVLELYKVDTTLRTFLMSCMGQWRTVLRYPGCRNIQRNSEPIRIERGIFQGDSLSPLWFCLALNPLSTLLEDSGLGYRLRRGGQVISHLLYMDDLKLFAPNNLQLMELLKITETFSSAIRMEFGVDKCAVMHVKRGEIVESVGTQLSDSTNLRALSASETYKYLGMSEALGINVTDMKQSLKERFFGRLKKVFNSLLSGGNKVRAFNGWVMPVLMYSFGILKWTQTELDALDRKVRTLLTANRMHHPRSSVMRLYIPRKCGGRGFLNAKTLHNREICSLREYFLETDVGMHRDVVAVDKGLTPLSLGKENWRKPVVLDTNDRMEVWQSKELHGRFFRALHGPDVDLIASVAWLRFGDLFGETEGFVCAIMDEVMMTNNYRRFIVKDGTVDICRACHRPGESIRHIISGCSRLANGEYLHRHNLVARIIHQQLALKYSLVESEVPYYRYVPDPVLENGNITLYWDRSIITDRTIVANKPDIVVVDRSERRAMIVDITVPHDENLVKAEKDKQVKYLDLAREVVDMWDVDSAIIVPIVVTANGLIAKSLDLHLKRLSLGSWIKGLIQKAVLLDTARIVRRFLSLEP

SEQ ID NO: 12336 - protein, 1138 aa, Mesoligia furuncula
MLTRSAARRARLPPPDSSLSSASPPPVPSLTVSAVTTPAAAVASSSSDEYFSPPTTPPPARRRGGRRPPDGLGPRGPPASDRVPAPGGSVQRMRWTQSINENVMRSYYGATEGGNNLTAYRVRMLSLFQVLEPAVNVSAQRLSDQVRVIQRNHMLDDTVLDRLRNETQSSHVIAPQSQTAVVLPQSNTSHADEGSNDRATNVSTECNEELRSTLEDAIQEYRFMSPELRPRLPRLPMHNKNRALVAVLDSQLSNYFDGCEDLTDTHSILYCAAVAACRVAHVKFANDSRATRPKPAVPAWQCRIERRIGEARALIGKLTCFREGNTRPRVMRFVRRAFLGTDISPQDYMSCVTERIDFLKQKVYAWANRIRRYKRRVERYTQNRTFQSDERWVYRDWERPDQSVTDTCLPDDDAMCSFWRSIWSVPVSHTESDWTREVERACDPIPEMGAITISPQDVARAVRPLPNWKSPGPDGLHNFWIKWFTRSHARLASQFQTALESGSLPQFLTTGITHLLHKSGSTAEPKNYRPITCLPTVYKVLTSILRVKIDKHINTNSIMSASQNGCRNGSRGTKELLLIDMTISQQVRRFRKDLSTCWIDYKKAYDSVPHTWLMRVLELYKIDTTLRTFLMSCMGQWRTVLRYPGCRNIQRNSEPIRIERGIFQGDSLSPLWFCLALNPLSTLLEDSGLGYRLRRGGQVISHLLYMDDLKLFAPNNLQLMELLKITETFSSAIRMEFGVDKCAVMHVKRGEIVESVGTQLSDFTNLRALSASETYKYLGMSEALGINVTDMKQSLKERFFGRLKKVFNSLLSGGNKVRAFNGWVMPVLMYSFGILKWTQTELDALDRKVRTLLTANRMHHPRSSVMRLYIPRKCGGRGFLNAKTLHNREICSLREYFIEIDVGMHRDVVAVDKGLTPLSLGKENWRKPVVLDTNDRMEVWQSKELHGRFFRALHGPDVDLLASVAWLRFGDLFGETEGFVCAIMDEVMMTNNYRRFIVKDGTVDICRACHRPGESIRHIISGCSRLANGEYLHRHNLVARIIHQQLALKYSLVESEVPYYRYVPDPVLENGNITLYWDRSIITDRTIVANKPDIVVVDRSERRAMIVDITVPHDENLVKAEKDKQIKYLDLAHEVVDM

SEQ ID NO: 12337 - protein, 1198 aa, Mesoligia furuncula
MLTRLAARRARLPPPDSSLSSASPPPVPSPTVSAVMTPAAAVASSSSDEYFSPPTTPPPARRRRGRRPPDGLGLRGPPASDRVPAPGGSVQRMRWTQSINENVMRSYYGATEGGNILTAYRVRMLSLFQVLEPAVNVSAQRLSDQVRVIQRNHMLDDTVLDRLRSEMQSSHVIAPQSQTAVILPQPNISHADEGSNDRAINVSTQCNEELRSALEDAIQEYRFMSPELRPRLPRLPMHNKNRALVAALDSQLSKYFDTCEDLIDTHSILYCAAVAACRVAHVKFANDSRATRPKQAVPAWQCRIERRIGGARTLIGKLICFREGNTRPRVMRFVRRAFSGTDISPQDYMSCVTERIDFLKQKVYAWANRIRRYRRRVERYTQNRTFQSDERWVYRGWERPDQGVAETCLPDDDAMCSFWRNIWSVPVSHTEGDWAREVERACDPIPEMGAITICPQDVARAVRPLPNWKSPGPDGLHNFWIKWFPRSHALLASQFQTALKSGSLPQFLTTGITHLLHKSGSTAVPKNYRPITCLPTVYKVLTSILRTKINKHIDTNSIMSASQNGCRNGSRGTKELLLIDMAISQQVRRFRKDLSTCWIDYKKAYDSVPHTWLMRVLELYKVDTTLRTFLMSCMGQWRTVLRYPGCRNIQRNSEPIRIERGIFQGDSLSPLWFCLALNPLSTLLEDSGLGYRLRRGGQVISHLLYLDDLKLFAPNNLRLMELLKITETFSSAIRMEFGVDKCAVMHVKRGEIVESVGTQLSDSTNLRALSASETYKYLGMSEALGINVTDMKQSVKERFFGRLKKVLNSLLSGGNKVRAFNGWVMPVLMYSFGILKWTQTELDALDRRVRTLLTANRMHHPRSSVMRLYIPRKCGGRGFLNTKTLHNREICSLREYFLETDVGMHRDVVIVDKGLTPLSLAKENWRKPVVLDTNDRMEVWQSKELHGRFLRALRGPDVDLQASVAWLRFGNLFGETEGFVCAIMDEVMMTNNYRRFIVKDGTVDICRACHRPGESIRHIISGCSRLANGEYLHRHNLVARIIHQQLALKYNLVESEVPYYRYVPDPVLENGNITLYWDRSIITDRTIVANKPDIVVVDRSERRAMIVDITVPHDENLVKAEKDKQIKYLDLAREVVDMWDVDTAIIVPIVVTANGLIAKSLDQHLRRLSLGSWIKGLIQRAVLLDTARIVRRFLSLEP

SEQ ID NO: 12338 - protein, 1199 aa, Spilarctia lutea
MLTRARLRAQLSPPDSSLRSTLPSPEAITEVPVDAEASSSSSSDEFFSPPTSPIPVRRQGRGRPPTSLGSRGPLTSNRAPATGGDVRRMKWTHSINENVMRAYFRATELGTNLTAYRVRLVSLFQELEPSVNVSAQRLSDQVRAIQRCHLLDDAVLERIRSDIRNILIVPSSSHAVDLVPINTPQLPHDHYVDELVESEDISVSTQCNNKIRSALEDAIQEYRYVNWNNRPRFPRLPIHKRNLALVSALDSLLSDYFDNSEDLSDTHSILYCAAVAVCRVANVKFRENMTYVRPKNTIPAWQCRIERRIAETRTLIGKLVSFRSGNTRPRVMRFVKHAFSGTTISPGQYMSCVTERIDFLKQKVYAWANRIRRYRKRVDRYNQNRMFQRNEKWVYRKWEEPSPSVSDGQFPDDNATNTFWRSIWSVPVTHTEGDWCRDVEHSCESILPMEPLTIGKDDVSCAARSLPNWKSPGPDGLHNFWLKWFRSSHACLASQFQAAVDSSSLPQFLTTGITHLLYKSGSAMDPKNFRPITCLPTVYKLLTSILRLKISTHINNNSIISVSQNGCRSGTRGTKELLIMDMTISQQVRRNRKSLATCWIDYKKAYDSVPHTWLLRVLELYKIDTTLCTFLKSCMGQWRTVLRYPGCRQSAMTDVLIKIERGIFQGDSLSPLWFCLALNPLSTLLEGSELGYRLRKDDRAISHLLYMDDLKLLAPTKLQLTELLKVTENFSNSIKMEFGVDKCAVMYVKKGLIVESEGIELSDSIKLRSLSATESYKYLGFSQSLGIPESDMKQALRERFFGRLKKVLKSLLSGGNRVRAYNGWVMPVLMYSFGVLRWTQTELDALDRRVRTLLTAFRMHHPRSSVMRLYIPRKFGGRGLLNIKTLHNREIYNLREYFLHTDVGIHRSVVAVDSGLTPLALAKENWRKPVVLSTNDRREVWRGKELHGRFYRALHGPDIDFKTSTSWLRYGDLFGETEGFVCAIMDEVIMTNNYRKYILKDGTVDICRACHRPGESIRHIISGCSRLANGEYLHRHNQVARIVHQQLALKYHLVNSEVPYYRYVPDPVLENGRATLYWDRSIITDRTIVANKPDIVVIDRLERRAIIIDIAVPHDENLVKVEKEKQIKYLDLSHEIVDMWNVDSVIMVPIVVSAHGLIAKSLDQHLKRLTLEGWIKGLIQKAVLLDTARIVRRFLSLES

SEQ ID NO: 12339 - protein, 1197 aa, Spilarctia lutea
MLTRARRRALITSPDSSLRSALPSPEEAIEVPAGAEASSSSSSDEFFSPPTSPIPVRRQGRDRPPTSLGSRGPLTSNRAPATGGDVRRMKWTHSINENVMRAYFRATELGTNLTAYRVRLVSLFQELEPAVNVSAQRLSDQVRAIQRCHLLDDAVLERIRSDVRNTLTIPSSSHKVDVVVNTPQLPDNHDVDEQRESEIISVSTQCNDRIRSALEDAIQEYRYVNYNNRPRLPRLPIHKRNLALVGALNSLLPDYFGNSEGLSDTHSILYCAAIAVCRVVGVKFIERITTRTKNTVPAWQYRIERRIAETRTLIGKLISFKSGNTRPRVMRFVKQAFLGTTISPQQYMSSVTERIDFLKQKVCAWANRIRRYKKRGDRFNQNRMFQTNEKWVYRKWEAPNPCDRDGHLPDENATNTFWRNIWSVPVTHTDGDWMRDVKRSCESIRNMEPVRINKEDVSCAVRSLPNWKAPGPDGLHNFWLKWFRSSHACLASQFQAALDSGSLPQFLTTGITHLLYKSGGTMDPKNFRPITCLPTLYKLLSSILRIKITTHINHNSILSISQNGCRSGTRGTKELLIIDMTISQQVRRNRRNLATCWIDYKKAYDSVPHTWLLKVLELYKIDKTLCTFLKSCMGQWRTVLRYPGCRQSPMTDVLIKIERGIFQGDSLSPLWFCLALNPLSTLLEGSELGYGLRKDDRVISHLLYMDDLKLLAPTKLQLTALLKITENFSNSIKMEFGVDKCAVMYVKKGLIVESEGVELSDSTKLRSLSVTEGYKYLGFTQSLGIPESDMKQALRERFFGRLKKVLKSLLSGGNKVRAYNGWVMPVLMYSFGILRWTQTELDALDRGVRTLLTAFRMHHPRSSVMRLYIPRKLGGRGLLNIKTLHNREIYNLREYFLHTDVGMHRSVVAVDTGLTPLALAKENWRKPVVLSTDDRREVWKGKELHGRFYRALHGPDIDFKTSTSWLRYGDLFGETEGFVCAIMDEVIMTNNYRKYILKDGTVDICRACHRPGESIRHIISGCSRLANGEYLHRHNQVARIVHQQLALKYNLVISEVPYYRYVPDPVLENGRATLYWDRSIITDRTIVANKPDIVVIDRLERRAIIIDIAVPHDENLVKVEKEKQIKYLDLSHEIVDMWNVDSVIIVPIVVSVHGLIARSLDQHLKRLTLDGWIKGLIQKAVLLDTARIVRRFLSLEP

SEQ ID NO: 12340 - protein, 1111 aa, Spilarctia lutea
MKWTHSINENVMRAYFRATELGTNLTAYRVRLVSLFQELEPAINVSAQRLSDQVRAIQRCHLLDDAALERIRSDIRNSLTVPSSSHVVDVVTNTTPQVPQNEDVSELVDSEIMSVSNQYNDRIRSTLEDAIREYRYVNFNNRPRLSRLPIHKRNLALVSALDSLLPDYFSNSEDLSDAHSILYCAAIAVCRVAGVKFAENTTTTRQENTVPAWQCRIERRIAEARTLIGKLISFRSGNMRPRVMRFVKRAFLGTTINPQEYMSCVTERIDFLKQKVYAWANRIRRYRKRVDRYNQNRMFQRNEKWVYRKWENLRPCLSDGQVPDENATNSFWHSIWSVPVTHTEGDWYRDVERSCESLLPMEPISINEEDVSCAVRSLPNWKAPGPDGLHNFWLKWFRSSHACLASQFQTALDSGSLPQFLTTGITHLLYKSGDAMDPKNFRPITCLPTLYKLLTSILRLKITTHINHNSILSISQNGCRSGTRGTKELLIIDMTISQQVRRNRKSLATCWIDYKKAFDSVPHTWLLRVLELYKIDTTLCTFLKLCMGQWRTALRYPECRQSAMNDVLIKIERGIFQGDSLSPLWFCLALNPLSTLLEGSGLGYRFQKDDRGISHLLYMDDLKLLAPTKLQLTGLLKVTENFSNSIKMEFGVDKCAVMYVKKGEIVESEGIELSDATKLRSLSVTETYKYLGFSQSLGIPEPDMKQTLRERFFSRLKKVLKSLLSGGNKVRACNGWVMPVLMYSFGVLRWTQTELDAIDRRVRTLLTAFRMHHPRSSVMRLYIPRKLGGRGLLNIKTLHNREVYNLREYFLQTDVGVHRSVVTVDTGLTPLALAKENWRKPVVLSTNDRREVWKGKVLHGRFYRALNGPDIDFKASTSWLRYGDLFGETEGFVCAIMDEVIMTSNYRKYILKDGTVDICRACHRPGESIRHIVSGCSRLANGEYLHRHNQVARIVHQQLALKYNLVSSEVPYYRYVPDPVLENGRATLYWDRSIITDRTIVANKPDIVVMDRLERRAMIVDIAVPHDENLVKVEKEKQIKYLDLSHEIVDMWNVDSAIIVPIVVSAHGLIAKSLDQHLKRLTLGGWIKGLIQKAVLLDTARIVRRFLSLEP

SEQ ID NO: 12341 - protein, 1175 aa, Spilarctia lutea
MLTRARRRAQLSPPDSSLRSALPSPEEAIEVPAGAEASSSSSSDEFFSPPTSPIPVRRQGRGRPPTSLGSRGPLTSNRAPAAGGDVRRMKWTHSINENVMRAYFRATELGTNLTAYRVRLVSLFQELEPAVNVSAQRLSDQVRAIQRCHLLDDAALERIRSDIRNSLTVPSSSHVLNVVTNSTPQVPQNDDISELVDSEIISVRTQYNDRIRSTLEDAIREYRYVNLNNRPRLSRLPIHKRNLALVSALDSLLPKYFSNSEDLSDTHSILYCAAIAVCRVAGVKFAEYTTTTRQENTLPAWQYRIERRIAEARTLIGKLMSFRSGNTRPRVMRFVKRAFLGTTISPQEYMSCVTERIDFLKPKVCAWANRIRRYRKRVDRYNQNRMFQRNEKWVYRKWENLSPCMSDGQVPDENATNSFWRNMWSVPVTHTEGDWYRDVERSCESLLPMEPISIDEEDVSCAVRSLPNWKAPGPDGLHNFWLKWFRSSHACLASQFQTALDSGSLPQFLTTGITHLLYKSGDAMDPKNFRPITCLPTLYKLLTSILRLKITTHINHNSILSISQNGCRSGIRGTKELLIIDMTISQQVRRNRKSLATCWIDYKKAFDSVPHTWLLKVLELYKIDTTLCTFLKVCMGQWRTALRYPGCRQSAMNDVLIKIERGIFQGDSLSPLWFCLALNPLSTLLEGSGLGYRLQKDDRVISHLFYMDDLKLLAPTKLQLTALLKVTENFSNSIKMEFGVDKCAVMYVKKGEIVESEGIELSDSTKLRSLSATETYKYLGFSQSLGMPESDMKQTLRERFFSRLKKVLKSLLSGGNKVRACNGWVMPVLMYSFGVLRWTQTELDAIDRRVRTLLTAFRMHHPRSSVIRLYIPRRLGGRGLLNIKTLHNREVYNLREYFLQTDVGVHRSVVTVDTGLTPLALAKENWRKPVVLSTNDRREVWKGKELHGRFYRALHGPDIDFKTSTSWLRYGDLFGETEGFVCAIMDEVIMTNNYRKYILKDGTVDICRACHRPGESIRHIISGCSRLANGEYLHRHNQVARIVHQQLALKYHLVNSEVPYYRYVPDPVLENGRATLYWDRSIITDRTIVANKPDIVVIDRLERRAIIIDIAVPHDENLVKVEKEKQIKYLDLSHEIVDMWNLDSVIIVPIVVSAHGLIAKSLDQHLKRLTLEGWV

SEQ ID NO: 12342 - protein, 1107 aa, Xestia c-nigrum
MRWTSSNNENVMRAYYGATEGGNNLTAYRVRMLSLFQVLEPAVNVSAQRLSDQVRVIQRNRMLDDTVLDRLRTEMQSSHVTAMPPSQAVVSPQSSSIPNRDGDVSSEKVTNVSTQCNEDMRSALEGAIREYRFIAPELRPRLPRLPMHNKNRMLVAVLDSQLSNYFDTCEDLTDVHSILYCAAVAACRVAHVKFSDDRATRPKPAIPAWQYRIEQRIGGARALICKLICFREGNTRPRVMRFVRRAFSGTDISPRDYISRVTERIDFLKQKVYAWASRIRRYKRRVDRYTQNRTFQRDERWVYRAWERPDQGVADTCLPDDDAMCSFWRSIWSVPVSHAEGEWTRVIERVCDPVLEMGAITISPQDVACAVRPLPNWKSPGPDGLHNFWIKWFTRSHARLATLFQSALESGSLPEFLTTGVTHLLHKSGSTTEPKNYRPITCLPTIYKVLTSILRTKINKHIDDNSIMSASQNGCRNGSRGTKELLLIDMAISQQVRRSRKDLSTCWIDYKKAYDSVPHTWLMRVLELYKVDATLRTFLMSCMGQWRTVLRYPGCRQIQRNSEPIRIERGIFQGDSLSPLWFCLALNPLSTLLEDSGLGYRLRKDGQVISHLLYMDDLKLFAPNDLQLMELLKVTETFSSAIRMEFGVDKCAVMHVKRGEIVESVGTQLSDSINLRSLSATETYKYLGMSEALGINVADMKQSLKERFFGRLKKVFNSLLSGGNKVRAFNGWVMPVLMYSFGILKWTQTELDALDTKVRKLLTAYRMHHPRSSVMRLYIPRKCGGRGFLNAKTLHNREICSLREYFLEANVGMHRDVVAMDKGLTPLSLAKENWRKPVVLTTDDRRKEWQSKELHGRFYRALHGPDVDFLASVSWLRSGDLFGETEGFVCAIMDEVMMTNNYRRFIVKDGTVDICRACHRPGESIRHIISGCSRLANGEYLHRHNLVARIIHQQLALKYNLVESEVPYYRYVPDPVLDNGSITLYWDQSIITDRTVIANRPDIVVMDRSERRAMIVDITVPHDENLVKAEKDKQIKYLDLAREVVDMWEVDSAIIVPIVVSAHGLIAKSLDQYLRRLSLGSWIKGLIQKAVLLDTARIVRRFLSLEP

SEQ ID NO: 12343 - protein, 1197 aa, Xestia c-nigrum
MLTRSAARRALLPPPDPSLSSASTPPEPSPIVSAVTPAVAVASSSSDEYFSPPTTPPPARRRGGRRPPDSLGPRGPPASDRVPAPGGSVQRMRWTQSNNENVMRAYYGATEGGNNLTAYRVRMLSLFQVLEPAVNVSAQRLSDQVRVIQRNRMLDDTVLDRLRTEVQSSHVTATPPSQAVVPPQSTVITDRDDDVCSDMITNVATQCSEDMRSALEGAIRKYRFVTPELRPRLPRLPMNNKNRMLVAVLDSQLSNYFDDCEDLTDVHSVLYCAAVAACRVARVKFSDDRVTRPKPAVPAWQYRIEQRIGGARALIGKLICFREGNTRPRVMRFVRRAFSGTDISPRDYMSRVTERIDFLKQKVYAWASRIRRYKRRVDRYTLNRTFQRDERWVYRAWERPDQGVADTHVPDDDAMCSFWRSIWSVPVSHAEGEWTRVIERACDPVPEMGAITISPQDVACAVRPLPNWKSPGPDGLHNFWIKWFTGSHARLATLFQSALESGSPEFLTTGLTHLLHKSGSTAEPKNYRPITCLPTVYKVFTSILRTKICKHIDDNSVMSASQNGCRNGSRGTKELLLIDMAISQQVRRSRKDLSTCWIDYKKAYDSVPHTWLMRVLELYKVDATLRTFLMSCMRQWRTVLRYPGCRQIQRNSEPIRIERGIFQGDSLSPLWFCLALNPLSTLLEDSGLGYQLRKDGRVISHLLYMDDLKLFAPNDLQLMELLKVTETFSSAIRMEFGVDKCAVMHVKRGEIVESVGTQLSGSINLRSLSATETYKYLGMSEALGINVADMKQSLKERFFGRLKKVFNSLLSGGNKVRAFNGWVMPVLMYSFGILKWTQTELDALDTKVRKLLTAFRMHHPRSSVMRLYIPRKCGGRGFLNAKTLHNREICNLREYFQEADVEMHRDVVAMNKGLTPLSLAKENWRKPIVLTTDDRRKEWQGKELHGRFYRALHGPDVDFLASVSWLRSGDLFGETEGFVCAIMDEVMMTNNYRRFIVKDGTVDIYRACHRPGESIRHIVSGCSRLANGEYLHRHNLVARIIHQQLALKYNLVESEVPYYRYVPDPVLVNGNITLYWDQSIITDRTVIANRPDIVVMDRSERRAMIVDITVPHDENLVKAEKDKQIKYLDLAREVVDMWEVDSAIIVPIVVSAHGLIAKSLDQHLRRLSLGSWIKGLIQKAVLLDTARIVRRFFSLKP

SEQ ID NO: 12344 - protein, 1106 aa, Griposia aprilina
MRWTRSINENVMRSYYGATEGGNNLTAYRVRMLSLFQVLEPAVNVSAQGLSDQVRVIQRNHMLDDTVLDRLRNEMQSSHVIAPPSQTVVVLPQSNTSQADKESDDRATNVSTQCNDELRSALEDAIREYRFISPELRPRLPRLPMHNKNRVLVAALDAQLSNYFDDCVDLTDTHSILYCAAVAACRVARVKFANDSRATRPKPAVPAWQCRIERRIGGARALIGKLICFREGNTRPRVMRFVRRAFAGTNISPQDYMSCVTERIDFLKQKVYAWANRIRRYKRRVERYTQNRTFQRDERWVYRGWERPDQGVADTCLPDDDAMCSFWRNIWSVPVSHTEGDWIREVERACDPIPEMGAITICPQDVTRAVRPLPNWKSPGPDGLHNFWIKWFGRSHARLAAQYQVALESGSLPQFLTTGVTHLLHKSGSTAEPKNYRPIACLPTVYKVLTSILRDKINKHIDTNYIMSPSQNGCRNGSRGTKELLLIDMAISQQVRRSRKDLSTCWIDYKKAYDSVRHTWLMRVLELYKVEATLRTFLMSCMGQWRTVLRYPACGNTQRNSEPIRIERGIFQGDSLSPLWFCLALNPLSTLLEDSGLGYRLRRGGQVISHLLYMDDLKLFAPNNSQLMDLLKVTETFSSAIRMEFGVDKCAVMHVKRGEIVESVGTQLSDSINLRALSASETYKYLGMSEALGINGTDMKQSLKDRFFGRLKKVFNSLLSGGNKVRAFNGWVMPVLMYSFGILKWTQTELDALDRKVRTLLTANRMHHPRSSVMRLYIPRKCGGRGFLNAKTLHNREICSLREYFLEADVGMHRDVVTVDKGLTPLSLGKENWRKPVVLDTNDRMEVWQSKELHGRFFRALHGPDVDQLASVAWLRFGDLFGETEGFVCAIMDEVMMTNNYRRFIVKDGTVDICRACHRPGESIRHIISGCSRLANEEYLHRHNLVARIIHQQLALKYSLVESEVPYYRYVPDPVLENGHITLYWDRSIITDRTIVANKPDIVMVDRLERRAMIVDITVPHDGNLVKAEKDKQIKYLDLAREVVDMWDVDSAIIVPIVVTANGLIAKSLDQHLRRLSLGSWIKGLIQKAVLLDTARIVRRFLSLEP

SEQ ID NO: 12345 - protein, 1106 aa, Griposia aprilina
MRWTRSINENVMRSYYGATEGGNNLTAYRVRMLSLFQVLEPAVNVSAQRLSDQVRVIQRNHMLDDTVLDRLRNEMQSSHVIAPPSQTVVVLPQSNTSQADEESDDRATNVSTQCNDELRSALEDAIREYRFISPELRPRLPRLPMHNKNRVLVAALDAQLSNYFDDCVDLTDTHSILYCAAVAACRVAHVKFANDSRATRPKPAVPAWQCRIERRIGEARALIGKLICFREGNTRPRVMRFVRRAFAGTNISPQDYMSCVTERIDFLKQKVYAWANRIRRYKRRVERYTQNRTFQRDERWVYRGWERPDQGVADTCLPDDDAMCSFWRNIWSVPVSHTEGDWTREVERACDPIPEMGAITICPQDVTRAVRPLPNWKSPGPDGLRNFWIKWFGRSHARLAAQYQVALESGSLPQFLTTGVTHLLHKSGSTAEPKNYRPIACLPTVYKVLTSILRDKINKHIDTNYIMSPSQNGCRNGSRGTKELLLIDMAISQQVRRSRKDLSTCWIDYKKAYDSVPHTWLMRVLELYKVEATLRTFLMSCMGQWRTVLHYPACRNTQRNSEPIRIERGIFQGDSLSPLWFCLALNPLSTLLEDSGLGYRLRRGGQVISHLLYMDDLKLSAPNNSQLMDLLKVTETFSSAIRMEFGVDKCAVMHVKRGEIVESVGTQLSDSINLRALSASETYKYLGMSEALGINGTDMKQSLKDRFFGRLKKVFNSLLSGGNKVRAFNGWVMPVLMYSFGILKWTQTELDALDRKVRTLLTANRMHHPRSSVMRLYIPRKCGGRGFLNAKTLHNREICSLREYFLEADVGMHRDVVTVDKGLTPLSLAKENWRKPVVLDTNDRMEVWQSKELHGRFFRALHGPDVDQLASVAWLRFGDLFGETEGFVCAIMDEVMMTNNYRRFIVKDGTVDICRACHRPGESIRHIISGCSRLANEEYLHRHNLVARIIHQQLALKYSLVESEVPYYRYVPDPVLENGHITLYWDRSIITDRTIVANKPDIVMVDRLERRAMIVDITVPHDGNLVKAEKDKQIKYLDLAREVVDMWDVDSAIIVPIVVTANGLIAKSLDQHLRRLSLGSWIKGLIQKAVLLDTARIVRRFLSLEP

SEQ ID NO: 12346 - protein, 1198 aa, Griposia aprilina
MLTRSAARRARPPPPDSSLSSASLPPVSSPTVSAVTTPAAVVASSSSDEYFSPPTTPPPVRRRGGHRPPDGLGPRGPPASDRVPAPGGSVQRMRWTRSINENVMRSYYGATEGGNNLTAYRVRMLSLFQVLEPAVNVSAQRLSDQVRVIQRNHMLDDTVLDRLRNEMQSSHVIAPPSQTVVVLSQSNTSQADEESDDRATNVSTQCNDELRSALEDAIREYRFISPELRPRLPRLPMHNKNRVLVAALDAQLSNYFDDCVDLTDTHSILYCAAVAACRVAHVKFANDSRATRPKPAVPAWQCRIERRIGEARALIGKLICFREGNTRPRVMRFVRRAFAGTNISPQDYMSCVTERIDFLKQKVYAWANRIRRYKRRVERYTQNRTFQRDERWVYRGWERPDQGVADTCLPDDDAMCSFWRNIWSVPVSHTEGDWTREVERACDPIPEMGAITICPQDVTRAVRPLPNWKSPGPDGLHNFWIKWFGRSHARLAAQYQVALESGSLPQFLTTGVTHLLHKSGSTAEPKNYRPIACLPTVYKVLTSILRDKINKHIDTNYIMSPSQNGCRNGSRGTKELLLIDMAISQQVRRSRKDLSTCWIDYKKAYDSVPHTWLMRVLELYKVEATLRTFLMSCMGQWRTVLHYPACRNTQRNSEPIRIERGIFQGDSLSPLWFCLALNPLSTLLKDSGLGYRLRRGGQVISHLLYMDDLKLFAPNNSQLMDLLKVTETFSSAIRMEFGVDKCAVMHVKRGEIVESVGTQLSDSINLRALSASETYKYLGMSEALGINGTDMKQSLKDRFFGRLKKVFNSLLSGGNKVRAFNGWVMPVLMYSFGILKWTQTELDALDRKVRTLLTANRMHHPRSSVMRLYIPRKCGGRGFLNAKTLHNREICSLREYFLEADVGMHRDVVTVDKGLTPLSLAKENWRKPVVLDTNDRMEVWQSKELHGRFFRALHGPDVDQLASVAWLRFGDLFGETEGFVCAIMDEVILTNNYRRHIMKDGTVDVCRACHRPGESIRHIISGCSRLANEEYLHRHNLVARIIHQQLALKYSLVESEVPYYRYVPDPVLENGHITLYWDRSIITDRTIVANKPDIVMVDRLERRAMIVDITVPHDGNLVKAEKDKQIKYLDLAREFVDMWDVDSAIIVPIVVTANGLIAKSLDQHLRRLSLGSWIKGLIQKAVLLDTARIVRRFLSLEP

SEQ ID NO: 12347 - protein, 868 aa, Griposia aprilina
MRFVRRAFAGTNISPQDYMSCVTERIDFLKQKVYAWANRIRRYKRRVERYTQNRTFQRDERWVYRGWERPDQGVADTCLPDDDAMCSFWRNIWSVPVSHTEGDWTREVERAYDPIPEMGAITICPQDVTRAVRPLPNWKSPGPDGLHNFWIKWFGRSHARLAAQYQVALESGSLPQFLTTGVTHLLHKSGSTAEPKNYRPIACLPTVYKVLTSILRDKINKHIDTNYIMSPSQNGSRNGSRGTKELLLIDMAISQQVRRSRKDLSTCWIDYKKAYDSAPHTWLMRVLELYKVDATLRTFLMSCMGQWRTVLHYPACRNTQRNSEPIGIERGIFQGDSLSPLWFCLALNPLSTLLEDSGLGYRLRRGGQVISHLLYMDDLKLFAPNNSQLMDLLKVTETFSSAIRMEFGVDKCAVMHVKRGEIVESIGTQLSDSINLRALSASETYKYLGMSEALGINGTDMKQSLKDRFFGRLKKVFNSLLSGGNKVRAFNGWVMPVLMYSFGILKWTQTELDALDRKVRTLLTANRMHYPRSSVMRLYIPRKCGGRGFLNAKTLHNREICSLREYFLEADVGMHRDVVTVDKGLTPLSLAKENWRKPVVLDTNDRMEVWQSKELHGRFFRALHGPDVDQLASVAWLRFGDFFGETEGFVCAIMDEVMMTNNYRRFIVKDGTVDICRACHRPGESIRHIISGCSRLANEEYLHRHNLVARIIHQQLALKYSLVESEVPYYRYVPDPVLKNGHITLYWDRSIITDRTIVANKPDIVMVDRLERRAMIVDITVPHDGNLVKAEKDKQIKYLDLAREVVDMWDVNSAIIVPIVVTANGLIAKSLDQHLRRLSLGSWIKGLIQKAVLLDTARIVRRFLSLEP

SEQ ID NO: 12348 - protein, 1198 aa, Griposia aprilina
MLTRSAARRARPPPPDSSLSSASLPPVSSPTVSAVTTPAAVVASSSSDEYFSPPTTPPPVRRRGGHRPPDGLGPRGPPASDRVPAPGGSVQRMRWTRSINENVMRSYYGATEGGNNLTAYRVRMLSLFQVLEPAVNVSAQRLSDQVRVIQRNHMLDDTVLDRLRNEMQSSHVIAPPSQTVVVLPQSNTSQADKESDDRATNVSTQCNDELRSALEDAIREYRFISPELRPRLPRLPMHNKNRVLVAALDAQLSNYFDDCVDLTDTHSILYCAAVAACRVAHVKFANDSRATRPKPAVPAWQCRIERRIGGARAHIGKLICFREGNTRPRVMRFVRRAFAGTNISPQDYMSCVTERIDFLKQKVYAWANRIRRYKRRVERYTQNRTFQRDERWVYRGWERPDQGVADTCLPDDDAMCSFWRNIWSVPVSHTEGDWTREVERACDPIPEMGAITICPQDVTRAVRPLPNWKSPGPDGLHNFWIKWFGRSHARLAAQYQVALESGSLPQFLTTGVTHLLHKSGSTAEPKNYRPIACLPTVYKVLTSILRDKINKHIDTNYIMSPSQNGCRNGSRGTKELLLIDMAISQQVRRSRKDLSTCWIDYKKAYDSVPHTWLMRVLELYKVEATLRTFLMSCMGQWRTVLRYPACRNTQRNSEPIRIERGIFQGDSLSPLWFCLALNPLSTLLEDSGLGYRLRRGGQVISHLLYMDDLKLFAPNNSQLMDLLKVTETFSSAIRMEFGVDKCAVMHVKRGEIVESVGTQLSDSINLRALSASETYKYLGMSEALGINGTDMKQSLKDRFFGRLKKVFNSLLSGGNKVRAFNGWVMPVLMYSFGILKWTQTELDALDRKVRTLLTANRMHHPRSSVMRLYIPRKCGGRGFLNAKTLHNREICSLREYFLEADVGMHRDVVTVDKGLTPLSLGKENWRKPVVLDTNDRMEVWQSKELHGRFFRALHGPDVDQLASVAWLRFGDLFGETEGFVCAIMDEVMMTNNYRRFIVKDGTVDICRACHRPGESIRHIISGCSRLANEEYLHRHNLVARIIHQQLALKYSLVESEVPYYRYVPDPVLENGHITLYWDRSIITDRTIVANKPDIVMVDRLERRAMIVDITVPHDGNLVKAEKDKQIKYLDLAREVVDMWDVDSAIIVPIVVTANGLIAKSLDQHLRRLSLGSWIKGLIQKAVLLDTARIVRRFLSLEP

SEQ ID NO: 12349 - protein, 1105 aa, Griposia aprilina
MRWTQSINENVMRSYYGATEGGNNLTAYRVRMLSLFQVLEPAVNVSAQRLSDQVRVIQRNHMLDDTVLDRLRSEIQSSHVIAPPSQTVVVLPQPITSHDEGSDDRATNVSTQCNEELRSALEGAIREYRFMSPELRPRLPRFPMHNKNRALVAALDSQLSNYFDDCVDLTDTHSILYCAAVAACRVATVKFANDSRATRPKPAVPAWQCRIERRIGGARALIGKLICFREGNTRPRAMRFVRRAFAGTDVSPQDYISCVTERIDFLKQKVYAWASRIRRYKRRVERYTQNRTFQRDERWVYRDWERPDQGVADTYLPDDDAMCSFWHNIWSVPVSHTEGDWTREVERACEPIPEMGAFTICPQDVARAVRPLPNWKSPGPDGLHDFWIKWFLRSHARLAAQFQAALESGSLPQFLTTGVTHLLHKSGSIAEPKNYRPITCLPTVYKVLTSILRAKINKHIDTNSIMSASQNGCRNGSRGTKELLLIDMAISQQVRRSRKDLLTCWIDYKKAYDSVPHTWLMKVLELYKVDATLRTFLKSCMGQWRTVLRYPTCRNTQRNNEPIRIERGIFQGDSLSPLWFCLALNPLSTLLQDSGLGYRLRRGGRVISHLLYMDDLKLFAPNNLQLIELLKVTETFSSAIRMEFGLDKCAVMHVKRGEIVESMGTQLSDSMNLRALSASETYKYLGMSEAIGVNNTDMKQSLKERFFGRLKKVFNSLLSGGNKVRAFNGWVMPVLMYSFGILKWTQTELDTLDRRVRTLLTANRIHHPRSPVMRLYIPRKCGGRGFLNAKTLHNREICSLREYFLEADVGMHRDVVAVDKGLTPLSLAKENWRKPVVLDTNDRMEVWQSKELHGRFFRALHGPDVDVQASVAWLRFGDLFGETEGFVCAIMDEVMMTNNYRRFIVKDGTVDICRACHRSGESIRHIISGCSRLANEEYLHRHNLVARIIHQQLALKYSFVESEVPYYRYVPDPVLENGTITLYWDRSIITDRTIIVNKPDIVLVDRRERCSMIVDITIPYDGNLVKAEKDKQIKYLDLAREVVDMWDVDSAIIVPIVVTANGLIAKTLDQHLRRLSLSSWIKGLIQKAVLLDTARIVRRFLSLEP

SEQ ID NO: 12350 - protein, 1163 aa, Omphaloscelis lunosa
MTPAAAVASSSSDEYFSPPTTPPPARRRGRRRPPDGLGPRGPPASDRVPAPGGSVQRMRWTRSINENVMRSYYGATEGGNNLTAYRVRMLSLFQVLEPAVNVSAQRLSDQVRVIQRNHMLDDTVLDRLRSEMQSSHVIAPPVRSVIVPSQIITSQADERIDDRATNVSTQCNEELRSALEGAIHEYRFMSPELRPRLPRLPMHNKNKALVAALDSQLSNYFDDCEDLTDTHSILYCAAVAVCRVAHVKFSNDSRATRPKPAVPAWQCRIERRIDGARTLIGKLICFREGNTRPRVMRFVRRAFLGTDISPQDYMTRVTERIDFLKQKVYAWANRIRRYKRRVERYTQNRTFQSDERWVYRAWERPNQGVTDTHLPDEDAMCSFWRSIWSVPVSHTEGDWTREVERACDSIPEMGAITICPQDVARAVRPLPNWKSPGPDGLHNFWIKWFVRSHARLAAQYQTALESGSLPQFLTTGVTHLLHKSGSTAEPKNYRPITCLPTVYKVLTSVLRAKINKHIDTNSIMSASQNGCRNGSRGTKELLLIDMATSQQVRRSRKDLSTCWIDYKKAYDSVPHTWLMRVLELYKVDITLRTFLMSCMGQWRTVLRYPGCRNIQRNSEPIRIERGIFQGDSLSPLWFCLALNPLSTLLEDSGLGYRLRRGGQVISHLLYMDDLKLFAPNNLQLMELLKVTETFSSAIRMEFGVDKCAVMHVKRGKIMESVGTQLSDSINLRALSASETYKYLGMSEALGINVTDMKQSLKERFFGRLKKVLNSLLSGGNKVRAFNGWVMPVLMYSFGILKWSQTELDALDRRVRTLLTAYRMHHPRSSVMRLYIPRKCGGRGFLNAKTLHNREICSLREYFLEADVGMHRDVVVVDKGLTPLSLAKENWRKPVVLDTKNRMEIWQSKELHGRYFRALHGPDVDLPASVAWLRCGDLFGETEGFVCAIMDEVMMTNNYRRFIVKDGTVDICRACHRPGESIRHIISGCSRLANEEYLHRHNLVARIIHQQLALKYSLVESEVPYYRYVPDPVLENGNITLYWDRSIITDRTIVANKPDIVVVDRGERSAMIIDITVPHDENLVKAEKDKQIKYLDLAREVVDMWDVDSAIIVPIVVTANGLITKSLDQHLRRLSLGSWIKGLVQKAVLLDTARIVRRFLSLEP

SEQ ID NO: 12351 - protein, 1205 aa, Omphaloscelis lunosa
MLTRSRARKLTDTHPTSSGSSLSSASQLPDPAPDVSPVIPVAAVASSSSDEYFSPPTTPPPTRQRGRGRPPASLGLRGPPASDRVPAPGGSVQRMRWTQTVNENVMRAYFGATEGGSNLTAYRGRMLSLFQVLEPAVNVSAQRLSDQVRVIQRNHMLDDVVLDRLRLESRNNHVTPASPLVTVQLQNLPSSSPRSDRVGEEDDDGVISVSSQCNVRLRSALEDAFREYRSIPPGLRPKLPRLPMHKKNKALMCTLDSLLSNCLDGSKDLADTHSILYCAAVAACRVAHVKFPNSDRAPRPKPAVPAWQCRIERRIGEARVLIGKLICFREGNTRPRVMRFVKRAFSGTDISFQDYLTRVTERIDFLKQKIYAWANRIRRYRRRVERYTQNRTFQSDERWVYRAWERPDQGVIDTRLPDDDAMCSFWRSIWSAPVSHTEGDWTREIERACDPIPEMGAITICPQDVARAVRPLPNWKSPGPDGLHNFWIKWFQRSHARLASQFQSALESGSLPQFLTTGITHLLHKSGSTAEPKNYRPITCLPTVYKVFTSILRTKINKHIDTNSIMSASQNGCRNGSRGTKELLLIDMAINQQVRRSRRDLSTCWIDYKKAYDSVPHTWLMRVLELYKVNATLRTFLMSCMGQWRTVLRYPGCRQILRNSEPIRIERGIFQGDSLSPLWFCLALNPLSTLLEDSGLGYRLRRGGQVISHLLYMDDLKLFAPNNLQLLELLKVTETFSSAIRMEFGVDKCAVMHVKRGEIVESVGTQLSDSIQLRSLSSIETYKYLGMSEALGVNAADMKQSLKERFFNRLNKVLNSLLSGGNKVRAFNGWVMPVLMYSFGILKWTQTELDALDRRVRTLLTANRMHHPRSSVMRLYIPRKCGGRGFLNAKTLHNREVCSLREYFLEADVGMHRDVVTVDKGLTPLSLANENWRKPIVLDTNDRREVWQSKELHGRFYRALHGPDVDLLASVSWLRFGDLFGETEGFVFAIMDEVMMTNNYRKYIVKDGTVDICRACHRPGESIRHIISGCSRLANGDYLHRHNLVARIIHQQLALKYSLVESEVPYYRYVPDPVLENGNITLYWDRSIITDRTIVANKPDIVVIDRLERRTMIIDIAVPHDENLVKAEKDKQIKYLDLAREVVDMWDVDTAIIVPIVVTANGIIAKSLDQHLKRLSLGSWIKGLIQKAVLLDTARIVRRFLSQEP

SEQ ID NO: 12352 - protein, 1198 aa, Omphaloscelis lunosa
MLTRSAARRARLPPPDSPLSSASSPPVLSPTVNAVMTPAAAVASSSSDEYFSPPTTPPPARRRGGRRPPDGLGPRGPPASDRVPAPGGSVQRMRWTRSINENVMRSYYGATEGGINLTAYRVRMLSLFQVLEPAVNVSAQRLSDQVRVIQRNHMLDDTVLDRLRSEMQSSHVIAPPVRSVIIPSQIITSQADDRIDDRATNVSTQCNEELRSALEGAIQEYRFMSPELRPRLPRLPMHNKNKALVAVLDSQLSNYFDDCEDLTDTHSILYCAAVAACRVAHVKFANDSRATRPKPAAPAWQCRIERRIGGARTLIGKLICFREGNTRPRVMRFVRRAFLGTDISPQDYLTRVTERIDFLKQKVYAWANRIRRYKRRVERYTQNRTFQSDERWVYRAWERPDQGVADTHRPDDDAICSFWRSIWSVPVNHTEGDWTREVERACDPIPEMGAITICPQDVARAVRPLPNWKSPGPDGLHNFWIKWFLRSHARLAAQYQTALESGSLPQFLTTGVTHLLHKSGSTAEPKNYRPITCLPTVYKVLTSILRAKINKHIDTNSIMSASQNGCRNGSRGTKELLLIDMAINQQVRRSRKDLSTCWIDYKKAYDSVPHTWLMRVLELYKVDTTLRTFLMSCMGQWRTVLRYPGCRNIQRNSEPIRIERGIFQGDSLSPLWFCLALNPLSTLLEASGLGYRLRRGGQVISHLLYMDDLKLFAPNNLQLMELLKVTETFSNAIRMEFGVDKCAVMHVKRGEIVESVGTQISDSINLRALSASETYKYLGMSEALGINVTDMKQSLKERFFGRLKKVLNSFLSGGHKVRAFNGWVMPVLIYSFGILKWTQTELDALDRRVRTLLTAYRMHHPRSSVMRLYIPRKCGGRGFLNAKTLHNREICSLREYFLGVDVGMHRDVVVVDKGLTPLSLAKENWRKPVVLDTKDRMEIWQSKELHGRYFRALHGPDVDLPASVTWLRFGDLFGETEGFVCAIMDEVMMTNNYRRFIVKDGTVDICRACHRPGESIRHIISGCSRLANEEYLHRHNLVARIIHQQLALKYNLVESEVPYYRYVPDPVLENGNITLYWDRSIITDRTIVANKPDIVVVDRGERRTMIIDITVPHDENLVKAEKDKQIKYLDLAREVVDMWDVDSAIIVPIVVTANGLIAKSLDQHLRRLSLGSWIKGLIQKAVLLDTARIVRRFLSLEP

SEQ ID NO: 12353 - protein, 1197 aa, Sesamia nonagrioides
MLTRSAARRARPPSPDSLLSSALPPPISSATVSAVTSPAAAVASSSSDEYFSPPTTPPPVRRRGGRRPPDCLGPRGPPASDRVPAPGGSVQRMRWTQSINENVMRSYYGATEGGTNLTAYRVRMLSLFQVLEPAVNVSAQRLSDQVRVIQRNHMLDDTVLDRLRNEMQSSRIIAHQSQSAEIPPQPTNCADEGSNDRATNVSTQCNEELRNALEAAIREYRSISAELRPRLPRLPMHNRNRALMGALDAQLSNYFDTCEDLTDTHSILYCAAVAACRVAHVKFPSDSRATRPKPVVPAWQHRIERRIGGAIALIGKLICFREGNTRPRVMRFVRRAFSGTNTSPQNYMARVTERIDFLKQKVYAWANRIRRYKRRVERYTQNRTFQSNERRVYRDWERPEQGVTDTCLPDDDAMCSFWRSIWSVPVSHTEGDWAQDVERVCDPIPEMGAITICPQDVAHAVRPLPNWKSPGPDGLHNFWIKWFPRSHARLASQFQTALVSGSLPQFLTTGITHLLHKSGSTAEPKNYRPITCLPTVYKVLTSILKTKINKHIDSNSILSASQNGCRSGSRGTKELLLIDMAISQQVRRSRKDLSTCWIDYKKAYDSVPHTWLMRVLELYKVDATLRTFLMTCMRTWRTVLRYPGRRNIQRNSEPIRIERGIFQGDSLSPLWFCLALNPLSTLLEDSGLGYRLRRGGQVISHLLYMDDLKLFAPNNSQLNELLKITEIFSSSIRMEFGVDKCAVMHVKRGEIMEPVGTQLTSSINLRALSASETYKYLGMSEALGINVTDMKQSLKERFFGRLKKVLNSLLSGGNKVRAFNGWVMPVLMYSFGILKWTQTELDALDQRVRTLLTANRLHHPRSSVMRLYIPRKCGGRGFLNAKTLHNREICSLRDYFLETDVGMHRDVVAADKGLTPLSLAKENWRKPVVLDTNDRMEVWKSKELHGRFFRALHGPDVDFQASVAWLRFGDLFGETEGFVFAIMDEVMMTNNYRRFIVKDGTVDICRACHRPGESIRHIISGCSRLANGEYLHRHNLVARIIHQQLALKYKLVESEVPYYRYMPDPVLENGHITLYWDRSIITDRTIIANKPDIVLVDRSERRAMIVDITIPHDENLVKAEKDKQTKYLDLAHEVVDMWEVDSAIIVPIVVTANGLIAKSLDQHLRRLSLGSWIKGLIQKAVLLDTARIVRKFLSLEP

SEQ ID NO: 12354 - protein, 962 aa, Sesamia nonagrioides
MHKKNKALVCALDSQLSNYLKDSKDLADTHSILYCGAVAICRVAHVKFPDSDRATRPKPAVPAWQCRIERRIGETRALIGKLISFREGNTRPRVMRFVRRAFSGTDVSTRDYLLRVTERIDFLKQKIYAWANRIRRYRRRVERYSQNRNFQSDERWVYRAWERSDQGVTDTCLPDDDATRSFWRNIWSVPVSHTEGGWTRDVERACDPVPEMGAITICPQDVARAVRPLPNWKSPGPDGLHNFWIKWFSGSHACLASQFQTALESGSLPQFLTTGITHLLHKSGSTAEPKNYRPITCLPTVYKVLTSILKAKINTHIDSNSIMSASQNGCRNGSRGTKELLLIDMAISQQVRRSRKDLSTCWIDYKKAYDSVPHTWLMRVLELYKVDATLRTFLMTCMSQWRTVLRYPGCQNIQRNSEPIRIERGIFQGDSLSPLWFCLALNPLSTLLEDSGLGYRLRRGGQVISHLLYMDDLKLFAHTNSQLKELLKITETFSSAIRMEFGVDKCAVMHVQRGEIVESVGTQLTGSINLRSLSASETYKYLGMSEALGINVTDMKQSLKERFFGRLKKVLNSLLSGGNKVRAFNGWVMPVLMYSFGILKWTQTELDALDQRVRTLLTANRLHHPRSSVMRLYIPRKCGGRGFLNAKTLHNREVCSLREYFLKTDVGMHRDVVAVDKGLTPLSLAKENWRKPVVLETNDRVEVWQSKELHGRFFRALRGPDVDFQASVAWLRYGDLFGETEGFVCAIMDEVMMTNNYRKFIVKDGTVDICRACHRPGESIRHIISGCSRLANGEYLHRHNLVARIIHQQLALKYNLVESEVPYYRYMPDPVLENGHITLYWDRSIITDRTIVANKPDIVMVDRSERRAMIVDITIPHDENLVKAEKDKQIKYLDLAHEVVDMWEVDSAIIVPIVVTANGLIAKSLDQHLRRLSLGGWIKGLIQKAVLLDTARIVRKFLSLEP

SEQ ID NO: 12355 - protein, 1197 aa, Sesamia nonagrioides
MLTRSAARRARPPSPDSLLSSALPPPISSATVSAVTSPAAAVASSSSDEYFSPPTTPPPVRRRGGRRPPDCLGPRGPPASDRVPAPGGSVQRMRWTQSINENVMRSYYGATEGGTNLTAYRVRMLSLFQVLEPAVNVSAQRLSDQVRVIQRNHMLDDTVLDRLRNEMQSSRIIAHQSQSAEIPPQPTNCADEGSNDRATNVSTQCNEELRNALEAAIREYRSISAELRPRLPRLPMHNRNRALMGALDAQLLNYFDTCEDLTDTHSILYCAAVAACRVAHVKFTSDSRATRPKPVVPAWQHRIERRIGGARALIGKLICFREGNTRPRVMRFVRRAFSGTNTSPQNYMARVTERIDFLKQKVYAWANRIRRYKRRVERYTQNRTFQSNERRVYRDWERPEQGVTDTCLPDDDAMCSFWRSIWSVPVSHTEGDWAQDVERACDPIPEMGAITICPQDVAHAVRPLPNWKSPGPDGLHNFWIKWFPRSHARLASQFQTALVSGSLPQFLTTGITHLLHKSGSTAEPKNYRPITCLPTVYKVLTSILKTKINKHIDSNSILSASQNGCRSGSRGTKELLLIDMAISQQVRRSRKDLSTCWIDYKKAYDSVPHTWLMRVLELYKVDATLRTFLMTCMRTWRTVLRYPGCRNIQRNSEPIRIERGIFQGDSLSPLWFCLALNPLSTLLEDSGLGYRLRRGGQVISHLLYMDDLKLFAPNNSQLNELLKITEIFSSSIRMEFGVDKCAVMHVKRGEIMEPVGTQLTSSINLRALSASETYKYLGMSEALGINVTDMKQSLKERFFGRLKKVLNSLLSGGNKVRAFNGWVMPVLMYSFGILKWTQTELDALDQRVRTLLTANRLHHPRSSVMRLYIPRKCGGRGFLNAKTLHNREICSLRDYFLETDVGMHRDVVAADKGLTPLSLAKENWRKPVVLDTNDRMEVWKSKELHGRFFRALHGPDVDFQASVAWLRFGDLFGETEGFVFAIMDEVMMTNNYRRFIVKDGTVDICRACHRPGESIRHIISGCSRLANGEYLHRHNLVARIIHQQLALKYKLVESEVPYYRYMPDPVLENGHITLYWDRSIITDRTIIANKPDIVLVDRSERRAMIVDITIPHDENLVKAEKDKQTKYLDLAHEVVDMWEVDSAIIVPIVVTANGLIAKSLDQHLRRLSLGSWIKGLIQKAVLLDTARIVRKFLSLEP

SEQ ID NO: 12356 - protein, 962 aa, Sesamia nonagrioides
MHNRNRALMGALDAQLSNYFDTCEDLTDTHSILYCAAVAACRVAHVKFPSDSRATRPKPVVPAWQHRIERRIGGARALIGKLICFREGNTRPRVMRFVRRAFAGTNISPQNYMARVTERIDFLKQKVYAWANRIRRYKRRVERYTQNRTFQSNERWVYRDWERPEQGVADTCLPDDDAMCSFWRSIWSVPVSHTEGDWARDVERACDPIPEMGAITICPQDVARAVRPLPNWKSPGPDGLHNFWIKWFPRSHASLASQFQTALVSGSLPQFLTTGITHLLHKSGSTAEPKNYRPITCLPTVYKVLTSILKAKINNHIDSNSIMSVSQNGCRSGSRGTKELLLIDMAISQQVRRSRKDLSTCWIDYKKAYDSVPHTWLMRVLELYKVDTTLRTFLMTCMGQWRTVLRYPGCRNIQRNSEPIRIERGIFQGDSLSPLWFCLALNPLSTLLEDSGLGYRLRRGGQVISHLLYMDDLKLFAPNNLQLKELLKITETFSSAIRMEFGVDKCAVMHIKRGEIVESVGTQLTSSINLRALSASETYKYLGMSEALGINVTDMKQSLKERFFGRLKKVLNSLLSGGNKVRAFNGWVMPVLMYSFGILKWTQTELDALDQRVRTLLTANRLHHPRSSVMRLYIPRKCGGRGFLNAKTLHNREICSLREYFLETDVGMHRDVVAVDKGLTPLSLAKENWRKPVVLDTNDRMEVWKSKELHGRFFRALHGPDVDLQASVAWLRFGDLFGETEGFVCAIMDEVMMTNNYRRFIVKDGTVDICRACHRPGESIRHIISGCSRLANGEYLHRHNLVARIIHQQLALKYNLVESEVPYYRYMPDPVLENGHITLYWDRSIITDRTIVANKPDIVMVDRSERRAMIVDITIPHDENLVKAEKDKQIKYLDLAHEVVDMWEVDSAIIVPIVVTANGLIAKSLDQHLRRLSLGSWIKGLIQKAVLLDTARIVRKFLSLEP

SEQ ID NO: 12357 - protein, 1200 aa, Sesamia nonagrioides
MLTRSAARCARPPPPDSSLSSASPPPVSSPNVNAVMTPAAVVASSSSDEYFSPPTTPPPARRRGGRRPPDRLGPRGPSASDRVPAPGGSVQRMRWTQSINENVMRSYYGATEGGNNLTAYRVRMLSLFQVLEPAVNVSAQRLSDQVRVIQRNHMLDDVVLDRLRLESRNSHVTPASSLVAVQLNSVSPRPNHVDEEDDDRAISVSPQCNEKLRSALEDAFREYRSIPPEFRPRLPRLPMHKKNKALVCALDSQLSNYLKDSNDLNDTHSILYCGAVAICRVAHVKFPDSDRATRPKSAVPAWQCRIERRIGETRALIGKLISFREGNTRPRVMRFVRRAFSGTDTSTRDYLFRVTERIDFFKQKIYAWANRIRRYRRRVERYSQNRNFQSDERRVYRAWERSDQGVTDTCLPDDDATCSFWRNIWSVPLSHTEGSWTRVVERACDPVPEMGAITICPQDVARAVRPLPNWKSPGPDGLHNFWIKWFSRSHARLASQFQTALESGSLPQFLTTGVTHLLHKSGSTAEPKNYRPITCLPTVYKVLTSILKSKINTHIDSNSIMSASQNGCRSGSRGTKELLLIDMAISQQVRRSRKDLSTCWIDYKKAYDSVPHTWLMRVLELYKVDATLRTFLMTCMRTWRTVLRYPGCRNIQRNSEPIRIERGIFQGDSLSPLWFCLALNPLSTLLEDSGLGYRLRRGGQVISHLLYMDDLKLFAHTDSQLKELLKITETFSSSIRMEFGVDKCAVMHVKRGEIMESVGTQLTSSINLRALSASETYKYLGMSEALGINVTDMKQSLKERFFGRLKKVLNSLLSGGNKVRAFNGWVMPVLMYSFGILKWTQTELDALDRRVRTLLTANRLHHPRSSVMRLYIPRKCGGRGFLNAKTLHNREICSLRQYFLTTDVGMHRDVVAVDKGLTPLSLAKENWRKPVVLDTNDRMEVWKSKELHGRFFKALHGPDVDLQASVAWLRFGDLFGETEGFVCAITDEVMMTNNYRRFIVKDGTVDICRACHRPGESIRHIISGCSRLANGEYLHRHNLVARIIHQQLALKYNLVESEVPYYRYTPDPVLENDHITLYWDRSIITDRTIVANKPDIVLVDRSERRAMIVDITIPHDENLVKAEKDKQIKYLDLAHEVVDMWEVDSAIIVPIVVTANGLIAKSLDQHLRRLSLGSWIKGLIQKAVLLDTARIVRKFLSLEP

SEQ ID NO: 12358 - protein, 1023 aa, Sesamia nonagrioides
MLDDVVLDRLRLESRNSHVTPASSLVAVQLNSVPSRPNLVDEEDDDEAISVTPQCNEKVRSALEDAFREYRSTPPELRPRLPRLPMHKKNKALVCALDSQLSNYLKDSKDLADTHSILYCGAVAICRVAHVKFPDSDRATRPKPAVPAWQCRIERRIGETRALIGKLISFREGNTRPRVMRFVRRAFSGTDVSTRDYLLRVTERIDFLKQKIYAWANRIRRYRRRVERYSQNRNFQSDERWVYRAWERSDQGVTDTCLPDDDATRSFWRNIWSVPVSHTEGGWTRDVERACDPVPEMGAITICPQDVARAVRPLPNWKSPGPDGLHNFWIKWFSGSHACLASQFQTALESGSLPQFLTTGITHLLHKSGSTAEPKNYRPITCLPTVYKVLTSILKAKINTHIDSNSIMSASQNGCRNGSRGTKELLLIDMAISQQVRRSRKDLSTCWIDYKKAYDSVPHTWLMRVLELYKVDATLRTFLMTCMSQWRTVLRYPGCRNIQRNSEPIRIERGIFQGDSLSPLWFCLALNPLSTLLEDSGLGYRLRRGGQVISHLLYMDDLKLFAHTNSQLKELLKITETFSSAIRMEFGVDKCAVMHVQRGEIVESVGTQLTGSINLRSLSASETYKYLGMSEALGINVTDMKQSLKERFFGRLKKVLNSLLSGGNKVRAFNGWVMPVLMYSFGILKWTQTELDALDQRVRTLLTANRLHHPRSSVMRLYIPRKCGGRGFLNAKTLHNREVCSLREYFLKTDVGMHRDVVAVDKGLTPLSLAKENWRKPVVLETNDRMEVWQSKELHGRFFRALRGPDVDFQASVAWLRYGDLFGETEGFVCAIMDEVMMTNNYRKFIVKDGTVDICRACHRPGESIRHIISGCSRLANGEYLHRHNLVARIIHQQLALKYNLVESEVPYYRYMPDPVLENGHITLYWDRSIITDRTIVANKPDIVVVDRSERRAMIVDITIPHDENLVKAEKDKQIKYLDLAHEVVDMWEVDSAIIVPIVVTANGLIAKSHIQHLMRLSLGSWA

SEQ ID NO: 12359 - protein, 1144 aa, Sesamia nonagrioides
MLTRSAARRARPPSPDSLLSSALPPPVSSATVSAVTTPAAAVASSSSDEYFSPPTTPPPVRRRGGRRPPDCLGPRGPPASDRVPAPGGSVQRMRWTQSINENVMRSYYGATEGGTNLTAYRVRMLSLFQVLEPAVNVSAQRLSDQVRVIQRNHMLDDTVLDRLRNEMQRSRIIAHQSQSAEIPPQPTIYADEGSNDRATNVSTQCNEELRNALDAAIREYRSISAELRPRLPRLPMHNRNRALMGARDAQLSNYFDTCEDLTDTHSILYCAAVAACRVAHVKFPSDSRATRPKPVIPAWQHRIERRIGGARALIGKLICFREGNTRPRVMRFVRRAFSGTNTSPQNYMARVTERIDFLKQKVYAWANRIRRYKRRVERYTQNRTFQSNERRVYRDWERPEQGVTDTCLPDDDAMCSFWRSIWSVPVSHTEGDWARDVERACDPIPEMGAITICPQDVAHAVRPLPNWKSPGPDGLHNFWIKWFPRSHARLASQFQTALVSGSLPQFLTTGITHLLHKSGSTAEPKNYRPITCLPTVYKVLTSILKTKINKHIDSNSILSASQNGCRSGSRGTKEILLIDMAISQQVRRSRKDLSTCWIDYKKAYDSVPHTWLMRVLELYKVDTTLRTFLMTCMRKWRTVLRYPGCRNIQRNSEPIRIERGIFQGDSLSPLWFCLALNPLSTLLEDSGLGYRLRRGGQVISHLLYMDDLKLFAPNNSQLNELLKITEIFSSSIRMEFGVDKCAVMHVKRGEIMEPVGTQLTSSINLRALSASETYKYLGMSEALGINVTDMKQSLKERFFGRLKKVLNSLLSGGNKVRAFNGWVMPVLMYSFGILKWTQTELDALDQRVRTLLTANRLHHPRSSVMRLYIPRKCGGRGFLNAKTLHNREICSLRDYFLVTDVGMHRDVVAADKGLTPLSLAKENWRKPVVLDTNDRMEVWNSKELHGRFFRAIHGPDVDFQASVAWLRFGDLFGETEGFVFAIMDEVMMTNNYRRFIVKDGTVDICRACHRPGESIKHIISGCSRLAYGEYLHRHNLVARIIHQQLALKYKLVESEVPYYRYMPDPVLENGHITLYWDRSIITDRTIVANKPDIVLVDRSERRAMIVDITIPHDENLVKAEKDKQIKYLDLAHEVVDMCILLYIS

SEQ ID NO: 12360 - protein, 983 aa, Sesamia nonagrioides
MLSVSTALLRLHLDHIYLDCPCIKKNKALVCALDSQLSNYLKDSKDLADTHSILYCGAVAICRVAHVKFPDSDRATRPKPAVPAWQCRIERRIGETRALIGKLISFREGNTRPRVMRFVRRAFSGTDVSTRDYLLRVTERIDFLKQKIYAWANRIRRYRRRVERYSQNRNFQSDERWVYRAWERSDQGVTDTCLPDDDATRSFWRNIWSVPVSHTEGGWTRDVERACDPVPEMGAITIWPQDVARAVRPLPNWKSPGPDGLHNFWIKWFSGSHACLASQFQTALESGSLPQFLTTGITHLLHKSGSTAEPKNYRPITCLPTVYKVLTSILKAKINTHIDSNSIMSASQNGCRNGSRGTKELLLIDMAISQQVRRSRKDLSTCWIDYKKAYDSVPHTWLMRVLELYKVDATLRTFLMTCMSQWRTVLRYPGCRNIQRNSEPIRIERGIFQGDSLSPLWFCLALNPLSTLLEDSGLGYRLRRGGQVISHLLYMDDLKLFAHTNSQLKELLKITETFSSAIRMEFGVDKCAVMHVQRGEIVESVGTQLTGSINLRSLSASETYKYLGMSEALGINVTDMKQSLKERFFGRLKKVLNSLLSGGNKVRAFNGWVMPVLMYSFGILKWTQTELDALDQRVRTLLTANRLHHPRSSVMRLYIPRKCGGRGFLNAKTLHNREVCSLREYFLKTDVGIHRDVVAVDKGLTPLSLAKENWRKPVVLETNDRMEVWQSKELHGRFFRALRGPDVDFQASVAWLRYGDLFGETEGFVCAIMDEVMMTNNYRKFIVKDGTVDICRACHRPGESIRHIISGCSRLANGEYLHGHNLVARIIHQQLALKYNLVESEVPYYRYMPDPVLENGHITLYWDRSIITDRTIVANKPDIVIVDRSERRAMIVDITIPHDENLVKAEKDKQIKYLDLAHEVVDMWEVDSAIIVPIVVTANGLIAKSLDQHLRRLSLGGWIKGLIQKAVLLDTARIVRKFLSLEP

SEQ ID NO: 12361 - protein, 1197 aa, Sesamia nonagrioides
MLTRSAARRARPPSPDSLLSSASPPPASSTTVSAVTTPAAAVALSSSDEYFSPPTTPPPARRRGGRRPPDRLGPRGPSASDRVPAPGGSVQRMRWTQSINENVMRSYYGATEGGNNLTAYRVRMLSLFQVLEPAVNVSAQRLSDQVRVIQRNHMLDDTVLDRLRNEMQNSRIIAHQSQTAEIPPQPTNYADEGSNDRATNVSTQCNEELINALEAAIREYRFTPAEQRPRLPRLPMHNRNRALMAALDAQLSDYFDTCEDLTDTHSILYCAAVAACRVAHVKFPSDSRATRPKPVVPAWQRRIERRIGGARALIGKLICFREGNTRPRVMRFVRRAFAGTNISPQNYMARVTERIDFLKQKVYAWANRIRRYKRRVERYTQNRTFQSNERWVYRDWERPEQGVTDTCLPDDDAMCSFWRSIWSVPVSHTEGDWARDVERACDPIPEMGAITICPQDVACAVRPLPNWKSPGPDGLHNFWIKWFPRSHARLASQFQTALVSGSLPQFLTTGITHLLHKSGSTAEPKNYRPITCLPTVYKVLTSILKTKINKHIDSNSIMSASQNGCKSGSRGTKELLLIDMAISQQVRRSRKDLSTCWIDYRKAYDSVPHTWLMRVLELYKVDATLRTFLMSCMKTWRTVLRYPGCRNIQRNSEPIRIERGIFQGDSLSPLWFCLALNPLSTLLEDSGLGYRLRRGGQVISHLLYMDDLKLFAPNNSQLRELLKITETFSSSIRMEFGVDKCAVMHIKRGEIMESVGTQLTDSINLRALSASETYKYLGMSEALGINVTDMKQSLKERFFGRLKKVLNSLLSGGNKVRAFNGWVMPVLMYSFGILKWTQTELDALDQRVRTLLTANRLHHPRSSVMRLYIPRKCGGRGFLNAKTLHNREVCSLRDYFLVTDVGMHRDVVAADKGLTPLSLAKENWRKPVVLDTNDRMEVWKSKELHGRFFRALHGPDVDFQASVAWLRFGDLFGETEGFVFAIMDEVMMTNNYRRFIVKDGTVDICRACHRPGESIRHIISGCSRLANGEYLHRHNLVARIIHQQLALKYNLVESEVPYYRYTPDPVLENGYITLYWDRSIITDRTIVANKPDIVMVDRSERRAMIVDITIPHDENLVKAEKDKQIKYLDLAHEVVDMWEVDSAIIVPIVVTANGLIAKSLDQHLRRLSLGSWIKGLIQKAVLLDTARIVRKFLSLEP

SEQ ID NO: 12362 - protein, 1200 aa, Sesamia nonagrioides
MLTRSAARRARPPSPDSLLGSASPPPVSSATASAVTTPAAAVASSSSDEYFSPPTTPPPARRRGGRRPPDRLGPRGSSASDRVPAPGGSVQRMRWTQSINENVMRSYYGATEGGNNLTAYRVRMLSLFQVLEPAVNVSAQRLSDQVRVIQRNHMLDDVVLDRLRLESRNSHVTPASSLVAVQLNSVSPRPNHVDEEDDDRAISVSPQCNEKLRSALEDAFCEYRSILPELRPRLPRLPMHKKNKALVCALDSQLSNYLKDSKDLNDTHSILYCGAVAICRVAHVKFPDSDRATRPKSAVPAWQCRIERRIGETRALIGKLISFREGNTRPRVMRFVRRAFSGTDTSTRDYLFRVTERIDFFKQKIYAWANRIRRYKRRVERYSQNRNFQSDERRVYRAWERSDQGVTDTCLPDDDATCSFWRNIWSVPVSHTEGSWTRVVERACDPVPEMGAITICPQDVAHAVRPLPNWKSPGPDGLHNFWIKWFTRSHACLASQFQTALESGSLPQFLTTGVTHLLHKSGSTAEPKNYRPITCLPTVYKVLTSILKSKINTHIDSNSIMSASQNGCRSGSRGTKELLLIDMAISQQVRRSRKDLSTCWIDYKKAYDSVPHTWLMRVLELYKVDATLRTFLMTCMRTWRTVLRYPGCRNIQRNSEPIRIERGIFQGDSLSPLWFCLALNPLSTLLEDSGLGYRLRRGGQVISHLLYMDDLKLFAHTDSQLKELLKITETFSSSIRMEFGVDKCAVMHVKRGEIMESVGTQLTSSINLRALSASETYKYLGMSEALGINVTDMKQSLKERFFGRLKKVLNSLLSGGNKVRAFNGWVMPVLMYSFGILKWTQTELDALDRRVRTLLTANRLHHPRSSVMRLYIPRKCGGRGFLNAKTLHNREICSLREYFLTTDVGMHRDVVAVDKGLTPLSLAKENWRKPVVLDTNDRMEVWKSKELHGRFFTALHGPDVDLQASVAWLRFGDLFGETEGFVCAIMDEVMMTNNYRRFIVKDGTVDICRACHRPGESIRHIISGCSRLANGEYLHRHNLVARIIHQQLALKYNLVESEVPYYRYTPDPVLENDLITLYWDRSIITDRTIVANKPDIVLVDRSERRAMIVDITIPHDENLVKAEKDKQIKYLDLAHEVIDMWEVDSAIIVPIVVTANGLIAKSLDQHLRRLSLGSWIKGLIQKAVLLDTARIVRKFLSLEP

SEQ ID NO: 12363 - protein, 1045 aa, Apamea monoglypha
MLDDTVLDRLRNEMQSSHVIAPQSQTAAVLPQSNTSHADEGSNDRATNVSIQCNEELRNALEGAIREYRFMSPELRPRLPRLPMHNKNRALVAVLDAQLSSYFDACEDLTDTHSILYCAAVAACRVAHVKFASDSRATRPKPAIPPWQCRIERRIGGARALIGKLICFREGNTRPRVMRFVRRAFSGTDISSQDYLSHVTERIDFLKQKVYAWANRIRRYKRRVDRYTQNRTFQSDERWVYRGWERPDQGVADTCLPDDDAMYSFWRSIWSVPVSHTEGDWAREVERACDPIPEMEAITICAQDVARAVRPLPNWKSPGPDGLHNFWIKWFTRSHARLASQFQIALESGSLPQFLTTGVTHLLHKSASTAEPKNYRPITCLPTVYKVLTSILRAKINKHIDTNSIMSASQNGCKNGSRGTKELLLIDMAISQQVRRSRKDLSTCWIDYKKAYDSVPHTWLMRVLELYKVDTTLRTFLMTCMGQWRTVLRYPGCRNIQRNSEPIRIERGIFQGDSLSPLWFCLALNPLSTLLEDSGLGYRLRRGGQVISHLLYMDDLKLFAPNNLQLMELLKITETFSSAIRMEFGVDKCAVMHVKRGEIVESVGTQLSDSTNLRALSASETYKYLGMSEALGINVTDMKQSLKERFFGRLKKVLNSLLSGGNKVRAFNSWVMPVLMYSFGILKWTQTELDALDRRVRTLLTANRMHHPRSSVMRLYIPRKCGGRGFLNAKTLHNREICSLREYFLETDVGMHRDVVAVDKGLTPLSLAKENWRKPVVLDTNDRLEVWQSKELHGRFYRALHGPDVDLLASVAWLRFGDLFGETEGFVCAIMDEVMMTNNYRRFIVKDGTVDICRACHRPGESIRHIISGCSRLANGEYLHRHNLVARIIHQQLALKYSLVESEVPYYRYVPDPVLENGHITLYWDRSIITDRTIVANKPDIVVVDRSERRAMIVDITVPHDENLVKAEKDKQIKYLDLAREVVDMWDVDSAIIVPIVVTDNGLIAKSLDQHLRRLSLGSWIKGLIQKAVLLDTARIVRRFLSLEP

SEQ ID NO: 12364 - protein, 1106 aa, Apamea monoglypha
MRWTRSINENVMRSYYGATEGGNNLTAYRVRMLSLFQALEPAVNVSAQRLSDQVRVIQRNHMLDDTVLDRLRSEMQSSHVIAPQSQTAAVLPQSNTSHADEGSNDRATNVSIQCNEELRNALEGAIREYRFMSPELRPRLPRLPMHNKNRALVAVLDAQLSSHFDACEDLTDTHSILYCAAVAACRVAHVKFDSDSRATRPKPAIPAWQCRIERRIGGARALIGKLICFREGNTRPRVMRFVRRAFLGTDISSQDYLSRVTERIDFLKQKVYAWANRIRRYKRRVERYTQNRTFQSDERWVYRGWERPDQSVADTCLPDDDAMCSFWRSIWSAPVSHTEGDWTGKIERACELISEMGAITICPQDVARAVRPLPNWKSPGPDGLHNFWIKWFQRSHAPLAAQFQSALESGLLPQFITTGITHLLHKSGSTADPKNYRPITCLPTIYKVLTSILRAKINKHIDSNSIMSVSQNGCRNGSRGTKELLLIDMAISQQVRRSRKDLSTCWIDYKKAYDSVPHTWLMRVLELYKVDTTLRTFLMTCMGQWRTVLRYPGCRNIQRNSEPIRIERGIFQSDSLSPLWFCLALNPLSTLLDDSGLGYRLRRGDQVISHLLYMDDLKLFAPNNLQLMKLLKITETFSSAIRMEFGVDKCAVMHVKRGEIVESVGTQLSDFTNLRALSAAETYKYLGMSEALGINVTDMKQSLKERFFGRLKKVFNSLLSGGNKVRAFNSWVMPVLMYSFGILKWTQTELEALDRRVRTLLTANRMHHPRSSVMRLYIPRKCGGRGFLNAKTLHNREICSLREYFLETDVGMHRDVVAVDKGLTPLSLAKENWRKPVVLDTNDRMEVWQSKELHGRFYRALHGPDVDLLASVAWLRFGDLFGETEGFVCAIMDEVMMTNNYRRYIVKDGTVDICRACHRPGESIRHIISGCSRLANGEYLHRHNLVARIIHQQLALKYSLVESEVPYYRYVPDPVLENGNITLYWDRSIITDRTIVANKPDIVVVDRSERRAMIVDITVPHDENLVKAEKDKQIKYLDLAREVVDMWDVDSAIIVPIVVSANGLIAKSLDQHLRRLSLGSWIKGLIQKAVLLDTARIVRRFLSLEP

SEQ ID NO: 12365 - protein, 975 aa, Apamea monoglypha
MSPELRPRLPRLPMHNKNRALVAVLDAQLSSYFDVCEDLTDTHSILYCAAVAACRVAHVKFVSDSRATRPKPAIPPWQCRIERRIGGARALIGKLICFREGNTRPRVMRFVRRAFSGTDISSQDYLSRVTERIDFLKQKVYAWANRIRRYKRRVDRYTQNRTFQSDERWVYRGWERPDQGVADTCLPDDDAMYSFWRSIWSVPVSHTEGDWAREVERACDPIPEMEAITICAQDVARAVRPLPNWKSPGPDGLHNFWVKWLTRSHARLASQFQIALESGSLPQFLTTGVTHLLHKSASTAEPKNYRPITCLPTVYKVLTSILRAKINKHIDTNSIMSASQNGCKNGSRGTKELLLIDMAISQQVRRSRKDLSTCWIDYKKAYDSVPHTWLMRVLELYKVDTTLRTFLMTCMGQWRTVLRYPGCRNIQRNSEPIRIERGIFQGDSLSPLWFCLALNPLSTLLEDSGLGYPLRRGGQVISHLLYMDDLKLFAPNNLQLMELLKITETFSSAIRMEFGVDKCAVMHVKRGEIVESVGTQLSDSTNLRALSASETYKYLGMSEALGINITDMKQSLKERFFGRLKKVLNSLLSGGNKVRAFNSWVMPVLMYSFGILKWTQTELDALDRRVRTLLTANRLHHPRSSVMRLYIPRKCGGRGFLNAKTLHNREICSLREYFLETDVGMHRDVVAVDKGLTPLSLAKENWRKPVVLDTNDRMEVWQSKELHGRFYRALHGPDVDLLASVAWLRFGDLFGETEGFVCAIMDEVMMTNNYRRFIVKDGTVDICRACHRPGESIRHIISGCSRLANGEYLHRHNLVARIIHQQLALKYKLVESEVPYYRYVPDPVLENGNITLYWDRSIITDRTIVANKPDIVVVDRSERRAMIVDITVPHDENLVKAEKDKQIKYLDLAREVVDMWHVDSAIIVPIVVTANGLIAKSLDQHLRRLSLGSWIKGLIQKAVLLDTARIVRRFLSLEP

SEQ ID NO: 12366 - protein, 925 aa, Furcula furcula
MTACRVARVKFPNSDAATRPRPAVPAWQCRIERRIGEARVLIGKLTCFREGNTRPRVMRFVRCAFSGTGIGPREYLSRVTERIDFLKQKVCAWANRIRRYRARVDRYSQNNMFQRDQRWVYRSWERPSQIGGEVLRPDDDAMIRFWRNIWSVPVTHSEGDWIGDVRQVCEPIPEMGAITIRPQDVADAVRPLPNWKAPGPDGLHNFWLKWLRSSHACLASLFQSAVESGSLPEFLITGITHLLHKTNSTADPKNYRPITCLPTVYKTLTSILRAKIYRHVESNSIMSASQNGCRSGARGTKELLLIDMAICQQARRNRKDLSTCWIDYKKAYDSVPHTWLMRVLELYKTNTTLRTFLASCMRQWRTVLLYPGSRQTLGDGEPIRIERGIFQGDSLSPLWFCLALNPLSTLLKSSGLGYRLRRGGQVISHLLYMDDLKLFAPTEVQLMGLLKVTETFSNSIRMGFGVDKCAVMHVKRGRLVESRSVQLSDSTDLRTLSATETYKYLGMSQALGINETDMKQSLRERFLGRLRKVLKSLLSGGNRVRAYNGWVMPVLMYSFGILKWTQTELDTLDRTVRTLLTAYRMHHPRSSVMRLYIPRKCGGRGFLNAKTLHNREIYNLREYFLHCGGEMHTDVVAVDSGLTPLSLAKGNWRKPVVLTTGDREAVWQSKELHGRFYRALHGPDVDFSASVAWLRFGDLFGETEGSVCAIMDEVVMTNNYRKYILRDGTIDICRACHRPGESLRHIISGCSRLANGEYLHRHNQVARIIHQQLALKYRLVTSEVPYYRYVPEPVLEDGHITIYWDRSIITDRTIVANRPDIVLIDRTERRAMIVDVTVPHDENLVKAEKDKECKYLDLAHEVVDLWDIDKAIIVPIVVSAHGLMAKSLDKHLKRLTLDGWIKGQMQKAVLLETARIVRKFLSLEP

SEQ ID NO: 12367 - protein, 1121 aa, Furcula furcula
MRRTTVRRMRWTSSINENVMRAYYEATEGGTSLTAYRNRMLSLFQALEPAVNVSAQRLSDQVRAIQRSHMLDGAVLDRLRSEVQGSRVAPCTSSSQAVAPAVNTAPAPRLVAISDDDRDDITTNVSTNISTQLRSTLEDVVREYRTMPCGLRPRLPRLPMHKRNRALVCALDSLLSSYFDSSEDLADAHSLLYCAAMTACRVARVKLQNTDAATRPRPAVPAWQCRIERRIGEARVLIGKLTCFREGNTRPRVMRFVRRAFSGTGVDPREYLSRVTERIDFLKQKVCAWASRIRRYRARADRYFQNNMFQRDQRWVYRSWERPSQTEGDVRRPDDDAMATFWRNIWSVPVTHSEGDWIGDVEQVCEPLPEMGAITIWPQDVADAVRLLPNWKAPGPDGLHNFWLKSIRSSHICLASLFQSALESGSLPEFMTTGITHLLHKTNSTTDPKNYRPITCLPTVYKTLTSILRTKIYRHVEDNSIMSASQNGCRSGARGTKELLLIDMAICQQARRNRKDLSTCWIDYKKAYDSVPHTWLMRVLELYKVNATLRTFLASCMRQWRTVLRYPGSRQTLGDGEPIRIERGIFQGDSLSPLWFCLALNPLSTLLKSSGLGYRLRRGGQVISHLLYMDDLKLFAPTELQLMGLLRVTETFSNSIRMEFGVDKCAVMHVKRGRIVESRSVQLSDSTDLKTLSATETYKYLGMSQALGINETDMKQSLRDRFLGRLRKVLKSLLSGGNRVRAYNGWVMPVLMYSFGILKWTQTELDTLDRTVRALLTTYRMHHPRSSVMRLYIPRKCGGRGFLNAKTLHNREIYNLREYFLHCGGEMHTGVVAVDNGLTPLSLAKGNWRKPVVLTTGDREAVWQSKELHGRFYRALHGPDVDFSASVAWLRFGDLFGETEGFVCAIMDEVVMTNNYRKYILRDGTIDICRACHRPGESLRHIISGCSRLANGEYLHRHNQVARIIHQQLALRYRLVTSEVPYYRYVPEPVLEDGHITLYWDRSIITDRTIVANRPDIVLIDRTVRRAMIVDVTVPHDENLVKAEKDKECKYLDLAHEVVDMWDIDKAIIVPIVVSAHGLMAKSLDKHLKRLTLDGWIKGQIQKAVLLETARIVRRFLSLEP

SEQ ID NO: 12368 - protein, 1196 aa, Furcula furcula
MLTRNRAHPRPPDSSPRSASQPLGPSTDGSLAAVASSGSDEYFSPPTSPPPVRRRRGRPPRVLGSLEQPAPNRVLAPGGVVRRMRWTSSINENVMRAYYEATERGTNLTAYRLRMLSLFQALEPAVNVSAQRLSDQVRAIQRGHMLDDAVLDRLRSEVQGSRVAPCISSSQAVAPAVNIEPAPRPATNSDDDRDDMTTDVSTNLNTQLRSTLEDVVREYRTMPLNLRPRLPRLPMHKRNRALVCALDSLLSSYFDSSEDLADAHSLLYCAAMTACRVARVKFPSTDAATRPRPAVPAWQFRIECRIGEARVLIGKLNCFREGNTRPRVMRFVRRAFSGTGIDPREYLSRVTERIDFLKQKVCAWANRIRRYKARVDRYSQNNMFQRDQRWVYRSWERSSQIEGDGRRPDDSAMTTFWRNIWSVPVTHSEGDWMRDVEQICEPLPEMGAITIRPQDVADAVRPMPNWKAPGPDGLHNFWLKWIRSSHICLASLFQSALESGSLPEFMTMGITHLLHKTSSTTDPKNYRPITCLPTVYKTLTSILRAKIYRHVEDNSIMSASQNGCRSGARGTKELLLIDMAICQQARRNRKDLSTCWIDYKKAYDSVPHTWLMRVLELYKVNPTLRTFLASCMRQWRTVLLYPGSRQILGNGDPIRIERGIFQGDSLSPLWFCLALNPLSTLLRGSGLGCRLRRGGQVISHLLYMDDLKLFAPTELQLMGLLKVTETFSNSISMEFGVDKCAVMHVKRGRMVESRSVQLLDTTDLRTLSATETYKYLGMSQALGINETDMKQSLRERFLGRLRKVLKSLLSGGNRVRAYNGWVMPVLMYSFGILKWTQTELDTLDRTVRTLLTTYRMHHPRSSVMRLYIPRKCGGRGFLNAKTLHNREICNLREYFLHCGGVMHTDVVAVDNGLTPLSLAKGNWRKPVVLTTGNREAVWQSKELHGRFYRALHGPDVDFSASVAWLRFGDLFGETEGFVCAIMDEVVMTNNYRKYILRDGTIDICRACHRPGESLRHIISGCSRLANGEYLHRHNQVARIIHQQLALKYRLVMSEVPYYRYVPEPVLEDGHITLYWDRSIITDRTIVANKPDIVLIDRNERRAMIVDVTVPHDENLVKAEKDKECKYLDLAHEVVDMWDIDRAIIVPIVVSAHGLMAKSLDKHLKRLTLGGWIKGQMQKAVLLETARIVRRFLSLEP

SEQ ID NO: 12369 - protein, 994 aa, Spodoptera exigua
MEFLARSSPSESTLWNERIASLKGLTDRLTLCIFKVVLTFKSACMGLIEINNFDFDFDFDTHSIMYCAAVAACRVAHVKFPTNDVTTRPKPAVPAWQRRIECRIAGARALIGKLICFREGNTRPKVMRFVRRAFSGTDISPRDYMSRVTERIDFLKQKVYAWANRIRRYRRRVERYTQNRTFRSNERWVYRTWERPDHGVTDRRLPDDDAMCSFWRSIWSVPVSHTEGDWIRDVERACDPIPQMGTINISPQDVARAVRPLPNWKSPGPDGLHNFWIKWLTRAHARLASQFQSAVESGSLPKFLTTGVTHLLHKSGSTAEPKNYRPITCLPTVYKVLTSILRSKINSHIDKNKIMSTAQNGCKNGSRGTKELLLIDMAISQQVRRSRKDLSTCWIDYKKAYDSIPHTWLMRVLELYKIDTILRTFLMSCMRQWSTVLRYPGCRHTQRNSEPVRIERGIFQGDSLSPLWFCLALNPLSTLLENSGLGYRLKRGGQVISHLLYMDDLKLFAPNKLQLMELLKLTETFSSAIRMEFGVDKCAIMHVKRGEVVESVGTQLTDSINLRSLSPTETYKYLGMSEALGINVTDMKQSLKERFFGRLKKVFNSFLSGGNKVRAFNGWVMPVLMYSFGVLKWSQTELDALDRQVRTMLTAYRMHHPRSSVMRLYIPRKCGGRGFLNAKTLHNREVCSLREYFLAADVDMHRDVVAVDKGLTPLSLAIENWRKPVVLDTNARREVWQSKELHGRFFRALHGPDVDQVASVAWLRFGDLFGETEGFVCAIMDEVIMTNNYRRFIVKDGTVDICRACHRPGESIRHIISGCSRLANGEYLHRHNLVARIIHQQLALKYSLVESEVPYYRYEPDPVLDNGHITLYWDRSIITDRTIVANKPDIVVVDRKERRAMIVDIAVPHDENLVKAEKDKLIKYIDLAREVVDMWEVDSAIIVPIVVSANGLIAKSLDQHLRRLSLGGWIKGLIQKVVLLDTARIVRRFLSLEP

SEQ ID NO: 12370 - protein, 1193 aa, Heliothis virescens
MLTRSRTRARPPPPGSSLSSASPPPDSGSPVSPAAAAASSSSDEYFSPPTSPPPVRRRAGHRPPDGMGSRGPQASDRVSAPGGRASRIRWTQEINESVMRAYYGATEGEANLTAYRSRMLSLFQVLEPTLNVSAQRLSDQVRVILRDHRLDNAVLDRLRSEMRSSCVVSSPPHPDAPEPVVPPRINDMVDRGDDGAIVAGTQCNEILRSTLEDAIAEYRTMSPEQRPRLPRLPMHKKNQALMGSLDSLLSILFESSENLADTHSILYCGAVAACRLANVKFPNVTTTRPKTAPAWQCRIQRRIDEARVLIGKLTCFREGNTRPRVMRFVRRAFTGMDINPSEYLARVTERIDFLKQNICAWAGRIRRYKRRMDRYNLNRAFQRDQRRVYRAWERPDCGVDDRCLPDNNTMNAFWRNIWSVPVGHTEGDWTVEVQRACEPIPEMEPVHISTEDVSCAVHPMPNWKSPGPDGLHNYWIKWFRSSHARLALQFQAALESGSLPAFLTTGITHLLYKSGSATEPKNYRPITCLPTVYKILTSILRAKMYHHIETHSIMSASQNGCRNGSRGTKELLLIDMAINQQVRRSRKNLSTCWIDYKKAYDSVPHAWLLRVLELYKIDATLRAFLKSCMGQWKTALYYPGCGQICGNGELIRIERGIFQGDSLSPLWFCLALNPLSTLLEGSGLGFKLRRGGQVISHLLYMDDLKLFAHNRLQLMELLKITKVFSEAIRMEFGVDKCAVMYVERGEIVESLGTQLTDSINFRSLSSTETYKYLGMSEALGINLTDMKQSLKERFFGRLKKVLNSLLAGGNKVRAFNGWVMPVLMYSFGILKWTQTELDALDRKVRTLLTAYRMHHPRSSVMRLYIPRKCGGRGFLNAKTLHNREVCNLREFFLKADVGMHRDVVAVDKGLTPLSLQVENWRKPVIMDTNDRKRIWQSKVLHGRFYQALHGPDIDFKASVTWLPTGDLFGETEGFVCAIMDEVMMTNNYRKYVVKDGTVDICRACRRPGESIRHIISGCSHLANGEYLHRHNLVARIIHQQLALKYKLVEQEVPYYRYVPDPVLENGHVTLYWDRSIITDRTVMANKPDIVVIDRLERRAVIVDITVPHDENLVKAEKDKQLKYLDLAHEVVNIWHVDSAIIVPIVVSANGLIAKSLDSHLKRLALDGWIKRLMQKAVLLDTARIVRRFLSMEP

SEQ ID NO: 12371 - protein, 1080 aa, Amphipyra berbera
MLSLFQVLEPTVNVSAQRLSDQVRVIQRDHRLTDAALDRLRSEVQSNRIISLQSQTAAQPQTPTVVPPLPIQADEESDDRVTNVSTQCNEQLRSALELAIREYRFTPPNIRPRIPRLPMHRKNRALMCALDSLLSSYFDNSENLEDTHSILYCAAVAACRVAHAKFDNNDRATRPKPAVPAWQCRIERRINEARALIGKLICFREGNTRPRVMRFVRRAFSGTDINPRDYLSRVTERIDFLKQKVYAWANRIRRYKRRVERYTQNRMFHSDERWVYRTWERPDHDVSDTHLPDNDVMNTFWRNIWSMPVTHTEGDWMQEVQRACEPIEEMGDITIVPQDVTSAVRPMANWKSPGPDGLHNFWLKWLRSSHARLASQFQSSLESGSLPEFLTTGVTHLLHKSGSTAEPKNYRPITCLPTVYKLLTSILRAKINSHIINNSIMSVSQNGCKNGSRGTKELLLIDMAISQQVRRSRKDLSTCWIDYKKAYDSVPHTWLMRVLELYKVNTTLCAFLTSCMGQWRTVLHYPGCRQIQGRGEPIRIERGIFQGDSLSPLWFCLALNPLSTLLEGSGLGYRLRRGGQVISHLLYMDDLKLFAPNNLQLMKLLKVTETFSNSIRMEFGVDKCAVMHVKRGGIMESVGTQLSDSIHLRPLSSTETYKYLGMSEALGINETDMKQSLRERFYGRLKKVLKSLLSGGNKVRAFNGWVMPVLMYSFGILKWTQTELDALDRRVRTLLTAYRMHHPRSSVMRLYIPRKCGGRGFLNAKTLHNREVCSLREYFLQADVGMHRDVVAVDKGYTPLSLAKENWRKPVVLDTNGRREVWQSKELHGRFYRALHGPDVDFLASVAWLRFGDLFGETEGFVRAIMDEVMMTNNYRKYIVKDGTVDICRACHCPGESIRHIISGCSRLANGEYLHRHNLVARIIHQQLALKYNLVDAEVPYYKYVPDPVLENGHITLYWDRSIITDRTIVANKPDIVVIDRTERLTMIVDITVPHDGNLVKAEKDKEIKYQDLAHEVVDMWEVDSAVIVPIVVTANGLIAKSLDHHLTRLSLGSWVKGLIQKAVLLDTARIVRRFLSLRP

SEQ ID NO: 12372 - protein, 1203 aa, Amphipyra berbera
MLTRARARKQTAHPGSPDSSLSSASQPPESSPPVSAVTPAAAVASSSSDEYYSPPSSPPPVRRRGGARPPACLGPRGQPATNRVPAAGGNVSRMRWTQSINENVMRAYYGATEGGINLTAYRERMLFLFQVLEPAINVSAQQLSDQVRVVQRNRRLDDTVLERLRSEARNSQTVTFPVQAAVQMQPIAVPPRPIHVDGEGDGEAINVSNQCSEELRSALDDAILEFRTTPPEIRPRLPRLPMHGKNRALMCALDSLLSNYFDGSEDLADTHSILYCAAIAACRVAHVKFTENERATRPKPAVPAWQSRIERRIGGARVLIGKLICFREGNNRPRVMRFVRRAFSGTDISPRDYMSRVTERIDFLKQKVYAWANRIRRYKRRVERYTQNRIFQSDQRRVYRAWERPDPGGGDVRLPDDDALSSFWRSIWSVPIAHTEDGWMRDIEQVCEPIAEMEPITITPQDVADAARPLPNWKSPGPDGLHNFWLKWLRSSHARLASQFQSSLESGSLPQFLTTGVTHLLYKSGSTAEPKNYRPITCLPTVYKLLTSILRVKITTHIDNNCIMSASQNGCRKGSRGTKELLLIDMAISQQVRRSQKDLSTCWIDYKKAYDSVPHSWLMRVLELYKINTTLRTFLMSCMRHWRTVLRYPGCRRIRGSGEQIRIERGIFQGDSLSPLWFCLALNPLSTLLEGTGLGYQLRRGGQVISHLLYMDDLKLFAPTDLQLMELLKVTENFSNSIRMEFGVDKCAVMHVKRGRIAESEGIQLPNSVQLRSLSPTETYKYLGMSEALGISETDMRQSLRERFFGRLNKLLKSLLSGGNKVRAFNGWVMPVLMYSFGTLKWTQADLDALDRRVRALLTAHRMHHPRSSVMRLYIPRKCGGRGFLNAKTLHNREVYSLREYFLQAEGVMHRDVVAVDKGFTPLALARENWRKPAVLSTNDREVVWQSKELHGRYYRALHGPDVDFSASVSWLRSGNLFGETEGFVCAIMDEVMMTNNYRKYIVKDGTVDICRACHRPGESIRHIVSGCSRLANGEYLHRHNLVARIIHQQLALKYNLVESEVPYYRYVPDPVLENGHATLYWDRSIITDRTIVANKPDIVVIDRSERRTMIVDITVPHDENLVKAEKDKQIKYLDLAHEVVGMWDVDSAVIVPIVVTANGIIAKSLDIHLMRLSLGSWIKGLIQRAVLLDTARIVRRFLSLEP

SEQ ID NO: 12373 - protein, 1109 aa, Amphipyra berbera
MKWTQSINENVMRAYYGSTEGGTNLTAYRVRMLTLFQELEPAINVSAQRLSDQVRVIQRNHRLDDAALDRLRLEVQNSRAIPVPSQTAVHQLINVAPPRSDRVDGDEDDGAVTVSSQYNDRLRSALEDAIRECRANPESRPRLPRLPMHNKNRALVCALDSLLASYFESSEDLGDTHSILYCAAVAACRVANVKFNNSERATRPKLAVPAWQCRIERRIDETRALIGKLICFREGNTRPRVMRFVRRAFSGTGISPREYTSRATERIDFLKQKVCAWASRIRRYKRRVERYTQNRMFQCDQRWVYRAWERPDQSVSGGRLPDDDAMSSFWRSIWSIPVNHTEGDWMRDIERTCESIEEMGEIVISPQDVAGAVRPLPNWKSPGPDGLHNFWIKWLRSSHARLASQFQSSLESGSLPQFLTTGVTHLLHKSGSTAEPKNYRPITCLPTVYKLLTSILRSKINTHIGNNSVLSSSQNGCRNGSRGTKELLLIDTAISQQVRGSEKSLSTCWIDYKKAYDSVPHTWLMRVLELYKINTTLRTFLRSCMGQWRTVLRYPGCQPIRGSGEPIRIERGIFQGDSLSPLWFCLALNPLSTLLEGSGLGYPLRRGGQVVSHLLYMDDLKLFAPTKLQLVDLLKVTETFSNSIRMEFGVDKCAVMHVRRGRIMESEGLQLSDSIHLSPLSANDTYKYLGMSEGLGISEADMKQSLRERFFGRLKKVLKSLLSGGNKVRAFNGWVMPVLMYSFGILKWTQTELDALDRRVRTLLTANRMHHPRSSVMRLYIPRKCGGRGLLNAKTLHNREVCSLREFFLHADAGMHRDVVAVDKGLTPLSLARENWRKPVVLSTNDRREIWQSKELHGRFYRALHGPDVDFLASVSWLRFGDLFGETEGFVCAIMDEVIMTNNYRKYIVKDGTVDICRACHCPGESLRHIISGCSRLANGEYLHRHNQVARIIHQQLALKYNLVESEVPYYRYVPDPVLENGRITLYWDRSIITDRTIVANKPDIVVIDRSERRTMIVDVTIPHDGNLVKAEKDKQIKYLDLTHEVVNMWDVESATIVPIVVTANGLMAKSLDKHLMRLSLGGWIKGLIQKAVLLDTARIVRRFLSLEP

SEQ ID NO: 12374 - protein, 1202 aa, Amphipyra berbera
MLTRSRTRTTEQRSARPPPPDSPFSSASQPPELGLPVTPAAAASSSSSDEYFSPPTSPRPVRRQGRGRPPNSLGPRGPPAPSRVLAAGGYVQRMKWTQSINENVMRAYYGSTEGGTNLTAYRVRMLTLFQELEPAINVSAQRLSDQVRVIQRNHRLDDAALDRLRLEVQNSRAIPVPSQTAVHQLINVAPPRSDRVDGDEDDGAVTVSSQYNDRLRSALEDAIRECRANPESRPRLPRLPMHNKNRALVCALDSLLASYFESSEDLGDTHSILYCAAVAACRVANVKFNNSERATRPKLAVPAWQCRIERRIDETRALIGKLICFREGNTRPRVMRFVRRAFSGTGISPREYTSRATERIDFLKQKVCAWASRIRRYKRRVERYTQNRMFQCDQRWVYRAWERPDQSVSGGRLPDDDAMSSFWRSIWSVPVIHTEGDWMRDIERTCESIEEMGEIVISPQDVAGAVRPLPNWKSPGPDGLHNFWIKWLRSSHARLASQFQSSLESGSLPQFLTTGVTHLLHKSGSTAEPKNYRPITCLPTVYKLLTSILRSKINTHIGNNSVLSSSQNGCRNGSRGTKELLLIDTAISQQVRRSQKSLSTCWIDYKKAYDSVPHTWLMRVLELYKINTTLRTFLRSCMGQWRTVLRYPGCQPIRGSGEPIRIERGIFQGDSLSPLWFCLALNPLSTLLEGSGLGYPLRRGGQVVSHLLYMDDLKLFAPTKLQLVDLLKVTETFSNSIRMEFGVDKCAVMHVRRGRIMESEGLQLSDSIHLSPLSANDTYKYLGMSEGLGISEADMKQSLRERFFGRLKKVLKSLLSGGNKVRAFNGWVMPVLMYSFGILKWTQTELDALDRRVRTLLTANRMHHPRSSVMRLYIPRKCGGRGLLNAKTLHNREVCSLREFFLHADAGMHRDVVAVDKGLTPLSLARENWRKPVVLSTNDRREIWQSKELHGRFYRALHGPDVDFLASVSWLRFGDLFGETEGFVCAIMDEVIMTNNYRKYIVKDGTVDICRACHCPGESLRHIISGCSRLANGEYLHRHNQVARIIHQQLALKYNLVESEVPYYRYVPDPVLENGRITLYWDRSIITDRTIVANKPDIVVIDRSERRTMIVDVTIPHDGNLVKAEKDKQIKYLDLAHEVVNMWDVESATIVPIVVSANGLMAKSLDKHLMRLSLGGWIKGLIQKAVLLDTARIVRRFLSLEP

SEQ ID NO: 12375 - protein, 1205 aa, Amphipyra berbera
MLTRSRAKALTETTRPRSSAPSLSSASQPPDSSIVSDVTPAAAVASSSSDEYFSPPTSPPPARRRGRGRPPDSLRPRGPLASDRVPAAGGSVQRMRWTPTMNENCMRAYFGATEGGTNLIAYRGRMLSLFQVLEPTVNVSAQRLSDQVRVIQRDHRLTDAALDRLRSEVQSNAIISLQSQTAAQPRTPTVVPPLPTHANEESDDRVTNVSTQCNEQLRSALELAIREYRFTPPNIRPRIPRLPMHRKNRALMCALDSLLSSYFDNSENLEDTHSILYCAAVAACRVAHAKFDNNDKATRPKPAVPAWQCRIERRINEARALIGKLICFREGNTRPRVMRFVRRAFSGTDINPRDYMSRVTERIDFLKQKVYAWANRIRRYKRRVERYTQNRMFHSDERWVYRTWERPDHDVSDAHPPDNDVMNTFWRNIWSMPVTHTEGDWMQEVQRACEPIKEMGDITIVPQDVTSAVRPMANWKSPGPDGLHNFWIKWLRSSHARLASQFQSSLESGSLPEFLTTGVTHLLHKSGSTAEPKNYRPITCLPTVYKLLTSILRAKINSHILYNSIMSVSQNGCKNGSRGTKELLLIDMAISQQVRRSRKDLSTCWIDYKKAYDSVPHTWLMRVLELYKVNTTLCAFLTSCMGQWRTVLHYPGCRQIQGRGEPIRIERGIFQGDSLSPLWFCLALNPLSTLLEGSGLGYRLRRGGQVISHLLYMDDLKLFAPNNLQLMKLLKVTETFSNSIRMEFGVDKCAVMHVKRGGIMESVGTQLSDSIHLRSLSSTETYKYLGMSEALGINETDMKQSLRERFYGRLKKVLKSLLSGGNKVRAFNGWVMPVLMYSFGILKWTQTELDALDRRVRTLLTAYRMHHPRSSVMRLYIPRKCGGRGFLNAKTLHNREVCSLREYFLQADVGMHRDVVAVDKGFTPLSLAKENWRKPVVLDTNGRREVWQSKELHGRFYRALHGPDVDFLASVAWLRFGDLFGETEGFVCAIMDEVMMTNNYRKYIVKDGTVDICRACHCPGESIRHIISGCSRLANGEYLHRHNLVARIIHQQLALKYNLVDAEVPYYKYVPDPVLENGHITLYWDRSIITDRTIVANKPDIVVIDRTERLTMIVDITVPHDENLVKAEKDKEIKYQDLAHEVVDMWEVDSAVIVPIVVTANGLIAKSLDHHLTRLSLGSWVKGLIQKAVLLDTARIVRKFLSLRP

SEQ ID NO: 12376 - protein, 1207 aa, Amphipyra berbera
MLTRSRAKAIAQNTRPRPSASSLSSASQPPDSTIVSDVTPAAAVASSSSDEYFSPPSTPPPPPPRRRGRGRPPASLGPRGPPASDRVPAPGGSVQRMRWTPTMNENCMRAYFGATEGGTNLTAYRGRMLSLFQVLEPAVNVSAQRLSDQVRVIQRDHRLTDDALDRLRSEVQSNCIISLQSQTAAQPQVPPMVPPQPIRADEESDDRVTIVSAQCNEQLRSALELAIREYRFTPPNLRPRIPRLPMNRQNRALMCALDSLLSNYFDNSEGLEDTHSILYCAAVAACRVAHVKFDNNDRATRPKPAVPAWQCRIERRINEARALIGKLICFREGNTRPRVMRFVRRAFSGTDINPREYMSRVTERIDFLKQKVYAWANRIRRYKRRVERYTQNRMFHSDERWVYRTWERPEHDVSDTHLPDNDVMNTFWRNIWSMPVTHTEGDWMQEVQRACEPIEEMGDIIIVPQDVTSAVRPMANWKSPGPDGLHNFWLKWLRSSHARLASQFQSSLESGSLPPFLTTGITHLLHKSGSTAEPKNYRPITCLPTIYKLLTSILRAKINTHIINNSIMSASQNGCKNGSRGTKELLLIDMAISQQVRRSRKDLSTCWIDYKKAYDSVPHTWLMRVLELYKVNTTLCAFLTSCMGQWRTVLHYPGCRQIQGRGEPIRIERGIFQGDSLSPLWFCLALNPLSTLLEGSGLGYRLRRGGQVISHLLYMDDLKLFAPNNLQLMKLLKVTETFSNSIRMEFGVDKCAVMHVKRGGIMESVGTQLSDSIHLRSLSSTETYKYLGMSEALGINETDMKQSLRERFYGRLKKVLKSLLSGGNKVRAFNGWVMPVLMYSFGILKWTQTELDALDRRVRTLLTAYRMHHPRSSVMRLYIPRKCGGRGFLNAKTLHNREVCSLREYFLQADVGMHRDVVAVDKGFTPLSLAKENWRKPVVLDTNGRREVWQSKELHGRFYRALHGPDVDFLASVAWLRFGDLFGETEGFVCAIMDEVMMTNNYRKYIVKDGTVDICRACHCPGESIRHIISGCSRLANGEYLHRHNLVARIIHQQLALKYNLVDAEVPYYKYVPDPVLENGHITLYWDRSIITDRTIVANKPDIVVIDRTERLTMIVDITVPHDENLVKAEKDKEIKYQDLAHEVVDMWEVDSAVIVPIVVTANGLIAKSLDHHLTRLSLGSWVKGLIQKAVLLDTARIVRKFLSLRP

SEQ ID NO: 12377 - protein, 1202 aa, Amphipyra berbera
MLTRSRTRTTEQRSARPPPPDSPFSSASQPPELGLPVTPAAAASSSSSDEYFSPPTSPRPVRRQGRGRPPNSLGPRGPPAPSRVLAAGGYVQRMKWTQSINENVMRAYYGSTEGGTNLTAYRVRMLTLFQELEPAINVSAQRLSDQVRVIQRNHRLDDAALDRLRLEVQNSRAIPVPSQTAVHQLINVAPPRSDRVDGDEDDGAVTVSSQYNDRLRSALEDAIRECRANPESRPRLPRLPMHNKNRALVCALDSLLASYFESSEDLGDTHSILYCAAVAACRVANVKFNNSERATRPKLAVPAWQCRIERRIDETRALIGKLICFREGNTRPRVMRFVRRAFSGTGISPREYTSRATERIDFLKQKVCAWASRIRRYKRRVERYTQNRMFQCDQRWVYRAWERPDQSVSGGRLPDDDAMSSFWRSIWSVPVIHTEGDWMRDIERTCESIEEMGEIVISPQDVAGAVRPLPNWKSPGPDGLHNFWIKWLRSSHARLATQFQSSLESGSLPQFLTTGVTHLLHKSGSTAEPKNYRPITCLPTVYKLLTSILRSKINTHIGNNSVLSSSQNGCRNGSRGTKELLLIDTAISQQVRRSQKSLSTCWIDYKKAYDSVPHTWLMRVLELYKINTTLRTFLRSCMGQWRTVLRYPGCQPIRGSGEPIRIERGIFQGDSLSPLWFCLALNPLSTLLEGSGLGYPLRRGGQVVSHLLYMDDLKLFAPTKLQLVDLLKVTETFSNSIRMEFGVDKCAVMHVRRGRIMESEGLQLSDSIHLSPLSANDTYKYLGMSEGLGISEADMKQSLRERFFGRLKKVLKSLLSGGNKVRAFNGWVMPVLMYSFGILKWTQTELDALDRRVRTLLTANRMHHPRSSVMRLYIPRKCGGRGLLNAKTLHNREVCSLREFFLHADAGMHRDVVAVDKGLTPLSLARENWRKPVVLSTNDRREIWQSKELHGRFYRALHGPDVDFLASVSWLRFGDLFGETEGFVCAIMDEVIMTNNYRKYIVKDGTVDICRACHCPGESLRHIISGCSRLANGEYLHRHNQVARIIHQQLALKYNLVESEVPYYRYVPDPVLENGRITLYWDRSIITDRTIVANKPDIVVIDRSERRTMIVDVTIPHDGNLVKAEKDKQIKYLDLAHEVVNMWDVESATIVPIVVTANGLMAKSLDKHLMRLSLGGWIKGLIQKAVLLDTARIVRRFLSLEP

SEQ ID NO: 12378 - protein, 962 aa, Amphipyra berbera
MHRKNRALMCALDSMLSSYFDNSENLEDTHSILYCAAVAACRVAHAKFDNSDKATRPKRAVPAWQCRIERRINEARALIGKLICFREGNTRPRVMRFVRRAFSGTDINPRDYMSRVTERIDFLKQKVYAWANRIRRYKRRVERYTQNRMFHSDERWVYRTWERPDHDVNDTHPPDNDVMNTFWRNIWSMPVTHTEGDWMQEVQRACEPIEEMGDITIVPQDVTSAVRPMANWKSPGPDGLHNFWIKWLRSSHARLASQFQSSLESGSLPEFLTTGVTHLLHKSGSTAEPKNYRPITCLPTVYKLLTSILRAKINSHIINNSIMSASQNGCKNGSRGTKELLLIDMAISQQVRRSRKDLSTCWIDYKKAYDSVPHTWLMRVLELYKVNTTLCAFLTSCMGQWRTVLHYPGCRQIQGRGEPIRIERGIFQGDSLSPLWFCLALNPLSTLLEGSGLGYRLRRGGQVISHLLYMDDLKLFAPNNLQLMKLLKVTETFSNSIRMEFGVDKCAVMHVKRGGIMESVGTQLSDSIHLRSLSSTETYKYLGMSEALGINETDMKQLLRERFYGRLKKVLKSLLSGGNKVRAFNGWVMPVLMYSFGILKWTQTELDALDRRVRTLLTAYRMHHPRSSVMRLYIPRKCGGRGFLNAKTLHNREVCSLREYFLQADVGMHRDVVAVDKGFTPLSLAKENWRKPVVLDTNGRREVWQSKELHGRFYRALHGPDVDFLASVAWLRFGDLFGETEGFVCAIMDEVILTNNYRKYIVKDGTVDICRACHCPGESIRHIISGCSRLANGEYLHRHNLVARIIHQQLALKYNLVDAEVPYYKYVPDPVLENGHITLYWDRSIITDRTIVANKPDIVVIDRSERLAMIVDITVPHDENLVKAEKDKEIKYQDLAHEVVDMWEVDSAVIVPIVVTANGLIAKSLDQHLTRLALGSWIKGLMQKAVLLDTARIVRKFLSLRP

SEQ ID NO: 12379 - protein, 1197 aa, Noctua janthe
MLTRSAARRARLSPPDPSLSSASPPPESSPVVSAVTPAVAVASSSSDEYFSPPTTPPPVRRRGGRRPPDGLGPRGPPASDRVPAPGGSVPRMRWTQSINANVMRAYYGATEGGNNLTAYRVRMLSLFQVLEPAVNVSAQRLSDQVRVIQRNGMLDDTVLDRLRTEMQSSHVIATPPQTVVPPQSTIIPTHDNNVSNDMVTNVSTQCNEEMRCALEGAIREYRFMQPDLRPRVPRLPMHNKNRVLVAVLDSQLSNYFDNCENLTDAHSVLYCAAVAACRVAHVKFSDDRATRPKPAVPSWQYRIERRIGEARALIGKLICFREGNTRPRVMRFVRRAFSGTDISARDYMSRVTERIDFLKQKVYAWANRIRRYKRRVDRYTQNRTFQRDERWVYRAWERPDQGVADTRLPDDDAMCSFWRSIWSVPVSHTEGEWTREVERACDLVPEMGAITISPQDVVRAVRPLPNWKSPGPDGLHNFWIKWFTRSHARLAILFQSALESGSLPEFLTTGITHLLHKSGSTAEPKNYRPITCLPTVYKVLTSILRAKINKHIDDNSVMSASQNGCRNGSRGTKELLLIDMAISQQVRRSRRDLSTCWIDYKKAYDSVPHTWLMRVLELYKIDATLRTFLMSCMGQWRTVLRYPGCRQIQRNSEPIRIERGIFQGDSLSPLWFCLALNPLSTLLEDSGLGYRLRRGGQVISHLLYMDDLKLFAPNDLQLMELLKVTETFSSAIRMGFGVDKCAVMHVKRGEIVESVGTQLSLSINLRSLSATETYKYLGMSEALGINVADMKQSLKERFFGRLKKVFNSLLSGGNKVRAFNGWVMPVLMYSFGILKWTQTELDALDRRVRTLLTAYRMHHPRSSVMRLYIPRRCGGRGFLNAKTLHNREICSLREYFLETDVGMHRDVVAVDKGLTPLSLAKENWRKPVVLDTNDRMEVWQSKELHGRFFRALHGPDVDLSASVAWLRSGDLFGETEGFVCAIMDEVMMTNNYRRFIVKDGTVDICRACHRPGESIRHIISGCSRLANGEYLHRHNLVARIIHQQLALKYNLVESEVPYYKYVPDPVLENGSITLYWDRSIITDRTIVANKPDIVVVDRSERRAMIVDITVPHDENLVKAEKDKQIKYLDLAREVVDMWDVDSAIIVPIVVSAHGLIAKSLDQYLRRLSLGSWIKGLIQKAVLLDTARTVRRFLSLEP

SEQ ID NO: 12380 - protein, 918 aa, Noctua janthe
MSNFLMTELHDLNQPYRPSWQYRIERRIGEARALIGKLICFREGNTRPRVMRFVRRAFSGTDISARDYMSRVTERIDFLKQKVYAWANRIRRYKRRVDRYTQNRTFQRDERWVYRAWERPDQGVADTHLPDDDAMCSFWRSIWSVPVSHTEGEWTREVERACDLVPEMGAITISPQDVVRAVRPLPNWKSPGPDGLHNFWIKWFTRSHARLAILFQSALESGSLPEFLTTGITHLLHKSGSTAEPKNYRPIACLPTVYKVLTFILRAKINKHIDDNSVMSASQNGCRNGSRGTKELLLIDMAISQQVRRSRRDLSTCWIDYKKAYDSVPHTWLMRVLELYKVDSTLRIFLMSCMGQWRTVLRYPGCRQIQRNSEPIRIERGIFQGDTLSPLWFCLALNPLSTLLEDSGLGYRLRRGGQVISHLLYVDDLKLFAPNDLQLMELLKVTETFSSAIRMEFGVDKCAVMHVKRGEIVESVGTQLSDSINLRSLSATETYKYLGMSEALGINVADMKQSLKEGFFGRLKKVFNSLLSGGNKVRAFNGWVMPVLMYSFGILKWTQTELDALDRRVRTLLTTYRMHHPRSSVMRLYIPRRCGGRGFLNAKTLHNREIYSLREYFLETDVGMHRDVVAVDKGLTPLSLAKENWRKPVVLDTNDRMEVWQSKELHGRFFRALHGPDVDLPASVAWLRSGDLFGETEGFVCAIMDEVMMTNNYRRFIVKDGTVDICRACHRPGESIRHIISGCSRLANGEYLHRHNLVARIIHQQLALKYNLVESEVPYYKYVPDPVLENGNITLYWDRSIVTDRTIVAKKPDIVVVDRSERRAMIVDITVPHDGNLVKAEKDKQIKYLDLAHEVVDMWDVDSAIIVPIVVSAHGLIAKSLDQYLRRLSLGSWIKGLIQKAVLLDTARIVRRFLSLEP

SEQ ID NO: 12381 - protein, 1197 aa, Noctua janthe
MLTRSATRRARLSPPDPSLSSASPPPESSPIVSAVTPAVAVASSSSDEYFSPPTTPPPVRRRGGRRPPDGLGPRGPPASDRVPAPGGSVPRMRWTQSINANVMRAYYGATEGGNNLTAYRVRMLSLFQVLEPAVNVSAQRLSDQVRVIQRNGMLDDTVLDRLRTEMQSSHVIATPPQTVVPPQSTIIPTHDNNVSNDMVTNVSTQCNEEMRCALEGAIREYRFMQPDLRPRVPRLPMHNKNKVLVAVLDSQLSNYFDNCENLTDAHSVLYCAAVAACRVAHVKFSDDRATRPKPAVPSWQYRIERRIGEARALIGKLICFREGNTRPRVMRFVRRAFSGTDISARDYMSRVTERIDFLKQKVYAWANRIRRYKRRVDRYTQNRTFQRDERWAYRAWERPDQGVADTHLPDDDAMCSFWRSIWSVPVSHTEGEWTREVERACDLVPEMGAITISPQDVVRAVRPLPNWKSPGPDGLHNFWIKWFTRSHARLAILFQSALESGSLPEFLTTGITHLLHKSGSTAEPKNYRPIACLPTVYKVLTSILRAKINKHIDDNSVMSASQNGCRNGSRGTKELLLIDMAISQQVRRSRRDLSTCWIDYKKAYDSVPHTWLMRVLELYKVDSTLRIFLMSCMRQWRTVLRYPGCRQIQRNSEPIRIERGIFQGDSLSPLWFCLALNPLSTLLEDSGLGYRLRRGGQVISHLLYMDDLKLFAPNDLQLMELLKVTETFSSAIRMEFGVDKCAVMHVKRGEIVESVGTQLSDSINLRSLSATETYKYLGMSEALGINVADMKQSLKERFFGRLKKVFNSLLSGGNKVRAFNGWVMPVLMYSFGILKWTQTELDALDRRVRTLLTTYRMHHLRSSVMRLYIPRRCGGRGFLNAKTLHNREIYSLREYFLETDVGMHRDVVAVDKGLTPLSLAKENWRKPVVLDTNDRMEIWQSKELHGRFFRALHGPDVDLPASVAWLRSGDLFGETEGFVCAIMDEVMMTNNYRRFIVKDGTVDICRACHRPGESIRHIISGCSRLANGEYLHRHNLVARIIHQQLALKYNLVESEVPYYKYVPDPVLENGNITLYWDRSIVTDRTIVANKPDIVVVDRSERRAMIVDITVPHDGNLVKAEKDKQIKYLDLAHEVVDMWDVDSAIIVPIVVSAHGLIAKSLDQYLRRLSLGSWIKGLIQKAVLLDTARIVRRFLSLEP

SEQ ID NO: 12382 - protein, 1200 aa, Mythimna ferrago
MLTRAAARRARLPPPASSLSSASLPPEPSLTVSAVTPAAAAASSSSDEYYSPPTTPPPARRRGGRRPPACLGPRGPPVSDRVPAAGGSVPRMRWTQSTNENVMRAYYGATEGGNNLTAYRVRILSLFQVLEPAVNVSAQRLSDQVRVIQRNHMLDDTVLDRLRTEMSNRVITTPSQPVVPVVVLQSSHISLHTDEVSTDTVTNVSTQCNNEPRSALECAIREYRNMPLELRPRLPRLPMHNKNKALVAALDSQLSNYFDDCEDLTDTHSIMYCAAVAACRVAHVKFPNSDVATRPKPAVPAWQCRIERRIGGARALIGKLICFREGNTRPRVMRFVRRAFSGTDISPRDYMSRVTERIDFLKQKVYAWANRIRRYKRRVERYIQNSTFRSNERWVYRAWERPDQGVTDTRPPDDDAMYSFWRNIWSVPVSHIEGGWTREVERACESITEMGAFTISPQDVARAVRPLPNWKSPGPDGLHNFWIKWLQRSHARLASQYQAALESGSLPEFLTTGVTHLLHKSGSTAEPKNYRPITCLPTVYKVLTSILRAKINHHVDNNAIMSASQNGCRNGSRGTKELLLIDMAISQQVRRSRKDLSTCWIDYKKAYDSVPHTWLMRVLELYKVDATLRTFLMSCMRQWRTVLRYPGCRNIQRNSEPVRIERGIFQGDSLSPLWFCLALNPLSTLLENSGLGYRLKRGGQVISHLLYMDDLKLFAPNHLQLMELLKVTETFSSAIRMEFGVDKCAVMHIKRGEIVESVGIQLSDSIHLRSLSPTETYKYLGMSEALGINATDMKQSLRERFFGRLKKVLNSLLSGGNKVRAFNGWVMPVLMYAFGVLKWTQTELDALDRRVRTLLTAYRMHHPRSSVMRLYIPRKCGGRGFLNAKSLHNREVCSLREYFLAADGGMHRDVVAVDKGLTPLSLANENWRKPVVLDTNVRREVWQSKELHGRFFRALHGPDVDQLASVAWLRVGDLFGETEGFVCAIMDEVIMTNNYRRFIVKDGTVDICRACHRPGESIRHIISGCARLANGEYLHRHNLVARIIHQQLALKYSLVESEVPYYRYVPDPVLDSGDITLYWDRSIITDRTIVANKPDIVVVDRSERRAMIVDISVPHDENLAKAEKDKQIKYIDLAREVVDMWEVDSAIIVPIVVSANGLIAKSLDQHLRRLSLGDWIKGLIQKAVLLDTARIVRRFLSLEP

SEQ ID NO: 12383 - protein, 1200 aa, Mythimna ferrago
MLTRSRARSQIAQPTSSGSSLSSASQPPGPAPAVSPEIPVAAVASSSSDEYFSPPTTPPPARRRGRGRPPACLGPRGPPASDRVLAAGGSVQRMRWTQSINENVMRSYFGATEGGTNLTAYRGRMLSLFQVLEPAVNVSAQRLSDRVRVIQRNRMLDDAVLDRLRLESRNGRVSPISPPAAVQRQPSVSPRPDHVGGDDDDEAISVSTQCNARLRSALEDAFREYRSIPPELRPRLPRLPMHRKNRALVCALDSQLSNCFDSSEDLSDAHSILYCAAAAACRVAHVKIPNNDRATRPAKPAWQCRIERRIGETGALIGKLICFREGNTRPRVMRFVRRAFSGTDISPRDYLPRITERIDFLKQKVYAWASRIRRYKRRVERYTRNHTFQSNERWVYRAWERPDQSVIDTRLPDDDAMYSFWRSIWSVPVNHTEGDWTREIERECELIPEMGAINISPQDVACAVRPLPNWKSPGPDGLHNFWLKWFQSSHARLASQFQSALESGSLPQFLTTGITHLLHKSGSTAEPKNYRPITCLPTVYKVLTSILRAKINNHIETNSIMSASQNGCRNGSRGTKELLLIDVAISQQVRRSRRDLSTCWIDYKKAYDSVPHAWLMRVLELYKVDATLRAFLMSCMGQWRTVLHYPGCRRVSENSEPLRIERGIFQGDSLSPLWFCLALNPLSTLLEGSGLGYRLRREGQVISHLLYMDDLKLFASNNLQLMELLKVTETFSSAIRMEFGLDKCAVMHVKRGEIMESVGTQLSDSIHLRSLCSTETYKYLGMSEALGINAADVKQSLRERFFGRLNKVLNSLLSGGNKVRAFNGWVMPVLMYSFGILKWTQTELDALDRRVRTLLTANRMHHPRSSVMRLYIPRKCGGRGFLNAKTLHNREVCSLREYFLETDVGMHRDVVAVDKGLTPLSLASENWRKPIVMDTNERKEVWKGKELHGRFYRALHGPDVDLLASVSWLRFGNLFGETEGFVFAIMDEVMMTNNYRKYIVKDGTVDICRACHRPGESIRHIISGCSHLANGDYLHRHNLVARIIHQQLALKYNLVESEVPYYRYVPDPVLENGSVTLYWDRSIIADRTIVANKPDIVVIDRLERRTMIVDIAVPHDENLVKAEKDKQTKYLDLAREVVDMWEVDGAIIVPIVVTANGLIAKSLDQHLRRLSLGSWIKGLIQKAVLLDTARIVRRFLSQEP

SEQ ID NO: 12384 - protein, 915 aa, Mythimna ferrago
MYNKGNNNKPKPAVPAWQCRIERRIGGARALIGKLICFREGNTRPRVMRFVRRAFSGTDISPRDYMSRVTERIDFLKQKVYAWANRIRRYKRRVERYTQNSTFRSNERWVYRAWERPDQGVTDTRLPDDDAMCLFWRNIWSVPVSHTEGGWTREVERACESITEMGAITISPQDVARAVRPLPNWKSPGPDGLHNFWIKWLQRSHARLASQYQAALESGSLPEFLTTGVTHLLHKSGSTAEPKNYRPITCLPTVYKVLTSILRAKINHHVDNNAIMSASQNGCRNGSRGTKELLLIDMAISQQVRRSRKDLSTCWIDYKKAYDSVPHTWLMRVLELYKVDATLRTFLMSCMRQWRTVLRYPGCRNIQRNSEPVRIERGIFQGDSLSPLWFCLALNPLSTLLENSGLGYRLKRGGQAISHLLYMDDLKLFAPNNLQLMELLKVTETFSSAIRMEFGVDKCAVMHIKRGEIVESVGIQLSDSIHLRSLSPTETYKYLGMSEALGINATDMKQSLKERFFGRLKKVLNSLLSGGNKVRAFNGWVMPVLMYAFGVLKWTQTELDALDRRVRTLLTAYRMHHPRSSVMRLYIPRKCGGRGFLNAKTLHNREVCSLREYFLAADGGMHRAVVAVDKGLTPLSLANENWRKPVVLDTNVRKEVWQSKELHGRFFRALHGPDVDQLASVAWLRVGDLFGETEGFVCAIMDEVIMTNNYRRFIVKDGTVDICRACHRPGESIRHIISGCSRLANGEYLHRHNLVARIIHQQLALKYSLVESEVPYYRYVPDPVLDSGDITLYWDRSIITDRTIVANKPDIVVVDRRERRAMIVDISVPHDENLVKAEKDKQIKYIDLAREVVDMWNVDSAIIVPIVVSANGLIAKSLDQHLRRLSLSGWIKGLIQKAVLLDTARIVRRFLSLEP

SEQ ID NO: 12385 - protein, 1194 aa, Eilema sororculum
MLTRAQASRNRSAPTTSPDSSLSSAAQPPAVEPAASSSSSSDEFFSPPTSPTPVRRPGRGRPPTCLGPRRPPASNRAPATGGDVHRMRWTITINENVMRAYFAATEGGTNLSAYRTRMLPLFQALEPSINVSAQRLSDQVRVIQRNRMLNETVLETLRLECLRNICVTPAPAPAPAPASTVEINDDTCVAPDDTPIPVSIQYNEEIKEALECALREYRSMPVHVRPRLPRLPIHRRNIALVSALDSLLPRYLENSENLGDTHSILYCTAVAACRMAGAKFPNKDPAIRLKSAIPAWQCRIERRVAEARVLIGKLICFRSGNTRPRVMRYVTRAFAGTDISPQDYTSRVTERIDFLKQKVYAWANRIRRYKKRVDRYTVNRMFQRDQRWVYRSWERTEESVDDVRRPDAETTNAFWRSIWSVPVNHTEGDWMREVERACETIPEMEKINIDAIDVDCAVRSLSNWKSPGPDGLHNFWLKWLRSSHVVLASQFQSAIESGTLPAFMTTGVTHLLHKTGSTLEPNNYRPITCLPTVYKLLTSILRAKINNHINNNSIMCASQNGCRNGARGTKELLLIDMAISQQARRNRKDLTACWIDYKKAFDSVPHTWLLRVLELYKVNTTLCTFLRSCMGQWRTVLFYPGCRQALGSGEPITIERGIFQGDSLSPLWFCLALNPLSTLLVNSGLGYRLRREGQLVSHLFYMDDLKLFAHTNPQLIALLKVTETFSNSIKMAFGVDKCAVIHVKRGRVVESEGIQLSDSTNLRSLLVTETYKYLGMSQALCINEVDMKQMLQERFFGRLKKVLNSLLSGGNKVRACNSWVMPLLMYSFGILKWTQTELDTIDRKVRTQLTAFRMHHPRSSVMRLYIPRKCGGRGFLNAKTLHNREVCNLRDYFLKSNVDMHRDVVNVDTGLTPLGLAKENWRRPTIVGTDSRREVWQSKELHGRFYRALHRPEVDLLASVSWLRFSDLFGETEGFVCAIADEVIKTNNYRKYIMRDGTIDICRACHQPGESLRHITSGCSRLANGEYLHRHNQVARIIHQRLALKYNLVEVEVPYYRYVPEPVLENSHITLYWDRSIITDRTVVANKPDIVVIDRSERRALIVDVTIPHDENLVKAEKDKQVKYLDLAHEVVDMWNVDSAIIVPIVVSVNGLIAKSLDQHLKRLGLDGWVKGQMQKAVLLDTARIARKFLSLEP

SEQ ID NO: 12386 - protein, 1186 aa, Eilema sororculum
MVIIISAPTTSPDSSLSSAAQPPTVEPAASSSSSSDEFFSPPTSPTPERRPGRGRPPTCLGPRRPPASNRAPATGGNVHRMRWTNSINENVMRAYFAATEGGTNLSAYRTRMLPLFQALEPTINTSAQRLSDQVRVIQRNRMLNETVLETLRLECLRNICVTPAPAPAPASTAERNDDTRVAPDDTPIPVSIQYNEEIKEALECALREYRSMPVHVRPRLPRLPIHRRNIALVSALDSLLPRYLENSENLGDTHSILYCTAVAACRMAGAKFPIKDPAIRPKFTIPAWQCRIERRVAEARVLIGKLICFRSGNTRPRVMRYVTRAFAGTDISPQDYTSRVTERIDFLKQKVCAWANRIRRYKKRVDRYTVNRMFQRDQRWVYRSWERTDESVDDVRRPDAEATNAFWRSIWSVPVSHTEGDWMREVERACETIPEMEEIYIDATDVDCAVRSLSNWKSPGPDGLHNFWLKWLRSSHVVLASQFQSAIESGTLPAFMTTGVTHLLHKTGSTLEPNNYRPITCLPTVYKLLTSILRAKINNHINNNSIMCASQNGCRNGARGTKELLLIDMAISQQARRNRKDLTACWIDYKKAFDSVPHTWLLRVLELYKVNTTLCTFLRSCMRQWRTVLFYPGCRQALGGGVPITIERGIFQGDSLSPLWFCLALNPLSTLLVNSGLGYRLRREGQMVSHLFYMDDLKLFAHTNPQLIALLKVTETFSNSIKMAFGVDKCAVIHVKRGRVVESEGIQLSDSTNLRSILVTETYKYLGMSQALCINEVDMKQLLQERFFGRLKKVLNSLLSGGNKVRACNSWVMPLLMYSFGILKWTQTELDTIDRKVRTQLTAFRMHHPRSSVMRLYIPRKCGGRGFLNAKTLHNREVCNLRDYFLKSNVDMHRDVVNVDTGLTPLGLAKENWRRPTIVSTDSRGEVWQSKELHGRFYRALHRPEVDLLASVAWLRFSDLFGETEGFVCAIADEVIKTNNYRKYIMRDGTIDICRACHQPGESLRHITSGCSRLANGEYLHRHNQVARIIHQRLALKYNLVEVEVPYYRYVPEPVQENSHITLYWDRSIITDRTVVANKPDIVVIDRSERRALIVDVTIPHDENLVKAETDKQVKYLDLAHEVVDMWNVDSAIIVPIVVSVNGLLAKSLDQHLKRLGLDGWVKGQMQKAVLLDTARIVRKFLSLEP

SEQ ID NO: 12387 - protein, 1106 aa, Eilema sororculum
MRWTNSINENVMRAYFAATEGGTNLSAYRSRMLPLFQALEPSVNTSAQRLSDQVRVIQRNHMLNETVLETLRQECLRNICVTPALAPAPASTTALNEDSHVTRDDTPIPVSIQYNEEIKKALEYALREYRSMPIHVRPRLPRLPIHRRNIALVSALDSLLPKYLENSENLRDTHSILYCTAVAACRMAGAKFPIKDPAIRPKPAIPAWQCRIERRVAEARVLIGKLICFRSGNTRPRVMRYVTRAFAGTDISPQDYTSRVTERIDFLKQKVYAWANRIRRYKKRVDRYTVNRMFQRDQRWVYRSWERTDESVDDLRRPDAEATNAFWRSIWSVPVSHTEGDWMREVERACETIPEMEEIYIDATDVDCAVRSLSNWKSPGPDGLHNFWLKWLRSSHVVLASQFQSAIESGTLPAFMTTGVTHLLHKTGSTLEPNNYRPITCLPTVNKLLTSILRAKINNHINNNSIMCTSQNGCRNGARGTKELLLIDMTISQQARRNRKDLVACWIDYKKAFDSVPHTWLLRVLELYKVNTTLCTFLRSCMGQWRTVLLYPGCRQALGSGEPITIERGIFQGDSLSPLWFCLALNPLSTLLVNSGLGYRLRREGQMVSHLFYMDDLKLFAHTNPQLIALLKVTETFSNSIKMAFGVDKCAVIHVKRGRVVESEGIQLSDSTNLRSLLVTETYKYLGMSQALCINEVGMKQMLQERFFGRLKKVLNSLLSGGNKVRACNSWVMPLLMYSFGILKWTQTELDTIDRKVRTQLTAFRMHHPRSSVMRLYIPRKCGGRGFLNAKTLHNREVCNLRDYFLKSNVDMHRDVVNVDTGLTPLGLAKENWRRPTIVGTDSRREVWQSKELHGRFYRALHRPEVDLLASVSWLRFSDLFGETEGFVCAIADEVIKTNNYRKYIMRDGTIDICRACHQPGESLRHITSGCSRLANGEYLHRHNQVARIIHQRLALKYNLVEVEVPYYRYVPEPVLENSHITLYWDRSIITDRTVVANKPDIVVIDRSERRALIVDVTIPHDENLVKAEKDKQVKYLDLAHEVVDMWNVDSAIIVPIVVSVNGLIAKSLDQHLKRLGLDGWVKGQMQKAVLLDTARIVRKFLSLEP

SEQ ID NO: 12388 - protein, 1212 aa, Ptilodon capucinus
MTDAPRRNPRRQCRQRSAVRHYAQSTPPDQSPRSASPSPASIIRTSVTAVASSESDEYFSPPTSPPPVRRQRGRPPGHLGLLGQPAPNRVLVPSGVVRRMRWTSSMNENVMRAYYEATEGGTNLTAYRNRMLPLFQSLEPAVNVSAQRLSDQVRVIQRGNMLADTVLDRLRSEVQSRRVVPVASSQPAAQPVASATVTSRLAADSDVDRDNAPIDVSTQYNDLLRSTLEDVVREYRSMPNHLRPRIPRLPMHNGNRALVGALDSLLSIYFDSSDDLVDTHSILYCAAITVCRVARVKVFNTDTATRPKPAVPAWQCRIERRISEARALIGKLSCFREGNTRPRVMRFVKRAFAGTDVSPREYISRVTERIDFLKQKIYAWANRIRRYKARVDRYSQNSIFQRDQRWVYRSWERPNEPVSELQRPDDNAMTTFWRDIWSVPVTHYEGNWIGDVERMCEPIKEMEAISIGPLDVANAVRSLPNWKAPGPDGLHNFWLKWLRSSHVRLASQFQSALQSGSLPEFITTGVTHLLHKTGSTTDPKNYRPITCLPTIYKTLTSILRVKIARHVEDNSIMSASQNGCRSGSRGTKELLLIDMTICQQARRNRKDLSTCWIDYKKAYDSVPHTWLVRVLELYKIDTTLRTFLESCMRQWKTVLLCPGSRQILGNGEPIRIERGIFQGDSLSPLWFCLALNPLSALLEESGFGFRLRRGGQVISHLLYMDDLKLFAPTALQLSGLLKVTETFSNSIRMEFGVDKCAVMHAKQGRMVESEGIQLSDSIQLRSLAATETYKYLGMSQGLGISETDMKQLLRDRFLGRLKKVLKSLLSGGNKVRAYNGWVMPVLMYSFGILKWTQTELDTLDRTVRTTLTAYRMHHPRSSVMRLYIPRKCGGRGFLNVKTLHNREICSLREYFLRADGEMHVDVVAVDNGLTPLSLAKENWRKPVVLTTDDRRVVWQGKELHGRYYRALHGPDVDLAASVAWLRFGDLFGETEGFVCAIMDEVVMTNNYRRYILRDGTIDICWACHRPGESLRHIISGCSRLANGQYLHRHNQVARIVHQQLALKYRLVTSEVPYYRYEPQPVLEEGHITLYWDRSIITDRTIVANKPDIVLIDRQERRAMIIDITVPHDENLVKAEKDKESKYLDLAHEVVDMWDIDAAIIVPIVVSAHGLLAKSLDKHLKRLALGSWIKGQIQKAVLLETARIVRKFLSLEP

SEQ ID NO: 12389 - protein, 1133 aa, Ptilodon capucinus
MKNHNGINVAAIPHLIPFILSTYNNNNNNNVMRAYYEATEGGTNLTAYRNRMLPLFQSLEPAVNVSAQRLSDQVRVIQRGNMLADTVLDRLRSEMQSRRVVPVASSQPAAQPVASATVTSRLAADSDVDRDNAPINVSNQYNELLRSTLEDVVRVYRSMPNHLRPRIPRLPMHKGNRALVGALDLLLSIYFDSSDNLADTHSILYCAAITVCRVARVKVFNTDTATRPKPAVPAWQCRIERRISEARALIGKLSCFREGNTRPRVMRFVKRAFAGTDVSPREYISRVTERIDFLKQKIYAWANRIRRYKVRVDRYSQNSMFQRDQRWVYRSWERPSEPVSELQRPDDNATTTFWRDIWSVPVTHYEGDWIGDVERMCEPIKEMEAISIGPLDVANAVRSLPNWKAPGPDGLHNFWLKWLRSSHVRLASQFQSALQSGSLPEFITTGVTHLLHKTGSTTDPKNYRPITCLPTIYKTLTSILRAKIARHVEDNSIMSASQNGCRSGSRGTKELLLIDMTICQQARRNRKDLSTCWIDYKKAYDSVPHTWLVRVLELYKIDTTLRTFLESCMRQWKTVLLCPGSRQILGNGEPIRIERGIFQGDSLSPLWFCLALNPLSTLLEESGFGFRLRRGGQVISHLLYMDDLKLFAPTALQLTGLLKVTETFSNSIRMEFGVDKCAVMHAKQGRMVESEGIQLSDSIQLRSLAATETYKYLGMSQGLGISETDMKQLLRDRFLGRLKKVLKSLLSGGNKVRAYNGWVMPVLMYSFGILKWTQTELDTLDRTVRTTLTSYRMHHPRSSVMRLYIPRKCGGRGFLNVKTLHNREICSLREYFLRADGEMHVDVVAVDNGLTPLSLAKENWRKPVVLTTDDRRLVWQGKELHGRYYRALHGPDVDLAASVAWLRFGDLFGETEGFVCAIMDEVVMTNNYRKYILRDGTIDICRACHRPGESLRHIISGCSRLANGQYLHRHNQVARIIHQQLALKYRLVTSEVPYYRYEPQPVLEEGHISLYWDRSIITDRTIVANKPDIVLIDRQERRAMIVDITVPHDENLVKAEKDKESKYLDLAHEVVDMWDIDAAIIVPIVVSAHGLLAKSLDKHLKRLALGGWIKGQIQKAVLLETARIVRKFLSLEP

SEQ ID NO: 12390 - protein, 1203 aa, Agrochola circellaris
MLTRSATRRARPPPPDSSLSSALPPPVSSPIISAVTTPVAVVASSSSDEYFSPPTSPTPVRRQGRGRPPRSLGLRGQPAPNRVPAAGGCVRRMRWTQNVNENVMRAYFGATEGGSNLTAYRGRMLSLFQVLEPAVNVSAQRLSDQVRVIQRNHMLDDAVLDRLRLESRNNRVTPASPLVAVQLQNSPSATPRADHVGEEDDDGVISVSSQCNARLRNALEDAFRDYRSTPPGLRPRLPRLPMHKKNKALVCTLDSLLSNYFDGSKDLADTHSILYCAAVAACRVAHVKFPSSDRAPRPKPAVPAWQCRIERRIGEARVLIGKLICFREGNTRPRVMRFVKRAFSGTDTSSRDYLARVTERIDFLKQKICAWANRIRRYRRRVERYTQNRTFQSDERWVYRAWERLDQGVIDTRLPDDDAMCSFWRSIWSAPVNHTEGDWTGKIERACERIPEMGAITISPQDVACAVRPLPNWKSPGPDGLHNFWIKWFQRSHARLASQFQSALESGSLPQFLTTGITHLLHKSGSTAEPKNYRPITCLPTVYKVFTSILRTKINKHIDTNSIMSASQNGCKNGSRGTKELLLIDMAISQQVRRSRRDLSTCWIDYKKAYDSVPHTWLMRVLELYKVDATLRTFLISCMGQWRTVLRYPGCRQIQRNSEPIRIERGIFQGDSLSPLWFCLALNPLSTLLEDSGLGYRLRRGGQVISHLLYMDDLKLFAPNNLQLVELLKVTETFSSAIRMEFGVDKCAVMHVKRGGIVESGGTQLSDSIHLRSLSSIETYKYLGMSEALGINTADMKQSLRERFFNRLNKVLNSLLSGGNKVRAFNGWVMPVLMYSFGILKWTQTELDALDRRVRTLLTVNRMHHPRSSVMRLYIPRKCGGRGFLNAKTLHNREVCSLREYFLEADVGMHRDVVSVDKGLTPLSLANENWRKPIVLDTKDRREVWQSKELHGRFYRALHGPDVDLLASVSWLRFGDLFGETEGFVFAIMDEVMMTNNYRKYIVKDGTVDICRACHRPGESIRHIISGCSRLANGDYLHRHNLVARIIHQQLALKYSLVESEVPYYRYMPDPVLENGNITLYWDRSIITDRTIVANKPDIVVIDRLERRTMIIDIAVPHDENLVKAEKDKQIKYLDLAREVVDMWDVDTAVIVPIVVTANGIIAKSLDQHLRRLSLGSWIKGLIQKAVLLDTARIVRRFLSQGP

SEQ ID NO: 12391 - protein, 1203 aa, Hydraecia micacea
MLTRSRARRLPTTHPTSSGSSLSSASQLPEPAPDVSPVSPAAAVASSSSDEYFSPPTTPPPVCRRGRGRPPASLGLRGPPASERVPAPGGSVQRMRWTQTVNENVMRAYFGATEGGSNLTAYRGRMLSLFQVLEPAVNVSAQRLSDQVRVIQRNHMLDNVVLDRLRLESRNSHVTPASSLVAVQLQPSVPLRPDCVDIEDDDEAISVSSQCNARLRSALEDAFREYRSIPPGLRPRLPRLPMHKKNKALVCALDSQLSNCFNDSKDLADTHSILYCAAVAACRVAHVKFPNSDRAPRPKPAVPAWQCRIECRIGEARALIGKLICFREGNTRPRVMRFVRRAFSGTDISYRDYLSRVTERIDFLKQKICAWANRIRRYRRRVERYTQNRKFQSDERWVYRAWERPDQGVTDTRLPDDDAMCSFWRNIWSVPVSHTEGDWTGKIERACDLIPEMEALIISPQDVARAVRPLPNWKSPGPDGLHNFWIKWFKRSHDRLASQFQSALESGSLPQFLTTGITHLLYKSGSTADPKNYRPITCLPTVYKVLTSILRTKINKHIDTNSIMSVSQNGCKNGSRGTKELLLIDMTINQQVRRSRKDLSTCWIDYKKAYDSVPHTWLMRVLELYKVDTTLCTFLMSCMGQWRTVLRYPGCRNIQRNSEPIRIERGIFQGDSLSPLWFCLALNPLSTLLEDSGLGYRLRRGGQVISHLLYMDDLKLFAPNNLQLMELLKITETFSSAIRMEFGVDKCAVMHVKRGEIVESVGNQLSDSTNLRALSASDTYKYLGMSEALGINVTDMKQSLKERFFGRLKKVFNSLLSGGNKVRAFNDWVMPVLMYSFGILKWTQTELDALDRKVRTLLTANRMHHPRSSVMRLYIPRKCGGRGFLNAKTLHNREICSLREYFLETDVGMHRDVVVVDNGLTPLSLGKENWRKPVVLDTNDRMEVWQSKELHGRFFRALHGPDVDLLASVAWLRFGDLFGETEGFVCAIMDEVMMTNNYRRFIVKDGTVDICRACHRPGESIRHIISGCSRLANGEYLHRHNLVARIIHQQLALKYSLVESEVPYYRYVPDPVLENGNITLYWDRSIITDRTIVANKPDIVVMDRLERRAMIVDITIPHDENLVKAEKDKQIKYLDLAREVVDMWDVDSAIIVPIVVTANGLIAKSLDQHLRRLSLASWIKGLIQKAVLLDTARIVRRFLSLEP

SEQ ID NO: 12392 - protein, 1201 aa, Hydraecia micacea
MLTRSATARRARIPPPDSSLSSASPPAPLVSSPTVSAVMTPAAAVASSSSDEYFSPPTTPPPARRRGGRRPPDGLGPRGPPASDRVPAPGGSVQRMRWTRSINENVMRSYYGATEGGSNLTAYRVRMLSLFQVLEPAVNVSAQRLSDQVRVIQRNHMLDDTVLDRLRNEIQSSHAIAPQSQTAVILPQSNTSHADEGSNDRATNVSTQCNEELRSALEDAIQEYRSMSPELRPRLPRLPMHNKNRALVAVLNSQLSKYFDDCEDLTDTHSILYCAAVAACRVAHVKFTNDSRATRPKPAVPAWQCRIERRIGGARALIGKLICFREGNTRPRVMRFVRRAFLGTDISPQAYTSCVTERIDFLKQKVYAWANRIRRYKRRVERYAQNRTFQNDERWVYRDWERPDQSVADTCLPDDDAICSFWRSIWSVPVSHTEGDWARDVERACDPIPEMEAITICPQDVARAVRPLPNWKSPGPDGLHNFWIKWFSRSHARLASQFQTALESGSLPQFLTTGITHLLHKSGSTAEPKNYRPITCLPTVYKVLTSILRAKINKHIDTNFIMSASQNGCRNGSRGTKELLLIDMTISQQVRRFRKDLSTCWIDYKKAYDSVPHTWLMRVLELYKVDTTLRTFLMSCMGQWRTVLRYPGCRNIQRNSEPIRIERGIFQGDSLSPLWFCLALNPLSTLLEDSGLGYRLRRGGQVISHLLYMDDLKLFAPNNLQLMELLKVTQTFSNAIRMEFGVDKCAVMHVKRGEIVESVGNQLSDSTNLRALSASETYKYLGMSEALGINVTDMKQSLKERFFGRLKKVLNSLLSGGNKVRAFNGWVMPVLMYSFGILKWTQTELDALDRRVRTLLTANRMHHPRSSVMRLYIPRKCGGRGFLNSKTLHNREICSLREYFLETDVGMHRDVVMVDKGLTPLSLAKENWRKPVVLDTNDRMEVWQSKELHGRFFRALHGPDVDLLASVAWLRFGDLFGETEGFVCAIMDEVMMTNNYRRFIVKDGTVDICRACHRPGESIRHIISGCSRLANGEYLHRHNLVARIIHQQLALKYSLVESEVPYYRYVPDPVLENGNITLYWDRCIITDRTIIANKPDIVMVDRSERRAMIVDITVPHDENLVKAEKDKQIKYLDLAREVVDMWDVDSAIIVPIVVTANGLIAKSLDQHLRRLSLGSWIKGLIQKAVLLDTARIVRRFLSLEP

SEQ ID NO: 12393 - protein, 1203 aa, Hydraecia micacea
MLTRSRARRLPTTHPTSSGSSLSSASQLPEPAPDVSPVSPAAAVASSSSDEYFSPPTTPPPVCRRGRGRPPASLGLRGPPASERVPAPGGSVQRMRWTQTVNENVMRAYFGATEGGSNLTAYRGRMLSLFQVLEPAVNVSAQRLSDQVRVIQRNHMLDNVVLDRLRLESRNSHVTPASSLVAVQLQPSVPLRPDCVDVEDDDEAISVSSQCNARLRSALEDAFREYRSIPPGLRPRLPRLPMHKKNKALVCALDSQLSNCFNDSKDLADTHSILYCAAVAACRVAHVKFPNSDRAPRPKPAVPAWQCRIECRIGEARALIGKLICFREGNTRPRVMRFVRRAFSGTNISSRDYLSRVTERIDFLKQKICAWANRIRRYRRRVERYTQNRRFQSDERWVYRAWERPDQGVTDTRLPDDDAMCSFWRNIWSVPVSHTEGDWTGKIERACDLIPEMEALIISPQDVARAVRPLPNWKSPGPDGLHNFWIKWFKRSHDRLASQFQSALESGSLPQFLTTGITHLLYKSGSTADPKNYRPITCLPTVYKVLTSILRTKINKHIDTNSIMSVSQNGCKNGSRGTKELLLIDMTINQQVRRSRKDLSTCWIDYKKAYDSVPHTWLMRVLELYKVDTTLCTFLMSCMGQWRTVLRYPGCRNIQRNSEPIRIERGIFQGDSLSPLWFCLALNPLSTLLEDSGLGYRLRRGGQVISHLLYMDDLKLFAPNNLQLMELLKITETFSSAIRMEFGVDKCAVMHVKRGKIVESVGNQLSDSTNLRALSASDTYKYLGMSEALGINVTDMKQSLKERFFGRLKKVFNSLLSGGNKVRAFNDWVMPVLMYSFGILKWTQTELDALDRKVRTLLTANRMHHPRSSVMRLYIPRKCGGRGFLNAKTLHNREICSLREYFLETDVGMHRDVVMVDNGLTPLSLGKENWRKPVVLDTNDRMEVWQSKELHGRFFRALHGPDVDLLASVAWLRFGDLFGETEGFVCAIMDEVMMTNNYRRFIVKDGTVDICRACHRPGESIRHIISGCSRLANGEYLHRHNLVARIIHQQLALKYSLVESEVPYYRYVPDPVLENGNITLYWDRSIITDMTIVANKPDIVVMDRLERRAMIVDITIPHDENLVKAEKDKQIKYLDLAREVVDMWDVDSAIIVPIVVTANGLIAKSLDQHLRRLSLASWIKGLIQKAVLLDTARIVRRFLSLEP

SEQ ID NO: 12394 - protein, 1201 aa, Amphipyra tragopoginis
MLTRARTREARPPPPDSPLSSASQPPESSPTVSAVTPAAAVASSSSDEYFSPPTSPTPVRRQGRRRPPNSLGPRGPPAPSRVLATGGCVQRMKWTQSINENVMRAYYGSTEGGTNLTAYRVRMLTLFQELEPAINVTAQRLSDQVRVIQRNHRLDDAALDRLRLEVQNSRVTPVPSQTAVHHININVVPPRSDCVDGDVDDRAVTVSSQYNDRLRSALEDAIREYRANPELRPRLPRLPMHNKNRALVCALDSLLSSYFESSEDLVDTHSILYCAAVAACRVANVKFNNSERATRPKPAIPAWQCRIERRIDGARALIGKLICFREGNTRPRVMRFVRRAFSGTGISPREYMSQVTERIDFLKQKVCAWASRIRRYKRRVERYAQNRMFQCDQRWVYRAWERPDQGVSDGRLPDDDAMSSFWRSIWSVPVTHTEGDWTRDIERACEPIEEMGEILISPQDVASAARPLPNWKSPGPDGLHNFWIKWLRSSHARLASQFQSSLESGSLPQFLTTGVTHLLHKSGSTAEPKNYRPITCLPTVYKLLTSILRTKINTHVENNSIMSPSQNGCRNGSRGTKELLLIDMAISQQVRRSRKNLSTCWIDYKKAYDSVPHTWLMRVLELYKINATLRTFLTSCMRQWRTVLRYPGCRPILGSGEPISIERGIFQGDSLSPLWFCLALNPLSTLLEGSGLGYPLRRGGQVVSHLLYMDDLKLFAPTKLQLVELLKVTETFSNSIRMEFGVDKCAVMHVRRGGIMESEGLQLSDSIHLRSLSANDTYKYLGMSEGLGISEADMKQSLRERFFGRLKKVLKSLLSGGNKVRAFNGWVMPVLMYSFGILKWTQTELDALDRRVRTLLTANRMHHPRSSVMRLYIPRKCGGRGLLNAKTLHNREVCSLREYFLHADAGMHRDVVAVDKGLTPLNLAKENWRKPVVLSTNDRREVWQSKELHGRFYRALHGPDVDFLASVSWLRFGDLFGETEGFVCAIMDEVIMTNNYRKYIVKDGTVDICRACHCPGESLRHIISGCSRLANGEYLHRHNQVARIIHQQLALRYNLVESEVPYYKYVPDPVLENGHITLYWDRSIITDRTIVANKPDIVVIDRSERRTMIVDVTIPHDENLVKAEKDKQIKYLDLAHEVVNMWDVDSATIVPIVVTANGLMAKSLDQHLKRLSLGGWIKGLIQKAVLLDTARIVRRFLSLEP

SEQ ID NO: 12395 - protein, 1111 aa, Amphipyra tragopoginis
MRWTQSMNENCMRAYFGATEGGTNLTAYRGRMLSLFQALEPAVNVSAQRLSDQVRVIQRDHRLDSAALDRLRSEMQSSHVVPLQSQTAVQSQVPSVVAPRPIPADEESDDRVINVSTQSNEQLRSALELAFREYRSTLLDLRPRLPRLPMNDKNKALMCALDSLLSSYFDGSEDLADTHSILYCAAVAACRVAHVKVDNNDRATRPKPAIPAWQCRIERRIGEARALIGKRICFREGNTRPRVMRFVRRAFSGTDTSPRDYMARVAERIDFLKQKVYAWANRIRRYRRRVERYTQNRMFQRDQKWVYRAWERPDQGVRDVHLPDDDAMNSFWRSIWSVPVSHTEGDWTRDVERVCEPILDMGAISISPQDVASAVRPLPNWKSPGPDGLHNFWLKWLRSSHARLASQFQSSLETGTLPQFLTTGVTHLLHKSGSTAEPKNYRPITYLPTVYKLLTSILRCKISSHIENNSIMSASQNGCRNGSRGTKELLLIDMAISQQVRRSRKDLSTCWIDYKKAYDSVPHTWLLRVLELYKVNTTLCAFLTSCMGQWRTVLHYPGCRQIQGIGEPIRIERGIFQGDSLSPLWFCLALNPLSTLLEGSGLGYRLRRGGQVISHLLYMDDLKLFAPNNLQLLDLLKVTETFSNSIRMEFGVDKCAVMHVKRGRIMESVGTQLSDPIQLRSLSSTETYKYLGMSEALGINEADMKQSLRERFYGRLKKVLKSLLSGGNKVRAFNGWVMPVLMYSFGILKWTQTELDALDRRVRTLLTAYRMHHPRSSVMGLYIPRKCGGRGFLNAKTLHNREVCSLREYFSQADVGMHRDVVAVDKGLTPLSLAKENWRKPAVLDTNGRKDVWRSKELHGRFYRALHGPDVDFLASMAWLRFGDLFGETEGFVCAIMDEVMMTNNYRKYVVKDGTVDICRACHCTGESIRHIVSGCSRLANGEYLHRHNLVARIIHQQLALKYNLVDAEVPYYRYVPDPVLENGHVTLYWDRSIITDRTIVANKPDIVVIDRSERRAMIVDITVPHDENLVKAENDKKIKYLDLAHEVVDMWNVDSAVIVPIVVTANGLIAKSLNQHLMRLSLGSWIKGLIQKAVLLDTARIVRKFLSLEP

SEQ ID NO: 12396 - protein, 1204 aa, Amphipyra tragopoginis
MITRSRAKTQSTQPPPSASSLSSASQPPEPASTVSDVTPAAAVASSSSDEYYSPPTSPPPARRRGRGRPPACLGPRGPPASDRVPASGGSVQRMRWTQSMNENCMRAYFGATEGGTNLTAYRGRMLSLFQALEPAVNVSAQRLSDQVRVIQRDHRLDGAALDRLRSEMQSSHVVPLQSQTAVQSQGPSVVAPRSIPADEESDDRVTNVSTQSNEQLRSALELAFREYRSTLPDLRPRLPRLPMNNKNKALMCALDSLLSSYFDGSEDLADTHSILYCAAVAACRVAHVKVDNNDRATRPKPAVPAWQCRIERRIGEARALIGKLICFREGNTRPRVMRFVRRAFSGTDTSPRDYMSRVAERIDFLKQKVYAWANRIRRYKRRVERYTQNRMFQRDQRWVYRAWERPDQGVRDVHLPDDDAMNSFWRSIWSVPVSHAEGDWMRDVERVCEPILDMGAISISPQDVASAVRPLPNWKSPGPDGLHNFWLKWLRSSHARLASQFQSSLETGTLPQFLTTGVTHLLHKSGSTAEPKNYRPITCLPTVYKLLTSILRCKISSHIENNSIMSASQNGCRNGSRGTKELLLIDMAISQQVRRSRKDLSTCWIDYKKAYDSVPHAWLLRVLELYKVNATLCAFLTSCMGQWRTVLRYPGCRQIQGRGEPIRIERGIFQGDSLSPLWFCLALNPLSTLLEGSGLGYRLRRGGQVISHLLYMDDLKLFAPNNLQLMELLKVTETFSNSIRMEFGVDKCAVMHVKRGGIMESVGTELSDSIHLRSLSSTETYKYLGMSEALGINEADMKQSLRERFYGRLKKVLKSLLSGGNKVRAFNGWVMPALMYSFGILKWTQTELDALDRRVRTLLTAYRMHHPRSSVMRLYISRKCGGRGFLNAKTLHNREVCSLREYFSQADVGMHRDVVAVDKGLTPLSLAKENWRMPVVLDTNGRKDVWRSKELHGRFYRALHGPDVDFQASVAWLRFGDLFGETEGFACAIMDEVMMTNNYRKYVVKDGTVDICRACHCPGESIRHIVSGCSRLANGEYLHRHNLVARIIHQQLALKYNLVDAEVPYYKYVPDPVLENGHVTLYWDRSIITDRTIVANKPDIVVIDRSERRAMIVDITVPHDENLVKAENDKKIKYLDLAHEVVDMWNVDSAVIVPIVVSANGLIAKSLNQHLMRLSLGSWIKGLIQRAVLLDTARIVRKFLSLEP

SEQ ID NO: 12397 - protein, 1206 aa, Amphipyra tragopoginis
MLTRSRAKAQNTRPPSSASSLSSASQPPEPASIVSDVTPAAAVASSSSDEYFSPATSPSPPPARRRGRGRPPTCLGPRGPPASDRVPAPGGSVQRMRWTQSMNENCMRAYFGATEGGTNLTAYRGRMLSLFRALEPAVNVSAQRLSDQVRVIQRDHRLDDAALDRLRAEMQNSHAAPLPSQIRTQTLVPPAVPLESNYADEEEEDRAISAGTQYSEIMRRALEDALREFRSTPPELRPRLPRLPMHNKNRALVCALDSLLSNVFESSEDLGDTHSILFCAAVAACRVAHVKFPNDNRATRPKSAVPAWQCRIERRIDEARVLIGKLTCFRDGNRRPRVMRFVRRAFSGTDIGPGEYASRVTERIDFLKQKVYAWANRIRRYRRRVDRYTQNRIFQSDQRWVYRTWERPDQGVSDTHLPDNDVMNAFWRNIWSVPVTHTEGDWMQEVQRACEPIQEMGAVTIGPQDVTSAVRPMPNWKSPGPDGLHNFWIKWLRSSHARLASQFQSSLESGSLPAFLTTGITHLLFKSGSTAEPKNYRPITCLPTVYKLLTSILRAKLSHHIDSNAIMCATQNGCKNGSRGTKELLLIDMAISQQVRRSRKDLSTCWIDYKKAYDSVPHAWLMRVLELYKINATLRAFLMSCMGQWRTVLHYPGCRQIQGNGELIRIERGIFQGDSLSPLWFCLALNPLSTLLEGSGLGYRLRRGGQVISHLLYMDDLKLFAPNNLQLVELLKVTETFSNSIRMEFGVDKCAVMHVKRGRIMESVGTQLSDSIHLRSLSSTETYKYLGMSEALGINEADMKQSLRERFFGRLIKVLKSLLSGGNKVRAFNGWVMPVLMYSFGILRWTQTELDALDRRVRTLLTAYRMHHPRSSVMRLYIPRKCGGRGFLNAKTLHNREVCSLREYFSQADVGMHRDVVAVDKGLTPLSLAKENWRKPVVLDAKGRMEVWRSKELHGRFYRALHGPDVDFLASVAWLRFGDLFGETEGFVCAIMDEVMMTNNYRKYVVKDGTVDICRACHCPGESIRHIVSGCSRLANGEYLHRHNLVARIIHQQLALKYNLVDTEVPYYKYVPDPVLENGHVTLYWDRSIITDRTIVANKPDIVVIDRLERRTMIVDITVPHDENLVKAENDKKIKYLDLAHEVVDMWDVDSAVIVPIVVTANGLIAKSLDQHLTRLSLGSWIKGLIQKAVLLDTARIVRKFLSLGP

SEQ ID NO: 12398 - protein, 1207 aa, Noctua pronuba
MSPMLTRRRAKLLETHPPSPGSSLSSASQPPGRATSVSAASPVAAVASSSSDEFFSPPSTPPSPRRRGRRPPAGLGPRGQQAPNRVPAAGGNVSRIRWTQSMNENVMRAYYGATEGGINLTAYRCRMLSLFQALEPAVNVSAQRLSDQVRVIQNNHRLDDATLDRLRSELRISPASNPLPCQNVTHVPATLPLQANQHAEEEDDRAVSAENLCNVELRSALEGAIREYRFMSPDLRPRLPRLPMNKKNRALVCALDALLPNFIESSANLCDTHSILYCTAVAACRVANVKFPNTDSATRPKSAVPVWQCRIERRINEARALIGKLICFREGNTRPRVMRFVRRAFSGTDISPREYMSRVTERIDFLKQKIYAWANCIRRYRRRVDRYTQNRMFQSDERWVYRTWERPVTIQGVTDAHLPENDAMSAFWRSIWSVPVSHTEGDWMRVVEKACDSIPEMEAISISPLDVARAVRPLPNWKSPGPDGLHNFWIKWLQRSHACLASQLQSSLETGSLPSFFTTGVTHLLHKSGSTAEPKNYRPITCLPTVYKVLTSILRAKIVRHIDSNSIMSVSQNGCRNGSRGTKELLLIDMAISQQVRRSRRDLSTCWIDYKKAYDSVPHTWLRRVLELYKIDATLRTFLVSCMGQWSTVLLYPGCRQVLGNDEPIRIERGIFQGDSLSPLWFCLALNPLSTLLEDSGLGYRLRRGGQVISHLLYMDDLKIFAPSNLQLMELLKVTETFSSAIRMEFGVDKCAVMHVKRGEIMESVGTQLSDSICLRSLSSTETYKYLGMSEALGINAADMKQSLKERFFGRLSKVLKSLLSGGNKVRAFNGWVMPVLMYSYGILKWTQTELDALDRKVRTLLTANRMHHPRSSVMRLYIPRKCGGRGFLNAKTLHNREVCSLREYFLETDVGMHRDVVSVDKGLTPLSLANENWRKPVVLDTNDRKEVWQSKELHGRFFRALHGPDVDLLASVSWLRFGDLFGETEGFVCAIMDEVIMTNNYRKYIVKDGTVDICRACHRPGESIRHIVSGCSRLTNGEYLHRHNLVARIIHQQLALQYNLVGTEVPYYKYVPDPVLENGHATLYWDRSIITDRTILANKPDIVVIDRRERRAMIVDITVPHDENLVKAENDKKIKYLDLAHEVVDMWDVDSAIIVPIVVTVNGLIAKSLDQHLRRLSLRGWVKGLIQKAVLLDTARIVRRFLSLEP

SEQ ID NO: 12399 - protein, 1197 aa, Noctua pronuba
MLTRAAARRARLSPPDPSLSSASPLPESSPIVSAVTPAVAVASSSSDEYFSPPTTPPPVRRRRGRRPPDGLGPRGPPASDRVPALGGSVQRMRWTQSINENVMRSYYGATEGGNNRTAYRVRMLSLFQVLEPAVNVSAQRLSDQVRVIQRNRMLDDTVLDRLRTEMQSSHVITPSAQAVVLPQSNTIPNPANDESNDMVTNVSTQCNEEIRSALEGAIREYRSMQPDLRPRIPRLPMHNKNRALVAVLDSQLSNYFDNCEDLTDAHSILYCAAVAACRVAHVKFSDDRATRPKPAVPAWQYRIERRIGGARALIGKLICFREGNTRPRVMRFVRRAFSGTDISPRDYMSRVTERIDFLKQKVYAWANRIRRYKRRVDRYTQNRTFQRDERWVYRAWERPDQGVADTHLPDDDAMCSFWRSIWSVPVSHTEDEWTREVERACDPVQEMGAITISPQDVVCAVRPLPNWKSPGPDGLHNFWIKWFTRSHARLATLFQSALESGSLPEFLTTGITHLLHKSGSTAEPKNYRPITCLPTVYKVLTSILRTKISKHINDNSIMSPSQNGCRNGSRGTKELLLIDMAISQQVRRFRRDLSTCWIDYKKAYDSVPHTWLMRVLELYKVDTTLRTFLMSCMGQWRTVLRYPGCRQIQRDSEPIRIERGIFQGDSLSPLWFCLALNPLSTLLEDSGLGYRLRRDGQVISHLLYMDDLKLFAPNDLQLMELLKVTETFSSAIRMEFGVDKCAVMHVKRGEIVESVRTQLSDSINLRSLSATETYKYLGMSEALGINVADMKQSLKERFFGRLKKVFNSLLSGGNKVRAFNGWVMPVLMYSFGILKWTQTELDALDRRVRTLLTAYRMHHPRSSVMRLYIPRRCGGRGFLNAKTLHNREICSLREYFLETDVGMHRDVVAVDKGLTPLSLAKENWRKPVVLDTNDRREVWQSKELHGRFFRALHGPDVDLSASVAWLRSGDLFGETEGFVCAIMDEVMMTNNYRRFIVKDGTVDICRACHRPGESIRHIISGCSRLANGEYLHRHNLVARIIHQQLALKYNLVESEVPYYKYVPDPVLENGCVTLYWDRTIITDRTIVANKPDIVVVDRSERRAMIVDITVPHDENLVKAEKDKQIKYLDLAHEVVDLWDVDSAIIVPIVVSAHGLIAKSFDQHLRRLSLGSWIKGLIQKAVLLDTARIVRRFLSLEP

SEQ ID NO: 12400 - protein, 1197 aa, Noctua pronuba
MLTRAAARRARLSPPDPSLSSASPLPESSPIVSAVTPAVAVASSSSDEYFSPPTTPPPVRRRRGRRPPDGLGPRGPPASDRVPALGGSVQRMRWTQSINENVMRSYYGATEGGNNRTAYRVRMLSLFQVLEPAVNVSAQRLSDQVRVIQRNRMLDDTVLDRLRTEMQSSHVITPSAQAVVLPQSNTIPNRANDESNDMVTNVSTQCNEEIRSALEGAIREYWSMQPDLRPRIPRLPMHNKNRALVAVLDSQLSNYFDNCEDLTDVHSILYCAAVAACRVAHVKFSDDRATRPKPAVPAWQYRIERRIGGARALIGKLICFREGNTRPRVMRFVRRAFSGTDISPRDYMSRVTERIDFLKQKVYAWANRIRRYKRRVDRYTQNRTFQRDERWVYRAWERPDQGVADTRLPDDDAMCSFWRSIWSVPVSHTEDEWTREVERACDPVQEMGAITISPQDVVCAVRPLPNWKSPGPDGLHNFWIKWFTRSHARLATLFQSALESGSLPEFLTTGITHLLHKSGSTAEPKNYRPITCLPTVYKVLTSILRTKISKHINDNSIMSPSQNGCRNGSRGTKELLLIDMAISQQVRRFRRDLSTCWIDYKKAYDSVPHTWLMRVLELYKVDTTLRTFLMSCMGQWRTVLRYPGCRQIQRDSEPIRIERGIFQGDSLSPLWFCLALNPLSTLLEDSGLGYRLRRGGQVISHLLYMDDLKLFAPNDLQLMELLKVTETFSSAIRMEFGVDKCAVMHVKRGEIVESVRTQLSDSINLRSLSATETYKYLGMSEALGINVADMKQSLKERFFGRLKKVFNSLLSGGNKVRAFNGWVMPVLMYSFGILKWTQTELDALDRRVRTLLTAYRMHHPRSSVMRLYIPRRCGGRGFLNAKTLHNREICSLREYFLEADVGMHRDVVAVDKGLTPLSLAKENWRKPVVLDTNDRREVWQSKELHGRFFRALHGPDVDLSASVAWLRSGDLFGETEGFVCAIMDEVMMTNNYRRFIVKDGTVDICRACHRPGESIRHIISGCSRLANGEYLHRHNLVARIIHQQLALKYNLVESEVPYYKYVPDPVLENGCVTLYWDRSIITDRTIVANKPDIVVVDRSERRAMIVDITVPHDENLVKAEKDKQIKYLDLAHEVVDLWDVDSAIIVPIVVSAHGLIAKSFDQHLRRLSLGSWIKGLIQKAVLLDTARIVRRFLSLEP

SEQ ID NO: 12401 - protein, 1204 aa, Noctua pronuba
MLTRLRAKQLAHPPSPGSSLSSASQPPGRATSVSTLSPVAAVASSSSDEFFSPPSTPPPPQRRRGRGRPPAGLGPRGQQAPNRVPAAGGNVSRMRWTQSINEQVMRAYYGATEGGSNLTAYRGRMLSLFQVLEPTVSVSAQRLSDQVRVIQRNHMLDDTVLDRLRSESRSNPVTPASPMIAGLLQSATSTSPRSDHGGEEDDSEVISVSTQCNAQLRSALEGAFREYRSTPPELRPRLPRLPMHKKNKALMCALDSQLSNYFDSSKDLTDTHSILYCGAVAACRVAHVKFPNNDRATRPKLAVPAWQCRIERRIGEARALIGKLICFREGNTRPRVMRFVRRAFSGIDITFRDYLARVTERIDFLKQKICAWASRIRRYKRRVERYTQNRIFQSDERWVYRAWERPDQGVTDTRLPGDDAMCLFWRSIWSVPVSHTEGDWTREVEQACDSIQEMGAIIISPQDVACAVRPLPNWKSPGPDGLHNFWIKWFQRSHACLASQFQLALESGSLPQFLTTGITHLLHKSGSTAEPKNYRPITCLPTVYKVLTSILRAKINQHIESNSIMSTSQNGCRNGSRGTKELLLIDMAIIQQVRRSRKDLSTCWIDYKKAYDSVPHTWLMRVLELYKVDATLRTFLMSCMRHWRTVLRYPGCRQIQRNSEPIRIERGIFQGDSLSPLWFCLALNPLSTLLEGSGLGYRLRRGGQVISHLLYMDDLKLFAPNNLQLMKLLKVTETFSSAIRMEFGVDKCAVMHVKRGEIMESVGTQLSDSIHLRSLTSTETYKYLGMSEALGINTADMKQSLRERFFGRLNKVLGSLLSGGNKVRAFNGWVMPVLMYSFGILKWTQTELDALDRRVRTLLTANRMHHPRSSVMRLYIPRKCGGRGFLNAKTLHNREVCSLREYFLEADVGMHRDVVSVDKGLTPLSLANENWRKPKVLVTNDRKEVWQSKELHGRFYRALHGPDVDFLASVSWLRFGDLFGETEGFVCAIMDEVMMTNNYRKYIVKDGTVDICRACHRPGESIRHIISGCSRLANGEYLHRHNLVARIIHQQLALKYNLVESEVPYYKYAPDPVLDNGNITLYWDRSIITDRTIVANKPDIVVIDRLERRAMIVDITVPHDENLVKAEKDKQFKYLDLAREVVDMWDVSTAVIVPIVVSANGLIAKSLDQHLRRLALGSWIKGLIQKAVLLDTARIVRRFLSQEP

SEQ ID NO: 12402 - protein, 1200 aa, Tinea trinotella
MLTRSRARNQSAQLTSSGSSLSSASQPPRSTPTVSPVISVAAVASSSSDECFSPPTTPPSARRRGGGRPPASLEPRGPSASGGVPATSGRVQRMRWTQSINENVMRSYFGATEGGISLTAYRGRMLTLFQVLEPAVNVSAQRLSDQVRVIQRNRMLDDVVLDRLRLESRSSHVSPVSPPVAVQLQPSALPRPNNIEENDDDVTISVSNQYNEQLRSALEDAFREYRSTPPGLRPRIPRLPMHKKNRALVCALDSQLVNHFKSSKDLADTHSILYCAAVAVCRVAHVKFPNNDRAARLAVPAWQCRIERRIGEARALIGKLISFREGNTRPRVMRFVRRAFSGTDISSRDYQTRVTERIDFLKQKIYAWANRIRRYKRRVERYTQNRTFQSNERWVYRTWERPDQDVSDMCLPDDDAMSLFWRNIWSVPVGHTEGEWTREVERACDLIPEMGAIIISPQDVACAVRPLSNWKSSGLDGLHNFWIKYFQRSHARLAAQFQSALELGSLPQFLTTGITHLLHKSGSTAEPKNYRPITCLPTVYKVLTSILRAKIDKHIDTNCIMSASQNGCRSGSRGTKELLLIDVAISQQVRRSRRDLSTCWIDYKKAYDSVPHTWLMRVLELYKVDAALRTFLVSCMGRWRTVLHYPGCRRILGNGEPIKIERGIFQGDSLSPLWFCLALNPLSTLLDGSGQGYRLRRDGQVISHLLYMDDLKLFAPNNLQLMKLLKVTETFSSAISMEFGVDKCAIMHVKRGEIMESVGTQLSDSIHLRSLCSTETYKYLGMSEALGINAVDVKQSLRDRFFGRLNKVLNSLLSGGNKVRAFNGWVMPVLMYSFGILKWTQTELDALDRRVRTLLTANRMHHPRSSVMRLYIPRKCGGRGFLNAKTLHNREVCSLREYFLKTDVGMHRDVVDVDKGLTSLSLANENWRKPVVLDANDRREVWQSKELHGRFYRALHGPDVDFLASVSWLRFGDLFGETEGFVCAIMDEVMMTNNYRKYIVKDGTVDICRACHRPGESIRHIISGCSRLANGDYLHRHNLVARIIHQQLALKYNLVESEVPYYRYVPDPVLENGNITLYWDRSIITDRTIVANKPDIVVIDRLERRTIIVDVAVPHDENLVKAEKDKQIKYLDLAREVVDMWEVDTAIIVPIVVTANGLIAKSLDEHLKRLSLGSWIKRLIQKAVLLDTARIVRRFLSQEP

SEQ ID NO: 12403 - protein, 1199 aa, Spilosoma lubricipeda
MLTRARSRAQLLTPDSSLRSALPSSDARTEVPTVAEASSSSSSDEFFSPPTSPTPVRRQERYRPPDSLGPRGPLTSNRAPAAGGNVRRMKWTHSINENVMRAYFRATELGTNLTAYRVRLVSLFQELEPAVNVSAQRLSDQVRAIQRCHLLDDAVLERIRSDIRNSLAVPSSSHVVDTIVNTTSQLPRSEYIDELVDSEIISVSTQCNDTIRSTLEDAIREYRYVDSNNRPRLSRLPIHKRNLALVSALDSLLPDYFNNSEDLSDTHSILYCAAIAVCRVAGVNFVECKTATRPKNTVPAWQCRIERRIAGTRTLIGKLISFRSGNTRPKVMRFVKQAFLGTTVSPQQYMSCVTERIDFLKQKVYAWANRIRRYRKRTDRYNQNRTFQRNEKWVYQKWEKLSPCMSDEHLPDKNATNYFWRNIWSTPVTHTEGHWCRDVERSCESITPMEPVRIDKEDVSCAVRSLANWKAPGPDGLHNFWLKWFRSSHAYLASQFQTALDSGSLPQFLTTGITHLLHKSGSTMDPKNFRPITCLPTLYKLLTSILRLKITTHVNNNSIISVSQNGCRSGTRGTKELLIIDMTISQQVRRNRKSLATCWIDYKKAYDSVPHTWLLRVLELYKIDTTLCTFLKSCMGQWRTVLRYPGCRQSTMNDVLIKIERGIFQGDSLSPLWFCLALNPLSTLLEGSGIGYRLQKDDRVISHLLYMDDLKLLAPTKLQLTALLKVTENFSNSIKMEFGVDKCAVMYVKKGLIVESEGVELSDSTKLRSLSATETYKYLGFSQSLGIPESDVKQMLRERFFGRLKKVLKSLLSGGNKVRAYNSWVMPVLMYSFGILRWTQTELDAFDRRVRTLLTAFRMHHPRSSVMRLYIPRKFGDRGLLNIKTLHNREIYNLREYFLHTDVEMHRNVVAVDTGLTPLALAKENWRKPVVLSTNDRREVWKGKELHGRFYRALNGPDIDFKASTSWLRYGDLFGETEGFVCAIMDEVIMTNNYRKYILKDGTVDICRACHRPGESIRHIISGCSRLANGEYLHRHNQVARIVHQQLALKYHLVNSEVPYYRYVPDPVLENGRATLYWDRSIITDRTIVANKPDIVVIDRLERRAMIVDIAVPHDENLVKAEKEKQIKYLDLSHEIVDMWNVDSAIIVPIVVSAHGLIARSLDQHLKRLTLDGWIKGLMQKAVLLDTARIVRRFLSLEP

SEQ ID NO: 12404 - protein, 1198 aa, Spilosoma lubricipeda
MLTRARSRALLPSSDSSLRSALPSSDARTEVPTVAEASSSSSSDEFFSPPTSPTPVRRQGRDRPPTSLGPRGPLTSNRAPAAGGDVRRMKWTQSINENVMRAYFRATELGTNLTAYRVRLVSLFQELEPAVNVSAQRLSDQVRAIQRCHLLDDVVLERIRSDVRGTLTVPSSSHSVDLVATTSQLPHNEYVDEQVESEVMTVSTQCNDRIRRALEDAIQEYRHVDYKNRPRLPRLPIHKRNLALVSALNSLLPDYFGNSEDLSDTHSILYCAAIAVCRVAGVKFVEQITTTRPKNEVPAWQCRIERRIAETRTLIGKLITFQSGNTRPRVMRFVKQAFLGTTISPQQYMSSVTERIDFLKQKVYAWANRIRRYRKRVDRFIQNRMFQRNEKWVYRKWEEPSPRVGEGRFPDENVTNTFWRNIWSVPVTHTEGDRYRDVERSCESITSMEPITISKDDIGCAVRSLPNWKSPGPDGLHNFWLKWFRSSHACLASQYQAAVDSGSLPQFLTTGITHLLYKSGSAMDPKNFRPITCLPTMYKLLTSILRLKISTHINNNLIMSVSQNGCRSGSRGTKELLIIDMTISQQVRRNRKSLATCWIDYKKAYDSVPHTWLLRVLELYKVDTTLCTFLKSCMGQWRTVLRYPGCRQTAVNDVLINIERGIFQGDSLSPLWFCLALNPLSALLEDSGLGYRLQKDDQVISHLFYMDDLKLLAPTKLQLTALLKVTENFSNSIKMEFGVDKCAVMYVKKGVIVESEGTELSDSTRLRSLSATETYKYLGFSQSLGIPEPDMKQSLRERFFGRLKKVLKSLLSGGNKVRAYNGWVMPVLMYSFGILRWTQTELDALDRRVRTLLTAFRMHHPRSSVMRLYIPRKFGGRGLLNAKTLHNREIYNLREYFLHTDVGVHRSVVTVDTGLTPLALAKENWRKPVVLSTNDRREVWKGKELHGRFYRALNGPDIDFKASTSWLRYGDLFGESEGFVCAIMDEVIMTNNYRKYILKDGTVDICRACHRPGESIRHIISGCSRLANGEYLHRHNQVARIVHQQLALKYHLVSSEVPYYRYVPDPVLENGRATLYWDRSIITDRTIVANKPDIVVIDRLERRAMIVDIAVPHDENLVKVEKEKQIKYLDLSHEIVDMWNVDSAIIVPIVVSAHGLIAKSLDQHLKRLTLEGWIKGLMQKAVLLDTARIVRRFLSLEP

SEQ ID NO: 12405 - protein, 1198 aa, Spilosoma lubricipeda
MLTRAKLRAQLSPPDSSLCSALPPREATVEVSAVAEASSSSSSDEFFSPPTSPTPVRRQGRGRPPISLGSRGPLTSNRVPATGGDVRRMKWTRSINENVMRAYFRATELGTNLTAYRVRLVSLFQELEPAVNVSAQRLSDQVRAIQRCHLLDDVVLERIRSDVRNTLTVPSSSHAVDVVGNTQQLPYNEDVDEQVESEIISVSTQYNDRIRSALEDAIQDYRYVNYNNRPRLPRLPIHKRNLALVSALNSLLPDYFGNSEDLSDTHSILYCAAIAVCRVAGIKFNVEQITTRPKNTVPAWQYRIERRIAETRTLIGKLIAFKFGNTRPRVMRFVKQAFLGTTISPQQYMSSVTERIDFLKQKVYAWANRIRRYKKRGDRFNQNRMFQRNEKWVYRKWEAPNPCESDGDLPDENTTNSFWRNIWSVPVTHTDGDWMRDVSRSCESITSMEPVIINEDDISCAVRSLPNWKSPGPDGLHNFWLKWFRSSHACLASQLQAALDSGSLPQFLTTGITHLLYKSGGAMDPKNFRPITCLPTLYKLLTSILRLKITKHINNNSIISVSQNGCRSGTRGTKELLITDMTISQQVRRNRKSLATCWIDYKKAFDSVPHTWLLKVLELYKIDTTLCTFLKSCMRQWRTVLRYPGCHQTAVNDVPIKIERGIFQGDSLSPLWFCLALNPLSTLLGGSGLGYRLQKEAPVISHLFYMDDLKLFAPTKLQLTALLRVTENFSNSIKMEFGIDKCAVMHVKKGVIVESEGIELSDSTRLRSLSATETYKYLGFSQSLGIPESDMKQSLRERFFGRLKKVLKSLLSGGNKVRAYNGWVMPVLMYSFGILRWTQTELDALDRRVRTLLTAFRMHHPRSSVMRLYIPRKFGGRGLLNVKTLHNREIYNLREYFLHTDVGVHRSVVAVDTGLTPLALAKENWRKPVVLGTNERREVWKGKELHGRFYRALNGSDIDFKASTSWLRYGDLFGETEGFVCAIMDEVIMTNNYRKYILKDGTVDICRACHRPGESIRHIISGCSRLANGEYLHRHNQVARIVHQQLALKYKLVSSEVPYYRYVPDPVLENGRATLYWDRSVITDRTIVANKPDIVVIDRSERRAMIVDIAVPHDENLVKVEKEKQIKYLDLSHEIVEMWDVDSVIIVPIVVSVHGLIAKSLDQHLKRLTLDGWIKGLMQKAVLLDTARIVRRFLSLEP

SEQ ID NO: 12406 - protein, 868 aa, Autographa pulchrina
MRFVRRAFTGTNISPSEYTARVTERIDFFKQKVCAWASRIRRYKCRVDRFHQNRMFQRDQRWVFRTWERPVLGMDDRRLPDEDATNSFWRNIWSVPVSHSEGDWMRDVEESCEPIQEMGAITISPQDVANAIRPMSNWKAPGPDGLQNFWLKWFRSSHGCLASQFQYAIESDALPQFFTTGSTHLLHKTGSTTDPKNYRPITCLPTIYKLLTSILRVKINEHIDSHSIMSASQNGCRNGSRGTKELLLIDMTICQQVRRSKKNLSTCWIDYKKAYDSVPHSWLMRVLELYKINTTLRAFLSSCMRRWTTVLRYPGCRDIQQSGEPIRIERGIFQGDSLSPLWFCLALNPLSTLLENSRLGYSLRRGSQVISHLLYMDDLKLFASNELQLMGLLKITESFSNSIRMEFGVDKCAVMHVKQGGIVESQGIQLSDSINLRSLSAADTYKYLGMSEALGINVADMKQSLLTRFFGRLNKVLKSLLSGGNRVRAFNGWVMPVLMYSFGILKWTQTELDALDRRVRTLLTANRMHHPRSSVMRLYIPRKCGGRGFLNAKTLHNREVCNLREYFLQVDVGMHRDVVAVDRGFTPLSLGKENWHKPVVLSVKDRRDVWQSKELHGRFYRSLHGPDVDFLASVAWLRFGDLFGETEGFVCAIMDEVIMTNNYRKYIIKDGTVDICRACHCPGESIRHIISGCSRLANGEYLHRHNQVARIIHQQLALRYKLVEAEVPYYRYVPDPVLDNGHVTLYWDRSIITDRTIVANKPDIVVIDRSERRAMIVDVTIPHDENLVKAEKEKQMKYLDLAHEVVDMWEVDSAIIVPIVITANGIIAKSLDQHLKRLSLDIWVKGLIQKAVLLDTARIVRRFLSLEP

SEQ ID NO: 12407 - protein, 1200 aa, Ochropleura plecta
MKMITRSAARRDARLPPPGPSLSSASPLPEPSLVVSAVTSAVAVASSSSDEYFSPPTTPPPARRRGGRRPPDGLGLRGPPASDRVPAPGGSVQRMRWTSSINENVMRSYYGATEGGNNLTAYRVRMLSLFQVLEPAVNVSAQRLSDQVRVIQRNRMLDDTVLDRLRTEMQSSQVITSSSQAVVPPRSHQLVSRADEVSNDMATNVSTQCSEEMRSALEGAIREYRYMSPELRPRLPRLPMHNKNRALVAVLDSQLSNYFDNCENLTDAHSILYCAAVAACRVAHVKFPDDGATRPKPAVPFWQCRIERRIGVARALIGKLICFKEGNTRPRVMRFVRRAFAGTDISPPDYMSRITERIDFLKQKVYAWANRIRRYKRRVERYTLNRTFQSDERWVYRAWERPDQGVSDTHLPDDDAMCLFWRSIWSVPVSHTEGEWTREVERACDPIPEMGALTISPQDVACAIRPLPNWKSPGPDGLHNFWIKSIQRSHTCLATLFQTALESGSLPKFLTTGITHLLHKSGSTAEPKNYRPITCLPTLYKVLTSILRAKITKHIDDNSIMSASQNGCRNGSRGTKELLLIDMAISQQVRRSRRHLSTCWIDYKKAYDSVPHTWLMRVLEMYKVDATLRTFLISCMRQWSTVLRYPGCRQIQRNSEPIRIERGIFQGDSLSPLWFCLALNPLSTLLENSGLGYRLRRGGQVISHLLYMDDLKLFAPNDLQLMELLKVTETFSSAIRMEFGVDKCAVMHVKRGEIMESVGTQLSDSTNLRSLSATETYKYLGMSEALGFNVADMKQSLKERFFGRLRKVFNSLLSGGNKVRAFNGWVMPVLMYSFGILKWTQTELDALDRKVRTLLTAFRMHHPRSSVMRLYIPRSCGGRGFLNAKTLHNREICSLREYFLETDVGMHRDVVAVDKGLTPLSLAKENWHKPVVLDTNDRKEVWQSKELHGRFFRALHGPDVDQSASVAWLRSGDLFGETEGFVCAIMDEVMMTNNYRRFIVKDGTVDICRACHRPGESIRHIISGCSRLANGEYLHRHNLVARIIHQQLALKYNLVESEVPYYRYEPDPVLEHGNITLYWDRSIITDRTIVANKPDIVVVDQSERRAMIVDITVPHDENLVKAEKDKQIKYIDLAREVVDMWDVDSAIIVPIVVSANGLIAKSLDQHLRRLSLGSWIKGLIQKAVLLDTARIVRRFLSLEP

SEQ ID NO: 12408 - protein, 1107 aa, Hecatera dysodea
MRWTQSINENVMRSYFGATEGGINLTAYRGRMLSLFQVLEPAVNVSAQRLSDQVRVIQRNRMLDDAVLDRLRLESRSSRVSPASPPAAVQIQPSISPRPDHVSEDVDDGAITVSTQCNERLRSALEDAFREYRSTPPGLRPRLPRLPMHNKNRALVCALDSQLENCFNSSKDLADTHSILYCAAAAACRVAHVKFPNSDRAARPAVPAWQCRIERRIGEARALIGKLICFREGNTRRRVMRFVRRAFSGTDISPRDYLTRVTERIDFLKQKVYAWASRIRRYKRRVERYTQNRTFQSNERWVYRAWERPDQVVTDTHLPDDDAMCSFWRSIWSVPVSHTEGDWTREVERTCDPIPEMGAITISPQDVARAVRPLPNWKSPGPDGLHNFWIKWFTRSHARLASQFQSALESRSLPQFLTTGITHLLHKSGSTAEPKNYRPITCLPTVYKVLTSILRAKINDHIESNSIMSTSQNGCRNGARGTKELLLIDVAISQQVRRSRKDLSTCWIDYKKAYDSVPHTWLMRVLELYKVNTVLRTFLMSCMGQWRMVLHYPGCRQTQANSEPIRIERGIFQGDSLSPLWFCLALNPLSTLLEGSGQGYRLRRGGQVISHLLYMDDLKLFAPNNLQLMKLLKVTETFSSDISMEFGVDKCAVMHVKRGEIMESVGTQLSDSIYLRSLCSTETYKYLGMSEALGINATSVKQSLKERFFGRLNKVLNSLLSGGNKVRAFNGWVMPVLMYSFGILKWTQTELDALDRRVRSLLTANRMHHPRSSVMRLYIPRKCGGRGFLNAKTLHNREVCSLREYFLEADVGMHRDVVAVDKGLTPLSLANENWRKPVVLDTNDRREVWQSKELHGRFYRVLHGPDVDFLASVAWLRFGDLFGETEGFICAITDEVMMTNNYRKYIVKDGTVDICRACHRPGESIRHIISGCSSLANGDYLHRHNLVARIIHQQLALKYNLVESEVPYYRYVPDPVLENGNCTLYWDRSIITDRTIVANKPDIVVIDRLERRAMIVDIAVPHDENLVKAEKDKQSKYLDLAREVVDMWNVNTAVIVPIIVTANGIIAKSLDQHLKRLSLGSWIKGLIQKAVLLDTARIVRRFLSREP

SEQ ID NO: 12409 - protein, 957 aa, Hecatera dysodea
MHNKNRALVAALDSQLSNYFDNCEDLTDAHSIMYCAAVAACRVAHVKMPSDRVTRPKVAVPAWQCRIERRIGGARALIGKLICFREGNTRPRVMRFVRRAFSGTDTSPSDYLSRVTERIDFLKQKVYAWANRIRRYKRRVERYTQNRTFRSNERWVYKAWERPDQDVTDMHPPDDDAMCSFWRNIWSVPVSHTEGDWIREVERACDPLPEMGAIIISPQDVARAVRPLPNWKSPGPDGLHNFWIKWFKGSHACLASRYQAALESGSLPEFFMTGVTHLLHKSGSTAEPKNYRPITCLPTVYKVLTSILRDKINQHINSNNIMSASQNGCRNGSRGTKELLLIDMVISQQVRRSRKDLSTCWIDYKKAYDSVPHSWLMRVLELYKIDTTLRTFLMSCMGQWRTVLRYPGCRNIQRNSEPVRIERGIFQGDSLSPLWFCLALNPLSTLLENSGLGYRLRKGGQVISHLLYMDDLKLFAPTILQLMELLKVTETFSNAIRMEFGVDKCAVMHVKRGEIMESVGTQLSDSINLRSLSSTETYKYLGMSEALGINVTDMKQSLRERFFGRLKKVLNSLLSGGNKVRAFNGWVMPVLMYSFGVLKWTQTELDALDRRVRTLLTAYRMHHPRSSVMRLYIPRKCGGRGFLNAKTLHNREICSLREYFLAVDVGMHRDVVAVDKGLTPLSLANENWCKPAVLDTNDRRAVWQNKELHGRFFRALHGPDVDQLASVAWLRFGDLFGETEGFVCAIMDEVIMTRNYRRFIVKDGTVDICRACHRPGESIRHIVSGCSSLANGEYLHRHNLVARIIHQQLALKYSLVESEVPYYRYVPDPVLDNGNITLYWDRSIIIVANKPDIVVVDRIVRRAMIVDITVPHDENLVKAEKDKQIKYLDLAREVVDMWDVDSAIIVPIVVSVNGLIAKSLDQHLRRLTLGGWIKGLIQKAVLLDTARIVRRFLSLEP

SEQ ID NO: 12410 - protein, 1046 aa, Hecatera dysodea
MLDDAVLDRLRLESRSSRVSPASPPAAVQIQPSISPRPDHVSEDVDDGAITVSTQCNERLRSALEDAFREYRSTPPGLRPRLPRLPMHNKNRALVCALDSQLENCFNSSKDLADTHSILYCAAAAACRVAHVKFPNSDRAARPAVPAWQCRIERRIGEARALIGKLICFREGNTRRRVMRFVRRAFSGTDISPRDYLTRVTERIDFLKQKVYAWASRIRRYKRRVERYTQNRTFQSNERWVYRAWERPDQVVTDTHLPDDDAMCSFWRSIWSVPVSHTEGDWTREVERTCDPIPEMGAITISPQDVARAVRPLPNWKSPGPDGLHNFWIKWFTRSHARLASQFQSALESRSLPQFLTTGITHLLHKSGSTAEPKNYRPITCLPTVYKVLTSILRAKINDHIESNSIMSTSQNGCRNGARGTKELLLIDVAISQQVRRSRKDLSTCWIDYKKAYDSVPHTWLMRVLELYKVNTVLRTFLMSCMGQWRTVLHYPGCRQTQANSEPIRIERGIFQGDSLSPLWFCLALNPLSTLLEGSGQGYRLRRGGQVISHLLYMDNLKLFAPNNLQLMKLLKVTETFSSDISMEFGVDKCAVMHVKRGEIMESVGTQLSDSIHLRSLCSTETYKYLGMSEALGINATGVKQSLKERFFGRLNKVLNSLLSGGNKVRAFNDWVMPVLMYSFGILKWTQTELDALDRRVRSLLTANRMHHPRSSVMRLYIPRKCGGRGFLNAKTLHNREVCSLREYFLEADVGMHRDVVAVDKGFTPLSLANENWRKPVVLDTNDRREVWQSKELHGRFYRVLHGPDVDFLASVAWLRFGDLFGETEGFICAITDEVMMTNNYRKYIVKDGTVDICRACHRPGESIRHIISGCSSLANGDYLHRHNLVARIIHQQLALKYNLVESEVPYYRYVPDPVLENGNCTLYWDRSIITDRTIVANKPDIVVIDRLERRAMIVDIAVPHDENLVKAEKDKQSKYLDLAREVVDMWNVNTAVIVPIIVTANGIIAKSLDQHLKRLSLGSWIKGLIQKAVLLDTARIVRRFLSREP

SEQ ID NO: 12411 - protein, 1200 aa, Mythimna impura
MLTRAAARRARLPPPASSLSSASPPPESSPTVSAVTPAVAVASSSSDEYFSPPTSPPPARRRRGRRPPSGLGPRGPPASDRVPAPGGSVQRMRWTQSINENVMRAYYGATEGGNNLTAYRVRMLSLFQVLEPAVNVSAQRLSDQVRVIQRNHMLDDTVLDRLRTEMSNHAIAPSSQPVVPVMVPPSYHLSDHADEEITDMVTHVSTQCNNELRSALECAIREYRNMPLELRPRLPRLPMHNKNKALVAALDLQLSNYFDDCEDLTDTHSIMYCAAVAACRVAHVKFPSCDVSTRPKPAVPAWQCRIERRIGGARALIGKLICFREGNTRPRVMRFVRRAFSGTDISPRDYMSRVTERIDFLKQKVYAWANRIRRYKRRVERYTQNRTFRSNERWVYRAWERPDQGVTDTRLPDDDAMSSFWRSIWSVPVSHTEGDWTREVERACDPIPQMGAIDISPQDVARAVRPLPNWKSPGPDGLHNFWIKWFTRSHARLAYQFQSALESGSLPQFLTTGITHLLHKSGSTAEPKNYRPITCLPTVYKVLTSILRSKINSHIDKNLIMSPSQNGCRNGSRGTKELLLIDMTISQQVRRFRKDLSTCWIDYKKAYDSVPHTWLMRVLELYKIDTTLRTFLMSCMRQWSTVLRYPGCRHIQRNSEPVRIERGIFQGDSLSPLWFCLALNPLSTLLENSGLGYRLKRGGQVISHLLYMDDLKLFAPNNLQLMELLKVTENFSSAIRMEFGVDKCAVMHVKRGEVVESVGTQLTDSINLRSLSPTETYKYLGMSEALGINITDMKQSLKERFFGRLKKVFNSLLSGGNKVRAFNGWVMPVLMYSFGVLKWTQTELDALDRRVRTLLTAYRMHHPRSSVMRLYIPRKCGGRGFLNAKTLHNREVCSLREYFLATDVGMHRDVVAVDKGLTPLSLANENWRKPVVLDTNDRREVWQSKELHGRFFRAFHGPDVDQLASVAWLRFGDLFGETEGFVCAIMDEVIMTNNYRRFIVKDGTVDICRACHRPGESIRHIISGCSRLANGEYLHRHNLVARIIHQKLALKYSLVESEVPYYRYEPDPVLDNGHITLYWDRSIITDRTIVANKPDIVVVDRSERRAMIVDISVPHDENLVKAEKDKQIKYIDLAREVVDMWDVDSAIIVPIVVSANGLIAKSLDQHLRRLALGGWIKALIQKAVLLDTARIVRRFLSLEP

SEQ ID NO: 12412 - protein, 868 aa, Mythimna impura
MRFVRRAFLGTSISPQEYMSRVTERIDFLKQKVCAWASRIRRYKRRVDRYSQNRIFQSDERWVYRAWERPEQNVIDGLRPDDFATITFWRNIWSVPVSHTEGGWIREVERVCEAIPEMEKITISPADVAKAVRPLPNWKSPGPDGLQNFWLKWYRNSHAPLASQFQSTLESGSLPEYLTTGVTHLLHKTGNPAEPKNYRPITCLSTVYKLLTSILREKINRHIENNSIMSASQNGCRNGSRGTKELLLIDMAVSQQARRSRKDLSTCWIDYKKAYDSVPHTWLMRVLELYKIDTTLRTFLESCMRQWKTVLRYPGCRPIQGDDEPIRIKRGIFQGDSLSPLWFCLALNPLSTLLEDSGLGYRLRRGGQAISHLLYMDDLKLFAPSNLQLMELLKVTETFSSAIRMEFGVDKCAAMHVKQGEIMESEGIQLPDSIHLKSLSSTETYRYLGMSEALGINNADMKQSLKERFFGRLKKVLNSLLSGGNKVRAFNGWVMPVLMYSFGILKWSQTELDALDRRVRTLLTANRMHHPRSSVMRLYISRKCGGRGFLNAKTLHNREVCSLREYFLKTDVGMHRDVVAVDKGLTPLSMAKEDWRKPVVLTTDDRKEVWKGKELHGRFYRALHEPDVDFLASVAWLRFSDLFGETEGFVCAIMDEVILTNNYRKYIMKDGTVDVCRACHRPGESIRHIISGCSRLANGEYLHRHNQVARIIHQQLALKYNLVDSEVPYYKYVPDPVLENDHVTLYWDRSIITDRTIVANKPDIVVIDRLARRAIIVDVTIPHDENLVKAEKEKQIKYLDLAHEVVGMWNMDSAVIVPIVVTANGLIAKSFDDHLSKLSLRGWIKGLIQKAVLLDTARIVRRFLSLEP

SEQ ID NO: 12413 - protein, 1046 aa, Mythimna impura
MLDDAVLDRLRLESQSSRVSPATTPAAVQRLPTASPRPDQVGDADDDAAISVSTQCNDRLRGALEDAFREYRSTPPGLRPRLPRLPMHKRNRALVCALDSQLSNCFDSSKDLTDTHSILYCAAVAACRVAHVKFPYCDRATRPAVPAWQCRIEHRIGEARALIGKLICFREGNTRPRVMRFVRRAFSGTNISSRDYLPCVTERIDFLKQKIYAWANRIRRYKRRVERYTRNRTFQSNERWVYRDWERPDQGVTDTRLPDDDAMCSFWRSIWSAPVSHTEGDWIREVERACDLLPEMGAITISPQDVARAVRPLPNWKSPGPDGLHNFWVKWFQRSHARLASQFQSALESGSLPQFLTTGITHLLHKSGSTAEPKNYRPITCLPTVYKVLTSILRAKINSHIETNSIMSASQNGCRNGSRGTKEPLLIDIAISQQVRRSRKNLSACWIDYKKAYDSVPHTWLMRVLELYKVDATLRTFLKSCMGQWRTVLHYPGCRQIQENNEPIRIERGIFQGDSLSPLWFCLALNPLSTLLEGSGLGFRLKRGGQVISHLLYMDDLKLFAPNNLQLVELLKVTETFSSAIRMEFGLDKCAVIHVKRGEIMESVGIQLSDSIHLRSLCSTETYKYLGMSESLGINTDDVKQSLKERFFGRLNKVLNSLLSGGNKVRAFNGWVMPVLMYSFGILKWTQTELDALDRRVRTLLTANRMHHPRSSVMRLYIPRKCGGRGFLNAKTLHNREVCSLREYFLKTDVGMHRDVVAVDKGLTPLSLANENWRKPIVLDTNDRREVWQSKELHGRFYRALHGPDVDLLASVSWLRFGDLFEETEGFVFAIMDEVMMTNNYRKYIVKDGTVDICRACHRPGESIRHIISGCSHLANGDYLHRHNLVARIIHQQLALKYNLVESEVPYYRYVPDPVLDNGNITLYWDRSIITDRTIVANKPDIVVIDRLERRTMIVDIAVPHDENLVKAEKDKQTKYLDLAREVVDMWEVDRAIIVPIVVTANGLIAKSLEQHLRRLSLGSWIKGLIQKAVLLDTARIVRRFLSQEP

SEQ ID NO: 12414 - protein, 1110 aa, Mythimna impura
MRWTQSINENVMRSYYGATEGGNNLTAYRVRMLSLFQVLEPAVNVSAQRLSDQVRVIQRNHMLDDTVLDRLRTEMSNHIIAPSSQIVVPAQPVPPPYLLSNHADEEITDMVTHVSTQCNDELRSALECAIREYRNMPLELRPRLPRLPMHNKNKALVAALDSQLSNYFDDCENLTDTHSIMYCAAVAACRVAHVKFPNCDVATRPKPAVPAWQCRIERRIGGARALIGKLICFREGNTRPRVMRFVRRAFSGTDISPRDYMSRVTERIDFLKQKVYAWANRIRRYKRRVERYTQNRTFRSNERWVYRDWEGPDQGVTDARLPDDNAMSSFWRSIWSVPVSHTEGDWTREVERACDPIPQMGAIDISPQDVARAVRPLPNWKSPGPDGLHNFWIKWFTRSHARLAYQFQSALESGSLPQFLTTGITHLLHKSGSTAEPNNYRPITCLPTVYKVLTYILRSKINSHIDKNLIMSPSQNGCRNGSRGTKELLLIDMTISQQVRRSRKDLSTCWIDYKKAYDSVPHTWLMRVLELYKIDTTLRTFLMSCMRQWSTVLRYPGCRHIQRNSEPVRIERGIFQGDSLSPLWFCLALNPLSTLLENSGLGYRLKRGGQVISHLLYMDDLKLFAPNNLQLMELLKVTETFSSAIRMEFGVDKCAVMHVKRGEVVESVGTQLTDSINLRSLSPTETSKYLGMSEALGINITDMKQSLKERFFGRLKKVLNSLLSGGNKVRAFNGWIMPVLMYSFGVLKWTQTELDALDRRVRTLLTAYRMHHPRSSVMRLYIPRKCGGRGFLNAKILHNREVCSLREYFLAADEGMHRDVVAVDKGLTPLSLANENWRKPVVLDTNDRREVWQSKELHGRFFRALHGPDVDQLASVAWLRFGDLFGETEGFVCAIMDEVIMTNNYRRFIVKDGTVDICRACHRPGESIRHIISGCSRLANGEYLHRHNLVARIIHQQLALKYSLVESEVPYYRYEPDPVLDNGHITLYWDRSIITDRTIVANKPDIVLVDRSERRAMIVDISVPHDENLVKAEKDKQIKYIDLAREVVDMWDVDSAIIVPIVVSANGLIAKSLDQHLRRLALGGWIKGLIQKVVLLDTARIVRRFLSLEP

SEQ ID NO: 12415 - protein, 1200 aa, Mythimna impura
MLTRSRAQKLHTHPTSSGSSLSSASQPPGPAPTVSPEIPVAAVASSSSDEYFSPPTTPLPARRRGRGRPPASLGPRGPPASDRVPAAGGSVQRMRWTSSINENVMRSYFGATEGGINLTAYRGRMLSLFQVLEPAVNVSAQRLSDQVRVIQRNRMLDDAVLDRLRLESQSSRVSPATTPAAVQRLPTASPRPDQVGDADDDAAISVSTQCNDRLRGALEDAFREYRSTPPGLRPRLPRLPMHKRNRALVCALDSQLSNCFDSSKDLTDTHSILYCAAVAACRVAHVKFPNCDRATRPAVPAWQCRIEHRIGEARALIGKLICFREGNTRPRVMRFVRRAFSGTNISSRDYLPCVTERIDFLKQKIYAWANRIRRYKRRVERYTWNRTFQSNERWVYRDWERPDQGVTDTRLPDDDAMCSFWRSIWSAPVSHTEGDWIREVERACDLLPEMGAITISPQDIARAVRPLPNWKSPGPDGLHNFWVKWFQRSHARLASQFQSALESGSLPQFLTTGITHLLHKSGSTAEPKNYRPITCLPTVYKVLTSILRAKINSHIETNSIMSASQNGCRNGSRGTKELLLIDIAISQQVRRSRKNLSACWIDYKKAYDSVPHTWLMRVLELYKVDATLRTFLKSCMGQWRTVLHYPGCRQIQENNEPIRIERGIFQGDSLSPLWFCLALNPLSTLLEGSGLGYRLKRGGQVISHLLYMDDLKLFAPNNLQLVELLKVTETFSSAIRMEFGLDKCAVIHVKRGEIMESVGIQLSDSIHLRSLCSTETYKYLGMSESLGINTDDVKQSLKERFFGRLNKVLNSLLSGGNKVRAFNGWVMPVLMYSFGILKWTQTELDALDRRVRTLLTANRMHHPRSSVMRLYIPRKCGGRGFLNAKTLHNREVCSLREYFLKTDVGMHRDVVAVDKGLTPLSLANENWRKPIVLDTNDRREVWQSKELHGRFYRALHGPDVDLLASVSWLRFGDLFGETEGSVFAIMDEVMMTNNYRKYIVKDGTVDICRACHRPGESIRHIISGCSHLANGDYLHRHNLVARIIHQQLALKYNLVESEVPYYRYVPDPVLDNGNITLYWDRSIITDRTIVANKPDIVVIDRLERRTMIVDIAVPHDENLVKAEKDKQTKYLDLAREVVDMWEVDRAIIVPIVVTANGLIAKSLEQHLRRLSLGSWIKGLIQKAVLLDTARIVRRFLSQEP

SEQ ID NO: 12416 - protein, 1200 aa, Mythimna impura
MLTRSRAQKLHTHPTSSGSSLSSASQPPGPAPTVSPEIPVAAVASSSSDEYFSPPTTPPPARRRGRGRPPASLGPRGPPASDRVPAAGGSVQRMRWTSSINENVMRSYFGATEGGINLTAYRSRMLSLFQVLEPAVNVSVQRLSDQVRVIQRNRMLDDAVLDRLRLESQSSRVSPATTPAAVQRLPTASPRPVQVGDADDDAAISVSTQCNDRLRGALEDAFREYRSTPPGLRPRLPRLPMHKRNRALVCALDSQLSNCFDSSKDLTDTHSILYCAAVAACRVAHVKFPNCDRATRPAVPAWQCRIEHRIGEARALIGKLICFREGNTRPRVMRFVRRAFSGTDISPRDYLPCVTERIDFLKQKIYAWANRIRRYKRRVERYTRNRTFQSNERWVYRDWERSDQGVTDTRLPDDDAMCSFWRSIWSAPVSHTEGDWIREVERACDLLPEMGAITISPQDVARAVRPLPNWKSPGPDGLHNFWVKWFQRSHARLASQFQSALESGSLPQFLTTGITHLLHKSGSTAEPKNYRPITCLPTVYKVLTSILRAKINSHIETNSIMSASQNGCRNGSRGTKELLLIDIAISQQVRRSRKNLSACWIDYKKAYDSVPHTWLMRVLELYKVDATLRTFLLSCMGQWRTVLHYPGCRQIQENNEPIRIERGIFQGDSLSPLWFCLALNPLSTLLEGSGLGYRLKRGGQVISHLLYMDDLKLFAPNNLQLVELLKVTETFSSAIRMEFGVDKCAVIHVKRGEIMESVGIQLSDSIHLRSLCSTETYKYLGMSESLGINTDDVKQSLKERFFGRLNKVLNSLLSGGNKVRAFNGWVMPVLMYSFGILKWTQTELDALDRRVRTLLTANRMHHPRSSVMRLYIPRKCGGRGFLNAKTLHNREVCSLREYFLKTDVGMHRDVVAVDKGLTPLSLANENWRKPIVLDTNDRREVWQSKELHGRFYRALHGPDVDLLASVSWLRFGDLFGETEGFVFAIMDEVMMTNNYRKYIVKDGTVDICRACHRPGESIRHIISGCPHLANGDYLHRHNLVARIIHQQLALKYNLVESEVPYYRYVPDPVLDNGNITLYWDRSIITDRTIVANKPDIVVIDRLERRTMIVDIAVPHDENLVKAEKDKQTKYLDLAREVVDMWEVDKAIIVPIVVTANGLIAKSLEQHLRRLSLGSWIKGLIQKAVLLDTARIVRRFLSQEP

SEQ ID NO: 12417 - protein, 1200 aa, Mythimna impura
MLTRSRAREQETHPTSSGSSLSSASQPPGPAPAVSPVIPAAAVASSSSDEYFSPPTTPPPARRRGRGRPPASLRPRGPPASDRVPAAGGSVQRMRWTQSINENVMRSYFGATEGGSNLTAYRGRMLSLFQVLEPTVNVSAQRLSDQVRVIQRNRMLDDAVLDRLRLESQRSRASSATPPAAVQLQPSALPRPDHVGDADDDAAISVSTQCNERLRSALEDAFREYRSTPPGLRPRLPRLPMHKRNRALVCALDSQLSNCFDSSKDLADTHSILYCAAAAACRVAHVKFPNCDRATRPAVPAWQRRIERRIGEARALIGKLICFREGNTRPRVMRFVRRAFLGTDISPQNYLPCVTERIDFLKQKVYAWASRIRRYKRRVERYTQNRTFQSNERWVYRTWERPDQDVTDTRLPDDDAMCSFWRRIWSVPVSHIEGDWIREVERTCDLLPEMGAITISPQDVARAVRPLPNWKSPGPDGLHNFWIKWFQGSHTRLASQFQSALESGSLPEFLTTGITHLLHKSGSTADPKNYRPITCLPTVYKVLTSILRAKINTHIETNSIMSASQNGCRNGSRGTKELLLIDMAISQQVRRSRKDLSTCWIDYKKAYDSVPHTWLMRVLELYKVDTTLRTFLMSCMGQWRTVLHYPGCRQIRENSEPIRIERGIFQGDSLSPLWFCLALNPLSTLLEGSGLGYRLKRGGQVISHLLYMDDLKLFAPNNLHLMELLKVTETFSSAIRMEFGVDKCAVMHVKRGEIMESVGTQLSDSIYLRSLCSTETYKYLGMSEALGINAADVKQSLKERFFGRLNRVLKSLLSGGNKVRAFNGWVMPVLMYSFGILKWTQTELDALDRRVRTLLTANRMHHPRSSVMRLYIPRKCGGRGFLNAKTLHNREVCSLREYFLETDVGMHRDVVAVDKGLTPLSLANGNWRKPIILDTNDRREVWQSKELHGRFYRALHGPDVDLLASVSWLRFGDLFGETEGFVCAIMDKVVMTNNYRKYIVKDGTADICRACHRPGESIRHIISGCSHLANGDYLHRHNLVARIIHQQLALKYNLVESEVPYYKYVPDPVLDNGSITLYWDRSIITDRTIVANKPDIVVIDRLERRTVIVDIAVPHDENLVKAEKDKQTKYLDLAREVVDMWEVDTAVIVPIVVTANGLISKSLDQHLRRLSLGSWIKGLIQKAVLLDTARIVRRFLSQEP

SEQ ID NO: 12418 - protein, 1178 aa, Mythimna impura
MLTRAAARRARLPPPASSLSSASPPPESSPTVSAVTPAVAVASSSSDEYFSPPTSPPPARRRRGRRPPSGLGPRGPPASDRVPAPGGSVQRMRWTQSINENAMRAYYGATEGGNNLTAYRVRMLSLFQVLEPAVNVSAQRLSDQVRVIQRNHMLDDTVLDRLRTEMSNHAIAPSSQPVVPVMVPPSYHLSDHADEEITDMVTHVSTQCNNELRSALECAIREYRNIPLELRPRLPRLPMHNKNKALVAALDLQLSNYFDDCEDLTDTHSIMYCAAVAACRVAHVKFPSCDVSTRPKPAVPAWQCRIERRIGGARALIGKLICFREGNTRPRVMRFVRRAFSGTDISPRDYMSRVTERIDFLKQKVYAWANRIRRYKRRVERYTQNRTFRSNERWVYRAWERPDQGVTDTRLPDDDAMSSFWRSIWSVPVSHTEGDWTREVERACDPIPQMGAIDISPQDVARAVRPLPNWKSPGPDGLHNFWIKWFTRSHARLAYQFQSALESGSLPQFLTTGITHLLHKSGSTAEPKNYRPITCLPTVYKVLTSILRSKINSHIDKNLIMSPSQNGCRNGSRGTKELLLIDMTISQQVRRFRKDLSTCWIDYKKAYDSVPHTWLMRVLELYKIDTTLRTFLMSCMRQWSTVLRYPGCRHIQRNSEPVRIERGIFQGDSLSPLWFCLALNPLSTLLENSGLGYRLKRGGQVISHLLYMDDLKLFAPNNLQLMELLKVTETFSSAIRMEFGVDKCAVMHVKRGEVVESVGTQLTDSINLRSLSPTETYKYLGMSEALGINITDMKQSLKERFFGRLKKVFNSLLSGGNKVRAFNGWVMPVLMYSFGVLKWTQTELDALDRRVRTLLTAYRMHHPRSSVMRLYIPRKCGGRGFLNAKTLHNREVCSLREYFLATDVGMHRDVVAVDKGLTPLSLANENWRKPVVFDTNDRREVWQSKELHGRFFRAFHGPDVDQLASVAWLRFGDLFGETEGFVCAIMDEVIMTNNYRRFIVKDGTVDICRACHRPGESIRHIISGCSRLANGEYLHRHNLVARIIHQQLALKYSLVESEVPYYRYEPDPVLDNGHITLYWDRSIITDRTIVANKPDIVVVDRSERRAMIVDISVPHDENLVKAEKDKQIKYIDLAREVVDMWDVDSAIIVPIVVSANGLIAKSLDQHLRRLALGGWLFI

SEQ ID NO: 12419 - protein, 1200 aa, Mythimna impura
MLTRAAARRARLPPPASSLSSASPPPEPSPTVSAVTPAVAVASSSSDEYFSPPTSPPPARRRRGRRPPSGLGPRGPPASDRVPAPGGSVQRMRWTQSINENVMRAYYGATEGGNNLTAYRVRMLSLFQVLEPAVNVSAQRLSDQVRVIQRNHMLDDTVLDRLRTEMSNHAIAPSSQSVVPVMAPPSYHLSGHVDEEIADMVTHVSTQCNNELRSALECAIREYRNMPLELRPRLPRLPMHNKNKALVAALDLQLSNYFDDCKDLTDTHSIMYCAAVAACRLAHVKFPNCDVATRPKPAVPAWQCRIERRIGGARALIGKLICFREGNTRPRVMRFVRRAFSGTDISPRDYMSRVTERIDFLKQKVYAWANRIRRYKRRVDRYTQNRTFRSNERWVYRAWERPDQGVTDACLADDDAMSSFWRSIWSVPVSHTEGDWTREVERACDPIPQMGAIDISPQDVARAVRPLPNWKSPGPDGLHNFWIKWFTRSHARLAYQFQSALESGSLPQFLTTGITHLPHKSGSTAEPKNYRPITCLPTVYKVLTSILRSKINSHIDKNLIMSPSQNGCRNGSRGTKELLLIDMTISQQVRRSRKDLSTCWIDYKKAYDSVPHTWLMRVLELYKIDTTLRTFLMSCMRQWSTVLRYPGCRHTQRNSEPVRIERGIFQGDSLSPLWFCLALNPLSTLLENSGLGYRLKRGGQVISHLLYMDDLKLFAPNNLQLMELLKVTETFSSAIRMEFGVDKCAVMHVKRGEVVESVGTQLTDFINLRSLSPTETYKYLGMSEALGINITDMKQSLKERFFGRLKKVFNSLLSGGNKVRAFNGWVMPVLMYSFGVLKWTQTELDALDRKVRTLLTAYRMHHPRSSVMRLYIPRKCGGRGFLNAKTLHNREVCSLREYFLAADVGMHRDVVTVDKGLTPLSLANENWRKPVVLDTNDRREVWQSKELHGRFFRALHGPDVDQLASVAWLRSGDLFGETEGFVCAIMDEVIMTNNYRRFIVKDGTVDICRACHRPGESIRHIISGCSRLANGEYLHRHNLVARIIHQQLALKYSLVESEVPYYRYEPDPVLDNGHITLYWDRSIITDRTIVANKPDIVVVDRSERRAMIVDISVPHDENLVKAEKDKQIKYIDLAREVVDMWDVDSAIIVPIVVSGNGLIAKSLDQHLRRLALGDWIKGLIQKAVLLDTARIVRRFLSLEP

SEQ ID NO: 12420 - protein, 1200 aa, Mythimna impura
MLTRAAARRARLPPPASSLSSASPPPESSPTVSAVTPAVAVASSSSDEYFSPPTSPPPARRRRGRRPPSGLGPRGPPASDRVPAPGGSVQRMRWTQSINENVMRAYYGATEGGNNLTAYRVRMLSLFQVLEPAVNVSAQRLSDQVRVIQRNHMLDDTVLDRLRTEMSNHAIAPSSQPVVPVMVPPSYHLSDHADEEITDMVTHVSTQCNNELRSTLECAIREYRNMPLELRPRLPRLPMHNKNKALVAALDLQLSNYFDDCEDLTDTHSIMYCAAVAACRVAHVKFPSCDVSTRPKPAVPAWQCRIERRIGGARALIGKLICFREGNTRPRVMRFVRRAFSGTDISPRDYMSRVTERIDFLKQKVYAWANRIRRYKRRVERYTQNRTFRSNERWVYRAWERPDQGVTDTRLPDDDAMSSFWRSIWSVPVSHTEGDWTREVERACDPIPQMGAIDISPQDVARAVRPLPNWKSPGPDGLHNFWIKWFTRSHARLAYQFQSALESGSLPQFLTTGITHLLHKSGSTAEPKNYRPITCLPTVYKVLTSILRSKINSHIDKNLIMSPSQNGCRNGSRGTKELLLIDMTISQQVRRFRKDLSTCWIDYKKAYDSVPHTWLMRVLELYKIDTTLRTFLMSCMRQWSTVLRYPGCRHIQRNSEPVRIERGIFQGDSLSPLWFCLALNPLSTLLENSGLGYRLKRGGQVISHLLYMDDLKLFAPNNLQLMELLKVTETFSSAIRMEFGVDKCAVMHVKRGEVVESVGTQLTDSINLRSLSPTETYKYLGMSEALGINITDMKQSLKERFFGRLKKVFNSLLSGGNKVRAFNGWVMPVLMYSFGVLKWTQTELDALDRRVRTLLTAYRMHHPRSSVMRLYIPRKCGGRGFLNAKTLHNREVCSLREYFLATDVGMHRDVVAVDKGLTPLSLANENWRKPVVLDTNDRREVWQSKELHGRFFRAFHGPDVDQLASVAWLRFGDLFGETEGFVCAIMDEVIMTNNYRRFIVKDGTVDICRACHRPGESIRHIISGCSRLANGEYLHRHNLVARIIHQQLALKYSLVESEVPYYRYEPDPVLDNGHITLYWDRSIITDRTIVANKPDIVVVDRSERRAMIVDISVPHDENLVKAEKDKQIKYIDLAREVVDMWDVDSAIIVPIVVSANGLIAKSLDQHLRRLALGGWIKALIQKAVLLDTARIVRRFLSLEP

SEQ ID NO: 12421 - protein, 1200 aa, Mythimna impura
MLTRSRAQKLHTHPTSSGSSLSSASQPPGPAPTVSPEIPVAAVASSSSDEYFSPPTTPPPARRRGRGRPPASLGPRGPPASDRVPAAGGSVQRMRWTSSINENVMRSYFGATEGGINLTAYRGRMLSLFQVLEPAVNVSAQRLSDQVRVIQRNRMLDDAVLDRLRLESQSSRVSPATTPAAVQRLPTASPRPDQVGDADDDAAISVSTQCNDRLRGALEDAFREYRSTPPGLRPRLPRLPMHKRNRALVCALDSQLSNCFDSSKDLTDTHSILYCAAVAACRVAHVKFPNCDRATRPAVPAWQCRIEHRIGEARALIGKLICFREGNTRPRVMRFVRRAFSGTNISSRDYLPCVTERIDFLKQKIYAWANRIRRYKRRVERYTWNRTFQSNERWVYRDWERPDQGVTDTRLPDDDAMCSFWRSIWSAPVSHTEGDWIREVERACDLLPEMGAITISPQDIARAVRPLPNWKSPGPDGLHNFWVKWFQRSHARLASQFQSALESGSLPQFLTTGITHLLHKSGSTAEPKNYRPITCLPTVYKVLTSILRAKINSHIETNSIMSASQNGCRNGSRGTKELLLIDIAISQQVRRSRKNLSACWIDYKKAYDSVPHTWLMRVLELYKVDATLRTFLKSCMGQWRTVLHYPGCRQIQENNEPIRIERGIFQGDSLSPLWFCLALNPLSTLLEGSGLGYRLKRGGQVISHLLYMDDLKLFAPNNLQLVELLKVTETFSSAIRMEFGLDKCAVIHVKRGEIMESVGIQLSDSIHLRSLCSTETYKYLGMSESLGINTDDVKQSLKERFFGRLNKVLNSLLSGGNKVRAFNGWVMPVLMYSFGILKWTQTELDALDRRVRTLLTANRMHHPRSSVMRLYIPRKCGGRGFLNAKTLHNREVCSLREYFLKTDVGMHRDVVAVDKGLTPLSLANENWRKPIVLDTNDRREVWQSKELHGRFYRALHGPDVDLLASVSWLRFGDLFGETEGFVFAIMDEVMMTNNYRKYIVKDGTVDICRACHRPGESIRHIISGCSHLANGDYLHRHNLVARIIHQQLALKYNLVESEVPFYRYVPDPVLDNGNITLYWDRSIITDRTIVANKPDIVVIDRLERRTMIVDIAVPHDENLVKAEKDKQTKYLDLAREVVDMWEVDRAIIVPIVVTANGLIAKSLEQHLRRLSLGSWIKGLIQKAVLLDTARIVRRFLSQEP

SEQ ID NO: 12422 - protein, 1200 aa, Mythimna impura
MLTRSRAREQETHPTSSGSSLSSASQPPGPAPAVSPVIPAAAVASSSSDEYFSPPTTPPPARRRGRGRPPASLRPRGPPASDRVPAAGGSVQRMRWTQSINENVIRSYFGATEGGSNLTAYRGRMLSLFQVLEPTVNVSAQRQSDQVRVIQRNRMLDDAVLDRLRLESQRSRASSATPPAAVQLQPSALPRPDHVGDADDDAAISVSTQCNERLRSALEDAFREYRSTPPGLRPRLPRLPMHKRNRALVCALDSQLSNCFDSSKDLADTHSILYCAAAAACRVAHVKFPNCDRATRPAVPAWQRRIERRIGEARALIGKLICFREGNTRPRVMRFVRRAFLGTDISPQNYLPCVTERIDFLKQKVYAWASRIRRYKRRVERYTQNRTFQSNERWVYRTWERPDQDVTDTRLPDDDAMCSFWRRIWSVPVSHIEGDWIREVERTCDLLPEMGAITISPQDVARAVRPLPNWKSPGPDGLHNFWIKWFQGSHARLASHFQSALESGSLPEFLTTGITHLLHKSGSTADPKNYRPITCLPTVYKVLTSILRAKINTHIETNSIMSASQNGCRNGSRGTKELLLIDMAISQQVRRSRKDLSTCWIDYKKAYDSVPHTWLVRVLELYKVDTTLRTFLMSCMRQWRTVLHYPGCRQIRENSEPIRIERGIFQGDSLSPLWFCLALNPLSTLLEGSGLGYRLKRGGQVISHLLYMDDLKLFAPNNLHLMELLKVTETFSSAIRMEFGVDKCAVMHVKRGEIMESVGTQLSDSIYLRSLCSTETYKYLGMSEALGINAADVKQSLKERFFGRLNRVLKSLLSGGNKVRAFNDWVMPVLMYSFGILKWTQTELDALDRRVRTLLTANRMHHPRSSVMRLYIPRKCGGRGFLNAKTLHNREVCSLREYFLETDVGMHRDVVAVDKGLTPLSLANGNWRKPIILDTNDRREVWQSKELHGRFYRALHGPDVDLLASVSWLRFEDLFGETEGFVCAIMDEVVMTNNYRKYIVKDGTADICRACHRPGESIRHIISGCSHQANGDYLHRHNLVARIIHQQLALKYNLVESEVPYYKYVPDPVLDNGSITLYWDRSIITDRTIVANKPDIVVKDRLERRTEIVDIAVPHDENLVKAEKDKQTKYLDLAREVVDMWEVDTAVIVPIVVTANGLISKSLDQHLRRLSLGSWIKGLIQKAVLLDTARIVQRFLSQEP

SEQ ID NO: 12423 - protein, 1200 aa, Phlogophora meticulosa
MLTRSAARRARPPPLASSLSSASPPPESSPIVSTVTPAVAIASSSSDEYFSPPTSPPPARRRRGRRPPDSIGPRGPPASDRVPASGGSVQRMRWTQSINENVMRSYYGATEGGTNLTAYRGRMLSLFQMLEPAVNVSAQRLSDQVRVIQRNHMLDDVVLDRLRLNSRIYHVTPALPPVAVQLQSLPSVSPRPDYVGEEDDDAAISVSSQCNVRLRSALEDAFREYRSTPPELRSRLPRLPMHKKNKALMSALDSLLTKSFDNSKDLTDTHSILYCAAAAACRVANVKFPNTERATRPTVPAWQCRIQRRIDEARALIGKLICFREGNTRPRVMRFVRRAFSGTDISSRDYLTRVTERIDFLKQKICAWANRIRRYKRRVERYTQNRTFRSDERWVYRAWERPDQGVTDTCLPDDEAMCSFWRSIWSVPVSHTEGNWTREIERACEPLPEMGAINISPQDVASAVRPLPNWKSPGPDGLHNFWIKWLQSSHARLACQFQSALESGSLPQFLTTGITHLLHKSGSTAEPRNYRPITCLPTVYKVLTSILRSKINNYIDSNLIMSFSQNGCRNGSRGTKELLLIDTAISQQVRRSRKDLSTCWVDYKKAYDSVPHTWLMRVLELYKVDATLRTFLMSCMGQWRTVLRYPGCQQTRENSEPIRIERGIFQGDSLSPLWFCLALNPLSTLLEGSGLGYRLRTGGQVISHLLYMDDLKLFAPNNLQLMELLKVTETFSSAIRMDFGVDKCAVMHVKRGEIVESVGTQLSDSIYLRSLSSTETYKYLGMSEALGINATDMKQSLKERYFGRLNKVLNSLLSGGNKVRAFNGWVMPVLMYSFGILKWTQTELDALDRRVRTLLTANRMHHPRSSVMRLYIPRKYGGRGFLNAKTLHNREICSLREYFLKADVGMHRDVVAVDKTFTPLSLANKNWRKPIVLDTADRMEIWKSKELHGRFYRVLHGPDVDLVASISWLRFGDLFGETEGFVCAIMDEVIMTNNYRKYIVKDGTVDICRACHRPGESIRHIISGCSRLANGDYLHRHNLVARIIHQQLALKYNLVDLEVPYYKYVPDPVLENGSITLYWDRSIITDRTIVANKPDIVVIDRSERRTMIIDITVPHDENLVKAEKEKQMKYLDLAREVVDMWDVNTAVIVPIVVTANGIIAKSLDQHLKRLSLGSWIKGLIQKAVLLDTARIVRRFLSQEP

SEQ ID NO: 12424 - protein, 1200 aa, Phlogophora meticulosa
MLTRSAARRARPPPLASSLSSASPPPESSPIVSTVTPAVAIASSSSDEYFSPPTSPPPARRRRGRRPPDSIGPRGPPASDRVPASGGSVQRMRWTQSINENVMRSYYGATEGGTNLTAYRGRMLSLFQMLEPAVNVSAQRLSDQVRVIQRNHMLDDVVLDRLRLNSRIYHVTPALPPVAVQLQSLPSVSPRPDYVGEEDDDAAISVSSQCNVRLRSALEDAFREYRSTPPELRSRLPRLPMHKKNKALMSALDSLLTKSFDNSKDLTDTHSILYCAAAAACRVANVKFPNTERATRPTVPAWQCRIQRRIDEARALIGKLICFREGNTRPRVMRFVRRAFSGTDISSRDYLTRVTERIDFLKQKICAWANRIRRYKRRVERYTQNRTFRSDERWVYRAWERSDQGVTDTRLPDDEAMCSFWRSIWSVPVSHTEGNWTREIERACEPLPEMGAINISPQDVASAVRPLPNWKSPGPDGLHNFWIKWLQSSHARLACQFQSALESGSLPQFLTTGITHLLHKSGSTAEPRNYRPITCLPTVYKVLTSILRSKINNHIDSNLIMSFSQNGCRNGSRGTKELLLIDTAISQQVRRSRKDLSTCWVDYKKAYDSVPHTWLMRVLELYKVDATLRTFLMSCMGQWRTVFRYPGCQQTRENSEPIRIERGIFQGDSLSPLWFCLALNPLSTLLEGSGLGYRLRTGGQVISHLLYMDDLKLFAPNNLQLMELLKVTETFSSAIRMDFGVDKCAVMHVKRGEIVESVGTQLSDSIYLRSLSSTETYKYLGMSEALGINATDMKQSLKERFFGRLNKVLNSLLSGGNKVRAFNGWVMPVLMYSFGILKWTQTELDALDRRVRTLLTANRMHHPRSSVMRLYIPRKCGGRGFLNAKTLHNREICSLREYFLKADVGMHRDVVAVDKTFTPLSLANKNWRKPIVLDTADRMEIWKSKELHGRFYRVLHGPDVDLVASISWLRFGDLFGETEGFVCAIMDEVIMTNNYRKYIVKDGTVDICRACHRPGESIRHIISGCSRLANGDYLHRHNLVARIIHQQLALKYNLVDLEVPYYKYVPDPVLENGSITLYWDRSIITDRTIVANKPDIVVIDRSERRTMIIDITVPHDENLVKAEKEKQMKYLDLAREVVDMWDVNTAVIVPIVVTANGIIAKSLDQHLKRLSLGSWIKGLIQKAVLLDTARIVRRFLSQEP

SEQ ID NO: 12425 - protein, 1200 aa, Phlogophora meticulosa
MLTRSAARRARPPPLASSLSSASPPPESSPIVSTMTPAVAIASSSSDEYFSPPTSPPPARRRRGRRPPDSIGPRGPPASDRVPASGGSVQRMRWTQSINENVMRSYYGATEGGTNLTAYRGRMLSLFQMLEPAVNVSAQRLSDQVRVIQRNHMLDDVVLDRLRLNSRIYHVTPALPPVAVQLQSLPSVSPRPDYVGEEDDDAAISVSSQCNVRLRSALEDAFREYRSTPPELRSRLPRLPMHKKNKALMSALDSLLTKSFDNSKDLTDTHSILYCAAAAACRVANVKFPNTERATRPTVPAWQCRIQRRIDEARALIGKLICFREGNTRPRVMRFVRRAFSGTDISSRDYLTRVTERIDFLKQKICAWANRIRRYKRRVERYTQNRTFRSDERWVYRAWERSDQGVTDTCLPDDEAMCSFWRSIWSVPVSHTEGNWTREIERACEPLPEMGAINISPQDVASAVRPLPNWKSPGPDGLHNFWIKWLQSSHARLACQFQSALESGSLPKFLTTGITHLLHKSGSTAEPRNYRPITCLPTVYKVLTSILRSKINNHIDSNLIMSFSQNGCRNGSRGTKELLLIDTAISQQVRRSRKDLSTCWVDYKKAYDSVPHTWLMRVLELYKVDATLRTFLMSCMGQWRTVLRYPGCQQTRENSEPIRIERGIFQGDSLSPLWFCLALNPLSTLLEGSGLGYRLRTGGQVISHLLYMDDLKLFAPNNLQLMELLKVTETFSSAIRMDFGVDKCAVMHVKRGEIVESVGTQLSDSIYLRSLSSTETYKYLGMSEALGINATDMKQSLKERFFGRLNKVLNSLLSGGNKVRAFNGWVMPVLMYSFGILKWTQTELDALDRRVRTLLTANRMHHPRSSVMRLYIPRKCGGRGFLNAKTLHNREICSLREYFLKADVGMHRDVVAVDKTFTPLSLANKNWRKPIVLDTADRMEIWKSKELHGRFYRVLHGPDVDLVASISWLRFGDLFGETEGFVCAIMDEVIMTNNYRKYIVKDGTVDICRACHRPGESIRHIISGCSRLANGDYLHRHNLVARIIHQQLALKSNLVDLEVPYYKYVPDPVLENGSITLYWDRSIITDRTIVANKPDIVVIDRSERRTMIIDITVPHDENLVKAEKEKQMKYLDLAREVVDMWDVNTAVIVPIVVTANGIIAKSLDQHLKRLSLGSWIKGLIQKAVLLDTARIVRRFLSQEP

SEQ ID NO: 12426 - protein, 1198 aa, Phlogophora meticulosa
MLTRSAARRARPPPPASSLSSASSPPKPSTIVSTVKPAVPVASSSSDEYFSPPTSPPPARRRRGRRPPDGLGPRGPPASDRVPAPGGSVQRMRWTQSINENVMRSYYGATEGGSNLTAYRVRMLSLFQVLEPAVNVSAQRLSDQVRVIQRNHMLDDVVLDRLRTEMQSSRVITSPSHTVVPPQYNIVLSSFADGEGSDKVTNVSTQYNEELRSTLEGAIREYRFMLPALRPRLPRLPMHNKNRALVAALDSQLSNYFDNCDDLTDAHSILYCAAVAACRVAHVKFPYDIATRPKPAVPAWQCRIERRIAGARALIGKLVCYREGNTRPRVMRYVRRAFLGTDISPRDYMSRVTERIDFLKQKVYAWASRIRRYKRRVERYTQNRTFQSNERWVYRAWERPVQGVTDTHLPDDDVMCSFWRNIWSVPVSHTEGDWTREVERACDPIPQMGAITISPQDVARAVRPLPNWKSPGPDGLHNFWIKWLQKSHARLASQFQSALETGSLPQFLTTGITHLLHKSGSTAEPKNYRPITCLPTVYKVLTSILRVKINNHIDSNSIMSASQNGCRNGSRGTKELLLIDTAISQQVRRSRKDLSTCWIDYKKAYDSVPHTWLKRVLELYKVDATLRTFLTSCMGQWRTVLRYPGCRQIQRNSEPIRIERGIFQGDSLSPLWFCLALNPLSTLLEDSGLGYRLKRGGQVVSHLLYMDDLKLFAPSDLQLMELLTVTKTFSSAIRMEFGVDKCAVMHVKRGKIVESVGTQLPDFINFRALSPIETYKYLGMSEALGINAADMKQSLKERFFGRLKKVCNSLLSGGNKVRAFNGWVMPVLMYSFGILKWTQTELDALDRRVRTFLTASRMHHPRSSVMRLYIPRKCGGRGFLNAKTLHNREICSLRDYFLETDVGMHRDVVAVDQGLTPLSLAKENWRKPVVLDTNDRKEVWQSKELHGRFFQALHGPDVDQLASVSWLRFGDLFGETEGFVCAIMDEVIMTNNYRRFIVKDGTVDICRACHRPGESIRHIISGCSRLANEEYLHRHNLVARIIHQQLALKYSLVESEVPYYKYVPDPVLENGSVTLYWDRSIITDRTIVANKPDIVVMDRIERRATIIDVTVPHDGNLVKAEKDKQIKYLDLAREVVDMWDVDSAIVVPIVVSANGLIAKSLDQHLRRLALGSWIKGLIQKAVLLDTARIVRRFLSLEP

SEQ ID NO: 12427 - protein, 1202 aa, Phlogophora meticulosa
MLTRSRARVLNAPTTSSGSSLSSASQLPGPAPDVSPVTPAAAVASSSSDEYYSPPTSPPPVRRCGRGRPPASLGLRGPPASARVPASGGSVQRMRWTQSINENVMRSYYGATEGGINLTAYRGRMLSLFQVLEPAVNVSAQRLSDQVRVIQRNHMLDDAVLDRLRLNSRSNRVTPASPPVAVQLQNLPSVSPRPDYVGEEDDDAAISVSSQCNVRLRSALEDAFREYRSTPPGLRQRLPRLPMHKKNKALMCTLDSLLSNSFDSSRDLADTHSILYCAAVAACRVANVKFPNSVRSTRPAIPAWQCRIERRIGEARVLIGKLICFREGNTRPRVMRFVRRAFSGTDISSRDYLTRVTERIDFLKQKICAWANRIRRYKRRVERYTQNRTFRSDERWVYRTWERPDQGVTDTFLPDDEAMCLFWRSIWSVPVSHTEGDWTREVERTCEPLPEMGAINISPQDVACAVRPLPNWKSPGPDGLHNFWIKWLKSSHARLASQFQSTLESGSLPQFLTTGITHLLHKSGSTAEPKNYRPITCLPTVYKVLTSILRSKINNHIDSTSIMSVSQNGCKNGSRGTKELLLIDMAISQQVRRSRKDLSTCWIDYKKAYDSVPHTWLMRVLELYKIDATLRTFLKSCMGQWRTVLHYPGCRQFQENSEPIRIERGIFQGDSLSPLWFCLALNPLSTLLEGSGLGYRLRRGGQVISHLLYMDDLKLFAHNNLQLMKLLKVTETFSSAIRMDFGVDKCAVMHVKRGGIVESAGTQLSDSIYLRSLSSTETYKYLGMSEALGINTADMKQSLKERFFGRLNKVLNSLLSGGNKVRAFNSWVMPVLMYSFGILKWTQTELDALDRRVRTLLTANRMHHPRSSVMRLYISRKCGGRGFLNAKTLHNREVCSLREYFLEADVGIHRDVVAMDKALTPLSLANENWRKPIVLDTTDRMEIWKSKELHGRFYRVLHGPDVDLSASVSWLRFGDLFGETEGFVCAIMDEVIMTNNYRKYIVKDGTVDICRACHRSGESIRHIISGCSRLANGDYLHRHNLVAKIIHQQLALKYNLVESEVPYYKYVPDPVLENGNITLYWDRSIITDRTIVANKPDIVVIDRLERRTMIVDITVPHDENLVKAEKEKQIKYLDLAREVVDMWDVNTAVIVPIVVTANGIIAKSLDQHLRRLSLGSWIKGLIQKAVLLDTARIVRRFLSQEP

SEQ ID NO: 12428 - protein, 1197 aa, Xestia xanthographa
MLTRSAAARRARLPPPDSSLSSASPPPEPSPIVSAVTPAVAVASSSSDEYFSPPTTPPPARRRGGHRPPDGLGPRGPPASDRVPAPGGSVQRMRWTQSINENVMRAYYGATEGGNNLTAYRVRMLSLFQVLEPAVNVSAQRLSDQVRVIQRNRMLDDTVLDRLRTEIQSNHVIVTPSQAVVPPQSSIIPCDNDVSNDMVTNVSTQCNVEMRSALEGAIREYRFMQPDLRPRIPRLPMHNRNRALVAVLDSQLSNYFDNCEDLTDVHSILYCAAVAACRVAHVKFPSDRATRPKPAVPAWQYRIERRIGGARALIGKLVCFREGNTRPRVMRFVRQAFSGTDISPRDYMSRVTERIDFLKQKVYAWANRIRRYKRRVDRYTQNRTFQKDERWVYRAWERPDQGVADTHLPDDDAMCSFWRSIWSVPVSHAEGEWTRVIERACDPISEMGAINISPQDVARAVRPLPNWKSPGPDGLHNFWIKWFTRSHARLATLFQSALESGSLPEFLTTGITHLLYKSGSTAEPKNYRPITCLPTVYKVLTSILRTKISKHIDDNSVMSASQNGCRNGSRGTKELLLIDMAISHQVRRSRKDLSTCWIDYKKAYDSVPHTWLMRVLELYKVDATLRTFLMSCMGQWRTVLRYPGCRQIQRNSEPIRIERGIFQGDSLSPLWFCLALNPLSTLLEDSGLGYRLRKDGQVISHLLYMDDLKLFAPNDLRLMELLKVTETFSNAIRMEFGVDKCAVMHVKRGEIVESVGTQLSDSITLRSLSATETYKYLGMSEALGVNVADMKQSLKERFFGRLKKVLNSLLSGGNKVRAFNGWVMPVLMYSFGILKWTQTELDALDTKVRKLLTAYRMHHPRSSVMRLYIPRKCGGRGFLNAKTLHNREICSLREYFLGTDVGMHRDVVTMDKAFTPLSLAKENWRKPPVLDTDDRREVWQSKELHGRFFRALHGPDVDLSASVAWLRSGDLFGETEGFVCAIMDEVMMTNNYRRFIVKDGTVDICRACHRPGESIRHIISGCSRLANGEYLHRHNLVARIIHQQLALKYNLVESEVPYYRYVPDPVLDNGCITLYWDQSIITDRTIVANKPDIVVVDRSERRAMIVDITVPHDENLVKAEKDKQIKYLDLAREVVDMWEVDSAIIVPIVVSAHGLIAKSLDQYLRRLSLGSWIKGLIQKAVLLDTARIVRRFLSLEP

SEQ ID NO: 12429 - protein, 1074 aa, Xestia xanthographa
MLSLFQVLEPAVNVSAQRLSDQVRVIQRNRMLDDTVLDRLRTEIQSNHVIVTPSQAVVPPQSSIIPCDNDVSNDMVTNVSTQCNVEMRSALEGAIREYRFMQPDLRPRIPRLPMHNRNRALVAVLDSQLSNYFDNCEDLTDVHSILYCAAVAACRVAHVKFPSDRATRPKPAVPAWQYRIERRIGGARALIGKLVCFREGNTRPRVMRFVRQAFSGTDISPRDYMSRVTERIDFLKQKVYAWANRIRRYKRRVDRYTQNRTFQKDERWVYRAWERPDQGVADTHLPDDDAMCSFWRSIWSVPVSHAEGEWTRVIERACDPISEMGAINISPQDVARAVRPLPNWKSPGPDGLHNFWIKWFTRSHARLATLFQSALESGSLPEFLTTGITHLLYKSGSTAEPKNYRPITCLPTVYKVLTSILRTKISKHIDDNSVMSASQNGCRNGSRGTKELLLIDMAISHQVRRSRKDLSTCWIDYKKAYDSVPHTWLMRVLELYKVDATLRTFLMSCMGQWRTVLRYPGCRQIQRNSEPIRIERGIFQGDSLSPLWFCLALNPLSTLLEDSGLGYRLRKDGQVISHLLYMDDLKLFAPNDLRLMELLKVTETFSNAIRMEFGVDKCAVMHVKRGEIVESVGTQLSDSITLRSLSATETYKYLGMSEALGVNVADMKQSLKERFFGRLKKVLNSLLSGGNKVRAFNGWVMPVLMYSFGILKWTQTELDALDTKVRKLLTAYRMHHPRSSVMRLYIPRKCGGRGFLNAKTLHNREICSLREYFLGTDVGMHRDVVTMDKGFTPLSLAKENWRKPPVLDTDDRREVWQSKELHGRFFRALHGPDVDLSASVAWLRSGDLFGETEGFVCAIMDEVMMTNNYRRFIVKDGTVDICRACHRPGESIRHIISGCSRLANGEYLHRHNLVARIIHQQLALKYNLVESEVPYYRYVPDPVLDNGCITLYWDQSIITDRTIVANKPDIVVVDRSERRAMIVDITVPHDENLVKAEKDKQIKYLDLAREVVDMWEVDSAIIVPIVVSAHGLIAKSLDQYLRRLSLGSWIKGLIQKAVLLDTARIVRRFLSLEP

SEQ ID NO: 12430 - protein, 1211 aa, Xestia xanthographa
MSPMLTRHRAKLQKEAHPPSPGSSLSSASQPPGHTTPVSTVSPVAAVASSSSDEFFSPPSTPSPPPRGRRRGRGRPPAGLGPRGQQAPSRVPAAGGNVSRMRWTQSINENVMRAYYGATEGGSNLTAYRGRMLSLFQVLEPAVSVEAQRLSDQVRVIQRNHMLDDTVLDRLRSESRSNRVTPASPMIAVQQQNIPSAPPRSDYDGEEDGDEVISVSTQCNAQLRSALESAFREYRSTPPELRPRLPRLPMHNKNKALMCALDSQLSNCFDSSKDLADTHSILYCGAVAACRVAHVKFPNNDRATRPKLAVPAWQCRIERRIGEARALIGKLICFREGNTRPRVMRFVRRAFSGTDISFRDYLARVTERIDSLKQKICAWASRIRRYKRRVERYTQNRTFQSDERWVYRAWERPDQGVTDTRLPDDNAMCSFWRNIWSVPVSHTEGDWTREVEQACDPIPEMGAIIISPQDVARAVRPLPNWKSPGPDGLHNFWIKWFQRSHARLASQFQSALESGSLPQFLTTGITHLLHKSGSTAEPKNYRPITCLPTVYKVLTSILRAKINQHIDSNSIMSASQNGCRNGSRGTKELLLIDMAISQQVRRSRKNLSTCWIDYKKAYDSVPHTWLMRVLELYKVDATLRAFLMSCMGQWRTVLRYPGCRQIQGNSEPIRIERGIFQGDSLSPLWFCLALNPLSTLLERSGLGYLLRRDGQVISHLLYMDDLKLFAPNNLQLMKLLKVTETFSSAIRMEFGVDKCAVMHVKRGEIMESVGTQLSDSIHLRSLSSTETYKYLGMSEALGINTADMKQSLRERFFGRLNKVLGSLLSGGNKVRAFNGWVMPVLMYSFGILKWTQTELDALDRRVRTLLTANRMHHPRSSVMRLYIPRKCGGRGFLNAKTLHNREVCSLREYFLEADGEMHRDVVSVDKGLTPLSLANENWRKPKVLNTSDRKEEWHGKELHGRFYRALHGPDVDFLASVSWLRFGDLFGETEGFVCAIMDEVMMTNNYRKYIVKDGTVDICRACHRPRESIRHIISGCSSLANGEYLHRHNLVARIIHQQLALKYNLVESEVPYYRYAPDPVLDNGNITLYWDRPITTDRTVVANRPDIVVIDRLERRAMIVDIAVPHDENLVKAEKDKQFKYLDLAREVVDMWDVNTAVIVPIVVSANGLIAKSLDQHLRRLSLGSWIKGLIQKAVLLDTARIVRRFLSQEP

SEQ ID NO: 12431 - protein, 1200 aa, Cosmia trapezina
MLTRSATRKARLPPPDSSLSSASPPPVPSLTVSAVSTPAAVVASSSSDEYFSPPTTPPPARRRGGRRPPDGLGPRGPPASDRVPAPGGSVQRMRWTRAINENVMRSYYGATEGGNNLTAYRVRMHSLFQVLEPALNVSAQRLSDQVRVIQRNHMLDDTVLDRLRNEIQSSRVIAPLSQTIVAPPPPQCNTTQADEGSDDTAANVSTQCNEELRSALEGAIQEYRFVSPELRPRLPRLPMHNKNRALVAALDSQLSNYFDDCEDLTDTHSILYCAAVAACRVAHVKFANDSRATRPKPAVPAWQCRIERRIGGARALIGKLICFREGNTRPRVMRFVKRAFSGTDVSPQDYMSRVTERIDFLRQKVYAWANRIRRYKRRVDRYTQNRTFQSDERWVYRGWERPDQGVTDTRLPDDDAMCSFWRSIWSVPVSHTEGDWAREVRRACDPIPEMGAITICPQDVARAVRPLPNWKSPGPDGLHNFWIKWFLGSHARLAAQYQSALQSGSLPQFLTTGITHLLHKSGSTTEPKNYRPITCLPTVYKVLTSILRAKINEHIDTNSIMSASQNGSRNGSRGTKELLLIDMAISQQVRRSRRDLSTCWIDYKKAYDSVPHTWLMRVLELYKVDATLRTFLMSCMGQWRTVLRYPGCRNIQRNSEPIRIERGIFQGDSLSPLWFCLALNPLSTLLENSGLGYRLRRGGQVISHLLYMDDLKLFAPSNLQLMELLKVTETFSSAIRMEFGVDKCAVMHVKRGEIVESVGTQLPDSINLRTLSAAETYKYLGMSEALGINVADMKQSLKERFFGRLKKVFNSLLSGGNKVRAFNGWVMPVLMYSFGILKWTQTELDALDRRVRTLLTAYRMHHPRSSVMRLYIPRKCGGRGFLNAKTLHNREICSLREYFLETDVGMHRDVVAVDKGLTPLSLAKENWRKPVVLDANDRMEVWQSKELHGRFFRALHGPDVNLLASVAWLRSGDLFGETEGFVCAIMDEVIMTNNYRRFIVKDGTVDICRACHRPGESIRHIISGCSRLANEEYLHRHNLVARIIHQQLALKYSLVESEVPYYRYVPDPVLENGHITLYWDRSIITDRTIVANKPDIVVVDRTERRAMIVDITVPHDGNLVKAEKDKQIKYIDLAREVVDMWDVDSAVIVPIVVSANGLIAKSLDQHLRRLSLGSWIKGLIQKAVLLDTARIVRRFLSLEP

SEQ ID NO: 12432 - protein, 1204 aa, Cosmia trapezina
MMQTRAKTRIQAHPPSPDSSLSSASQPVRASTVSAVSPVAAVASSSSDEFFSPPSSPTPPRRRGRGRPPAGLGPRGQPAPNRVPAAGGNVSRMRWTQSINENVMRAYYGATEGGINLTAYRGRMLSLFQVLEPAVNVSAQRLSDQVRVIQHNHRLDNATLDRLRSEMQSSSASNPPPSQNVMHVPAEIPLRANQRDEEENARAISADNLCNVEIRSALEDAIREYRFTSPDLRPRLPRLPMNKKNRALVCALDALLPNFIESSADLCDTHSILYCTAVAACRVACVKFPNTDRATRPKPAAPAWQCRIERRINEARVLIGKLICFREGNTRPRVMRFVRRAFSGTNVSPQEYVSRVTERIDFLKQKVYAWANRIRRYRRRVDRYSQNRMFQSDERWVYRAWERPIPTQGVTDVRPPDNETMSAFWRSIWSVPVSHTEGDWMRIVEQACDSIPNMDAVTISPLDVACAVRPLPNWKSPGPDGLHNFWIKWLQRSHACLASQFQSSLETGSLPLLFTTGVTHLLHKSGSTAEPKNYRPITCLPTVYKVLTSILRAKIAHHIYNNSIMSVSQNGCRNGSRGTKELLLIDMTISQQVRRSRKDLSTCWIDYKKAYDSVPHTWLIRVLELYKIDATLRTFLMSCMGQWKTVLLYPGCRRIPGIDEPIRIERGIFQGDSLSPLWFCLALNPLSTLLEDSGLGYRLRRGGQVISHLLYMDDLKLFAPNNLRLMELLKVTENFSSAIRMEFGVDKCAVMHVKRGEIMESVGTQLSDSIHLRSLSSTETYKYLGMSEALGINVADMKQSLKERFFGRLKKVFNSLLSGGNKVRAFNGWVMPVLMYSFGVLKWTQTELDALDRRVRTLLTAYRMHHPRSSVMRLYIPRKCGGRGFLNAKTLHNREICSLREYFLEADVGMHRDVVAVDKGLTPLSLAKENWRKPAVLDTNDRREVWQGKELHGRFFRALHGPDVDFLASVSWLRYGDLFGETEGFVCAIMDEVIMTNNYRKYIVKDGTVDICRACHHPGESIRHIVSGCSRLANGEYLHRHNLVARIIHQQLALQYNLVESEVPYYRYVPDPVLENGQATLYWDRSIITDRTIVANKPDIVVIDRRERRAIIVDIAVPHDENLVKAEKDKKIKYLDLAHEVVDMWDVDSAIIVPIIVTVNGLIAQSLDQHLRRLSLRGWIKGLIQKAVLLDTARIVRRFLSLEP

SEQ ID NO: 12433 - protein, 1204 aa, Cosmia trapezina
MMQTRAKTRIQAHPPSPDSSLSSASQPVRASTVSAVSPIAAVASSSSDEFFSPLSSPTPPRRRGRGRPPAGLGPRGQPAPNRVPAAGGNVSRMRWTQSINENVMRAYYGATEGGINLTAYRGRMLSLFQVLEPAVNVSAQRLSDQVRVIQHNHRLDNATLDRLRSEMQSSSASNPPPSQNVMHVPAEIPLRANQRDEEENARAISADNLCNVEIRSALEDAIREYRFTSPDLRPRLPRLPMNKKNRALVCALDALLPNFIESSADLCDTHSILYCTAVAACRVACVKFPNTDRATRPKPAAPAWQCRIERRINEARVLIGKLICFREGNTRPRVMRFVRRAFSGTNVSPQEYVSRVTERIDFLKQKVYAWANRIRRYRRRVDRYSQNRMFQSDERWVYRAWERPIPTQGVTDVRPPDNETMSAFWRSIWSVPVSHTEGDWMRIVEQACDSIPNMDAVTISPLNVACAVRPLPNWKSPGPDGLHNFWIKWLQRSHACLASQFQSSLETGSLPLLFTTGVTHLLHKSGSTAEPKNYRPITCLPTVYKVLTSILRAKIAHHIYNNSIMSVSQNGCRNGSRGTKELLLIDMTISQQVRRSRKDLSTCWIDYKKAYDSVPHTWLIRVLELYKIDATLRTFLMSCMGQWKTVLLYPGCRRIPGIDEPIRIERGIFQGNSLSPLWFCLALNPLSTMLEDSGLGYRLRRGGQVISHLLYMDDLKLFAPNNLRLMELLKVTENFSSAIRMEFGVDKCAVMHVKRGEIMESVGTQLSDSIHLRSLSSTETYKYLGMSEALGINVADMKQSLKKRFFGRLKKVFNSLLSGGNKVRAFNGWVMPVLMYSFGVLKWTQTELDALDRRVRTLLTAYRMHHPRSSVMRLYIPRKCGGRGFLNAKTLHNREICSLREYFLEADVGMHRDVVAVDKGLTPLSLAKENWRKPAVLDTNDRREVWQGKELHGRFFRALHGPDVDFLASVSWLRFGDLFGETEGFVCAIMDEVIMTNNYRKYIVKDGTVDICRACHHPGESIRHIVSGCSRLANGEYLHRHNLVARIIHQQLALQYNLVESEVPYYRYVPDPVLENGQATLYWDRSIITDRTIVANKPDIVVIDRRERRAIIVDIAVPHDENLVKAEKDKKIKYLDLAHEVVDMWDVDSAIIVPIIVTVNGLIAQSLDQHLRRLSLRGWIKGLIQKAVLLDTARIVRRFLSLEP

SEQ ID NO: 12434 - protein, 1116 aa, Mamestra brassicae
MSDEYFSPRMRWTQTINENVMRSYYGATEGGTNLTAYRGRMLSLFQVLEPAVNVSAQRLSDQVRVILRNRMLDDAVLDRLRLESRSGRVSPASPPAAVQIQSSISPRSNNVGEDDDDGAISVSTQCNERLRSALEDAFREYRSTPPELRPRLPRLPMHNKNRALVCALDSQLTNCFDSSEDLADTHSILYCAAAAACRVAHVKFLNSDRATRPAVPAWQCRIERRIGEARALIGKLICFREGNTRRRVMRFVRRAFSGTDTSPRDYLTRVTERIDFLKQKIYAWANRIRRYKRRVERYTQNRTFQSNERWVYRAWERPDQGVTDTRLPDDDIMCSFWRNIWSVPVSHTEGDWIREVERACDPILEMGATTISPQDVARAVRPLPNWKSPGPDGLHNFWIKWFTGSHARLASQFQSALESGSLPQFLTTGITHLLHKSGSTAEPKNYRPITCLPTVYKVLTSILRAKINHHIESNSIMSASQNGCRNGSRGTKELLLMDIAISQQVRRSRKDLSTCWIDYKKAYDSVPHTWLMRVLELYKVDAVLRTFLMSCMGQWRTVLRYPGCRQIQVNGDPIRIERGIFQGDSLSPLWFCLALNPLSTLLEGSGQGYRLRRGGQVISHLLYMDDLKLFAPNNLQLMELLKVTETFSSAISMEFGVDKCAVMHVKRGEIMESVGTQLSDSIHLRSLSSTETYKYLGMSEALGINANDMKQSLKERFFGRLNKVLNSLLSGGNKVRAFNGWVMPVLMYSFGILKWTQTELDALDRRVRSLLTANRMHHPRSSVMRLYIPRKCGGRGFLNAKTLHNREICSLREFFLEADVGMHRDVVAVDKGLTALSLANENWRKPVVLDTNDRRKVWQSKELHGRFYRVLHGPDVDFLASVAWLRFGDLFGETEGFVCAIMDEVMMTNNYRKYIVKDGTVDICRACHRPGESIRHIISGCSSLANGDYLHRHNLVARIIHQQLALKYNLVESEVPYYRYVPDPVLENGNCTLYWDRSIITDRTIVANKPDIVVIDRLERRAMIVDIAVPHDENLVKTEKDKQTKYLDLAREVVDMWDVNTAVIVPIVVTANGIIAKSLDQHLKRLSLGSWIKGLIQKAVLLDTARIVRRFLSQGP

SEQ ID NO: 12435 - protein, 1198 aa, Noctua fimbriata
MLTRSAAARRARLLSPDPPLSSASPPPESSPIVSAVTPAVAVASSSSDEYFSPPTTPPPVRRRGGRRPPDGLGPRGPPASDRVPAPGGSVQRMRWTQSINENVMRSYYGATEGGNNLTAYRVRMLSLFQVLEPAVNVSAQRLSDQVRVIQRNRMLDDTVLDRLRTEMQSSHVITPSAQAVVLPQSSTITNRDNDVSNDMVTNVSTQCNEEMRSALEGAIREYRFMQPDLRPRIPRLPMHNKNRALVAVLDSQLSNYFDNCEDLTDAHSILYCAAVAACRVAHVKFFDDRATRPKPVVPPWQYRIERRIGGARALIGKLICFREGNTRPRVMRFVRRAFSGTDISPRDYMSRITERIDFLKQKVYAWASRIRRYKRRVDRYTQNRTFQRDERWLYRTWERPDQGVADTRIPDDDAMCSFWRSIWSVPVSHTEGEWTREVERACDLVPEMGAITISPQDVVRAVRPLPNWKSPGPDGLHNFWIKWFTRSHARLAILFQSALESGSLPEFLTTGITHLLHKSGSTAEPKNYRPITCLPTVYKVLTSILRAKINKHIDDNSIMSASQNGCRNGSRGTKELLLIDMAISQQVRRSRRDLSTCWIDYKKAYDSVPHTWLMRVLELYKVDATLRTFLMSCMGQWRTVLRYPGCRQIQRNSEPIRIERGIFQGDSLSPLWFCLALNPLSTLLEDSGLGYQLRRGGQVISHLLYMDDLKLFAPNDLQLMELLKVTETFSSAIRMEFGVDKCAVMHVKRGEIVESVGTQLSDSINLRSLSATETYKYLGMSEALGINVADMKQSLKERFFGRLKKVFNSLLSGGNKVRAFNGWVMPVLMYSFGILKWTQTELDALDRRVRTLLTAYRMHHPRSSVMRLYIPRKCGGRGFLNAKTLHNREICSLREYFLETDVGMHRDVVAMDKGLTPLSLAKENWRKPLVLDTNDRMEVWQSKELHGRFFRALHGPDVDLSASVAWLRSGNLFGETEGFVCAIMDEVMMTNNYRRFIVKDGTVDICRACHRPGESIRHIISGCSRLANGEYLHRHNLVARIIHQQLALKYNLVESEVPYYKYVPDPVLENGSITLYWDQSIITDRTIVANKPDIVVVDRSERRTMIVDITVPHDENLVKAEKDKKIKYLDLAREVVDMWDVDSAIIVPIVVSAHGLIAKSLDQYLRRLSLGSWIKGLIQKAVLLDTARIVRRFLSLEP

SEQ ID NO: 12436 - protein, 1198 aa, Noctua fimbriata
MLTRAAAKRARLSPPDPSLSSASPPPESSPVMSAVTPAVAVASSSSDEYFSPPTTPPPVRRRGGRRPPDGLGPRGPPASDRVPAPGGSVQRMRWTQSINENVMRSYYGATEGGNNLTAYRVRMLSLFQVLEPAVNVSAQRLSDQVRVIQRNRMLDDTVLDRLRTEMQSSHVIATPPPQAVVPPQSTIIPNRDNDVSNDIVTNVSTQCNEEMRSALEGAIREYRFMQPDLRPRIPRLPMHNKNRALVAVLDSQLSNYFDNCEDLTDAHSILYCAAVAACRVAHVKFSNDRATRPKPAVPPWQYRIERRIGGARALIGKLICFREGNTRPRVMRFVRRAFSGTDISPRDYMSRITERIDFLKQKVYAWANRIRRYKRRVDRYTQNRTFQRDERWVYRAWERPDQGVADTRLPDDDAMCSFWRSIWSVPVSHTEGEWTQGVERACDLVPEMGAITISPQDVVRAVRPLPNWKSPGPDGLHNFWIKWFTRSHARLAILFQSALESGSLPEFLTTGITHLLHKSGSTAEPKNYRPITCLPTVYKVLTSILRAKINKHIDDNSIMSASQNGCRNGSRGTKELLLIDMAISQQVRRSRRDLSTCWIDYKKAYDSVPHTWLMRVLELYKVDATLRTFLMSCMGQWRTVLRYPGCRQIQRNSEPIRIERGIFQGDSLSPLWFCLALNPLSTLLEDSGLGYRLRRGGQVISHLLYMDDLKLFAPNDLQLMELLKVTETFSSAIRMEFGVDKCAVMHVKRGEIVESVGTQLSDSINLRSLSATETYKYLGMSEALGINVADMKQSLKERFFGRLKKVFNSLLSGGNKVRAFNGWVMPVLMYSFGILKWTQTELDALDRRVRTLLTAYRMHHPRSSIMRLYIPRKCGGRGFLNAKTLHNREICSLREYFLETDVGMHRDVVAVDKGLTPLSLAKENWRKPLVLDTNDRMEVWQSKELHGRFFRALLGPDVDLSASVAWLRSGDLFGETEGFVCAIMDEVMMTNNYRRFIVKDGTVDICRACHRPGESIRHIISGCSRLANGEYLHRHNLVARIIHQQLALKYNLVESEVPYYKYVPDPVLENGSITLYWDQSIITDRTIVANKPDIVVVDRSERRTMIVDITVPHDENLVKAEKDKKIKYLDLAREVVDMWDVDSAIIVPIVVSAHGLIAKSLDQYLRRLSLGSWIKGLIQKAVLLDTARIVRRFLSLEP

SEQ ID NO: 12437 - protein, 1198 aa, Noctua fimbriata
MLTRSAARRARLSPPDPSLSSASPPPESSPVVSAVTPAVAVASSSSDEYFSPPTTPPPVRRRGGRRPPDGLGPRGPPASDRVPAPGGSVQRMRWTQSINANVMRAYYGATEGGNNLTAYRVRMLSLFQVLEPAVNVSAQRLSDQVRVIQRNRMLDDTVLDRLRTEMQSSHVIATPPPQAVVPPQSTIIPNRDNGVSNDMVTNVSTQCNEEMRSALEGAIREYRFMQPDLRPRVPRLPMHNKNRALVAVLDSQLSNYFDNCEDLTDAHSILYCAAVAACRVAHVKFYDDRATRPKPVVPPWQYRIERRIGGARALIGKLICFREGNTRPRVMRFVRRAFSGTDISPRDYMSRITERIDFLKQKVYAWASRIRRYKRRVDRYTQNRTFQRDERWVYRAWERPDQGVADTRIPDDDAMCSFWRSIWSVPVSHTEGEWTREVERACDLVPEMGAITISPQDVVRAVRPLPNWKSPGPDGLHNFWIKWFTRSHARLAILFQSALESGSLPEFLTTGITHLLHKSGSTAEPKNYRPITCLPTVYKVLTSILRAKINKHIDDNSIMSASQNGCRNGSRGTKELLLIDMAISQQVRRSRSDLSTCWIDYKKAYDSVPHTWLMRVLELYKVDATLRTFLMSCMGQWRTVLRYPGCRQIQRNSEPIRIERGIFQGDSLSPLWFCLALNPLSTLLEDSGLGYRLRRGGQVISHLLYMDDLKLFAPNDLQLMELLKVTETFSSAIRMEFGVDKCAVMHVKREEIVESVGTQLSDSINLRSLSATETYKYLGMSEALGINVADMKQSLKERFFGRLKKVFNSLLSGGNKVRAFNGWVMPVLMYSFGILKWTQTELDALDRRVRTLLTAYRMHHPHSSVMRLYIPRKCGGRGFLNAKTLHNREICSLREYFLETDVGMHRDVVAVDKGLTPLSLAKENWRKPLVLDTNDRMEVWQSKELHGRFFRALHGPDVDLSASVAWLRCGDLFGETEGFVCAIMDEVMMTNNYRRFIVKDGTVDICRACHRPGESIRHIISGCSRLANGEYLHRHNLVARIIHQQLALKYNLVESEVPYYKYVPDPVLENGSITLYWDQSIITDRTIVANKPDIVVVDRSERRTMIVDITVPHDENLVKAEKDKKIKYLDLAREVVDMWDVDSAIIVPIVVSAHGLIAKSLDQYLRRLSLGSWIKGLIQKAVLLDTARIVRRFLSLEP

SEQ ID NO: 12438 - protein, 962 aa, Atethmia centrago
MHKKNRALVAALDSQLSNYFDDCEDLTDTHSILYCAAVAVCRVAHVKFAKDSRTTRPKPTVPAWQCRIESRIGGARALIGKLICFREGNTRPRVMRFVRRAFSGTDIGPQDYMTRVTERIDFLKQKVYAWANRIRRYKRRVERYTQNRTFQSDERWVYRGWERPDQDVTDTRLPDDDVMCSFWRSIWSVPVSHTEGDWAQKVERACDPIPEMGAITICPQDVARAVRPLPNWKSPGPDGLHNFWLKWFLRSHARLAAQYQTALESGSLPQFLTTGVTHLLHKSGSTAEPKNYRPITCLPTVYKLLTSILRAKINKHIDTNSIMSASQNGCRNGSRGTKELLLIDMTISQQVRRSRKDLSTCWIDYKKAYDSVPHTWLMRVLELYKVDATLRTFLISCMGQWRTVLRYPGCRNIQRNSEPIRIERGIFQGDSLSPLWFCLALNPLSTLLEDSGLGYRMRRGGQVISHLLYMDDLKLFASNNLQLMELLKITESFSSAIRMEFGVDKCAVMHVKRGKIVESVGTQLSDSINLRTLSASETYKYLGMSEALGINVTDMKQSLKERFFGRLKKVFNSLLSGGNKVRAFNGWVMPVLMYSFGILKWTQTELDALDRRVRTLLTAYRMHHPRSSVMRLYIPRKCGGRGFLNAKILHNREVCSLREYFLEADVGMHRDVVAVDKGLTPLSLAKENWRKLVVLDTNDRREVWQSKELHGRFFRALHEPDVDFQASVAWLRFGDLFGETEGFVCAIMDEVIMTKNYRRFIVKDGTVDVCRACHRPGESIRHIISGCSRLANEEYLHRHNLVARIIHQQLALKYSLVESEVPYYRYVPDPVLDNGNITLYWDRSIITDRTIVANKPDIVVVDRTERRAMIVDITIPHDGNLVKAEKDKQIKYLDLAREVVDMWDVDSAIIVPIVVSANGLIAKSLDQHLKRLTLDGWIKGLIQKAVLLDTARIVRRFLSLEP

SEQ ID NO: 12439 - protein, 868 aa, Atethmia centrago
MRFVRRAFSGTDIGPQDYMTRVTERIDFLKQKVYAWANRIRRYKRRVERYTQNRTFQSDERWVYRGWERPDQDVTDTRLPDDDVMCSFWRSIWSVPVSHTEGDWARKVERACDPIPEMGAITICPQDVARAVRPLPNWKSPGPDGLHNFWLKWFLRSHARLAAQYQTALESGSLPQFLTTGVTHLLHKSGSTAEPKNYRPITCLPTVYKLLTSILRAKINKHIDTNSIMSASQNGCRNGSRGTKELLLIDMTISQQVRRSRKDLSTCWIYYKKAYDSVPHTWLMRVLELYKVDATLRTFLISCMGQWRTVLRYPGCRNIQRNSEPIRIERGIFQGDSLSPLWFCLALNPLSTLLEDSGLGYRMRRGGQVISHLLYMDDLKLFASNNLQLMELLKITESFSSAIRMEFGVDKCAVMHVKRGKIVESVGTQLSDSINLRTLSASETYKYLDMSEALGINVTDMKQSLKERFFGRLKKVFNSLLSGGNKVRAFNGWVMPVLMYSFGILKWTQTELDALDRRVRTLLTAYRMHHPRSSVMRLYIPRKCGGRGFLNAKILHNREVCSLREYFLEADVGMHRDVVAVDKGLTPLSLAKENWRKLVVLDTNDRREVWQSKELHGRFFRALHEPDVDFQASVAWLRFGDLFGETEGFVCAIMDEVIMTKNYRRFIVKDGTVDVCRACHRPGESIRHIISGCSRLANEEYLHRHNLVARIIHQQLALKYSLVESEVPYYRYVPDPVLDNGNITLYWDRSIITDRTIVANKPDIVVVDRTERRAMIVDITVPHDGNLVKAEKDKQIKYLDLAREVVDMWDVDSAIIVPIVVSANGLIAKSLDQHLKRLTLDGWIKGLIQKAVLLDTARIVRRFLSLEP

SEQ ID NO: 12440 - protein, 1194 aa, Atethmia centrago
MLTRSAARARLPPPDFSLSSASPPPVPNPSVTSPAAVVASSSSDEYFSPPTTPPPVRRRGGHRPPDGLGSRGPPASDRVPAPGGSVQRMRWTRSINENVMRSYYGATEGGNNLTAYRVRMLSLFQVLEPAVNVSAQRLSDQVRVIQRNHMLDDTVLDRLRSETQSGHAIAPPSQTVVVSTQLRTNQADEGSDDRATNVNTQYNVELRSALEDAIREYRIMSPELRPRLPRLPMHKKNRALVAALDSQLSNYFDDCEDLTDTHSILYCAAVAVCRVAHVKFAKDSRATRPKPTVPAWQRRIERRIGGARALIGKLICFREGNTRPRVMRFVRRAFSGTDIGPQDYMSRVTERIDFLKQKVYAWANRIRRYKRRVERYTQNRTFQSDERWVYRGWERPDQGVTGTRLPDDDVMCSFWRSIWSVPVSHTEGDWVREVERACDPIPEMGAITISPQDVARAVRPLPNWKSPGPDGLHNFWLKWFLRSHARLAAQYQTALESGSLPQFLTTGVTHLLHKSGSTVEPKNYRPITCLPTVYKVLTSILRAKINEHIDTNSIMSASQNGCRNGSRGTKELLLIDITITQQVRHSRKDLSTCWIDYKKAYDSVPHTWLMRVLELYKVDATLRTFLMSCMGQWRTVLRYPGCRNIQRNSEPIRIERGIFQGDSLSPLWFCLALNPLSTLLEDSGLGYRLRRGSQAISHLLYMDDLKLFASNNLQLMELLKITETFSSAIRMEFGVDKCAVMHVKRGKIMESVGTQLSDSINLRALSASETYKYLGMSEALGINVTDMKQSLKERFFGRLKKVFNSLLSGGNKVRAFNGWVMPVLMYSFGILKWTQTELDALDRRVRTLLTAYRMHHPRSSVMRLYIPRKCGGRGFLNAKTLHNREVCSLREYFLKADVGMHRDMVAVDKGLTPLSLAKENWRKLVVLDTNDRREVWQSKELHGRFFRALHEPDVDFQASVAWLRFGDLFGETEGFVCAIMDEVIMTKNYRRFIVKDGTIDVCRACQRPGESIRHIISGCSRLANEEYLHRHNLVARIIHQQLALKYNLVESEVPYYRYVPDPVLENGNITLYWDRSIITDRTIIANKPDIVVVDRTERRAMIVDITVPHDGNLVKAEKDKQIKYLDLAREVVDMWDVNSAIIVPIVISANGLIAKSLDQHLRRLSLDSWIKGLIQRAVLLDTARIVRRFLSLEP

SEQ ID NO: 12441 - protein, 1198 aa, Mesoligia furuncula
MLTRSALRKARLPPPDSSLSSASPPPVPSLTVSAVTTPAAAVASSSSDEYFSPPTTPPPARRRGGRRPPDGLGPRGPPASDRVPAPGGSVQRMRWTQSINENVMRSYYGATEGGNNLTAYRVRMLSLFQVLEPTVNVSAQRLSDQVRVIQRNHMLDDTVLDRLRNEMQSSHVIAPQSQTAVVLPQSNTSHADEGSNDRATNVSTQCNEELRSTLEDAIQEYRFMSPELRPRLPRLPMHNKNRALVAVLDSQLSNYFDGCEDLTDTHSILYCAAVAACRVAHVKFANDSRATRPKPAVPAWQCRIERRIGEARALIGKLTCFREGNTRPRVMRFVRRAFLGTDISPQDYMSCVTERIDFLKQKVYAWANRIRRYKRRVERYTQNRTFQSDQRWVYRDWERPDQSVTDACLPDDDAMCSFWRSIWSVPVSHTESDWTREVERACDRIPEMGAITIYPQDVARAVRPLPNWKSPGPDGLHNFWIKWFTRSHARLASQFQTALESGSLPQFLTTGITHLLHKSGSTAEPKNYRPITCLPTVYKVLTSILRVKIDKHINTNSIMSASQNGCRNGSRGTKELLLIDMTISQQVRRFRKDLSTCWIDYKKAYDSVPHTWLMRVLGLYKVDTTLRTFLMSCMGQWRTVLRYPGCRNIQRNSEPIRIERGIFQGDSLSPLWFCLALNPLSTLLEDSGLGYRLRRGGQVISHLLYMDDLKLFAPNNLQLMELLKITETFSSAIRMEFGVDKCAVMHVKRGEIVESVGTQLSDSTNLRALSASETYKYLGMSEALGINVTDMKQSLKERFFGRLKKVFNSLLSGGNKVRAFNGWVMPVLMYSFGILKWTQTELDALDRKVRTLLTANRMHHPRSSVMRLYIPRKCGGRGFLNAKTLHNREICSLREYFLETDVGMHRDVVAVDKGLTPLSLGKENWRKPVVLDTNDRMEVWQSKELHGRFFRVLHGPDVDLLASVAWLRFGDLFGETEGFVCAIMDEVMMTNNYRRFIVKDGTVDICRACHRPGESIRHIISGCSRLANGEYLHRHNLVARIIHQQLALKYSLVESEVPYYRYVPDPVLENGNITLYWDRSIITDRTIIANKPDIVVVDRSERRAMIVDITVPHDENLVKAEKDKQIKYLDLAHEVVDMWDVDSAIIVPIVVTANGLIAKSLDQHLKRLSLGSWIKGLIQKAVLLDTARIVRRFLSLEP

SEQ ID NO: 12442 - protein, 1198 aa, Mesoligia furuncula
MLTRLAAKRARLLPPDSSLSSASPPPVPSPTVSAVMTPAAAVASSSSDEYFSPPTTPPPARRRRGRRPPDCLGLRGPPASDRVPAPGGSVQRMRWTQSINENVMRSYYGATEGGNILTAYRVRMLSLFQVLEPAVNVSAQRLSDQVRVIQRNHMLDDTVLDRLRSEMQSSHVIAPQSQTAVILPQPNISHADEGSNDRAINVSTQCNEELRSALEDAIQEYRFMSPELRPRLPRLPMHNKNRALVAALDSQLSKYFDTCEDLIDTHSILYCAAVAACRVAHVKFANDSRATRPKQAVPAWQCRIERRIGGARTLIGKLICFREGNTRPRVMRFVRRAFSGTDISPQDYMSCVTERIDLLKQKVYAWANRIRRYRRRVERYTQNRTFQSDERWVYRGWERPDQGVAETCLPDDDAMCSFWRNIWSVPVSHTEGDWAREVERACDPIPEMGAITICPQDVARAVRPLPNWKSPGPDGLHNFWIKWFPRSHARLASQFQTALKSGSLPQFLTTGITHLLHKSGSTAEPKNYRPITCLPTVYKVLTSVLRTKINKHIDTNSIMSASQNGCRNGSRGTKELLLIDMAISQQVRRFRKDLSTCWIDYKKAYDSVPHTWLMRVLELYKVDTTLRTFLMSCMGQWRTVLRYPGCRNIQRNSEPIRIERGIFQGDSLSPLWFCLALNPLSTLLEDSGLGYRLRRGGQVISHLLYMDDLKLFAPNNFQLMELLKITETFSSAIRMEFGVDKCAVMHVKRGEIVESVGTQLSDSTNLRALSASETYKYLGMSEALGINVTDMKQSVKERFFGRLKKVLNSLLSGGNKVRAFNGWVMPVLMYSFGILKWTQTELDALDRRVRTLLTANRMHHPRSSVMRLYISRKCGGRGFLNAKTLHNREICSLREYFLETDVGMHRDVVIVDKGLTPLSLAKENWRKPVVLDTNDRMEVWQSKELHGRFLRALRGPDVDLQASVAWLRFGNLFGETEGFVCAIMDEVMMTNNYRRFIVKDGTVDICRACHRPGESIRHIISGCSRLANGEYLHRHNLVARIIHQQLALKYNLVESEVPYYRYVPDPVLENGNITLYWDRSIITDRTIVANKPDIVVVDRSERRAMIVDITVPHDENLVKAEKDKQIKYLDLAREVVDMWDVDTAIIVPIVVTANGLIAKSLDQHLRRLSLGSWIKGLIQRAVLLDTARIVRRFLSLEP

SEQ ID NO: 12443 - protein, 1207 aa, Mesoligia furuncula
MLTRSRARQLNKTTHPTSSGSSLSSASPLPEPAPDGGPETPAAAVASSSSDEYFSPPTTPPPPVCRRGRGRPPASLGLRGPPASDRVPAPGGSVQRMRWTQTVNENVMRAYFGATEGGSNLTAYRGRMLSLFQVLEPAINVSAQRLSDQVRVILRNHMLDNVVLDRLRLESRNSHVTSASSSVAVQLQNLPNVSQRPDRVDVEDGDEAISVSPQCNSRLRSALEDAFCEYRSVPPGLRPRLPRLPMHKKNKALVCALDSQLSNYFNDSKDLTDTHSILYCAAVAACRVAHVKFPNSDRAPRPKPAVPAWQCRIECRIGEARALIGKLICFREGNTRPRVMRFVRRAFSGTDISSRDYLSRVTERIDFLKQKICAWANRIRRYRRRVERYTQNRTFQSDERWVYRTWERPDHGVTDTRLPDDDAMCSFWRNIWSVPVSHTKGDWTRKIERTCDLLPEMGVLTISPQDVARAVRPLPNWKSPGPDGLHNFWIKWFQGSHARLASQFQSALESGSLPKFLTTGITHLLHKSGSTADPKNYRPITCLPTVYKVLTSILRAKINKHIDTNSIMSVSQNGCGNGSRGTKELLLIDMTISQQVRRFRKDLSTCWIDYKKAYDSVPHTWLMRVLELYKVDTTLRTFLMSCMGQWRTVLRYPGCRNIQRNSEPIRIERGIFQGDSLSPLWFCLALNPLSTLLEDSGLGYRLRRGGQVISHLLYMDDLKLFAPNNLQLMELLKITETFSSAIRMEFGVDKCAVMHVKRGEIVESVGTQLSDSTNLRALSASETYKYLGMSEALGINVTDMKQSLKERFFGRLKKVFNSLLSGGNKVRAFNGWVMPVLMYSFGILKWTQTELDALDRKVRTLLTANRMHHPRSSVMRLYIPRKCGGRGFLNAKTLHNREICSLREYFLETDVGMHRDVVAVDKGLTPLSLGKENWHKPVVLDTNDRMEVWQSKELHGRFFRALHGPDVDLIASVAWLRFGDLFGETEGFVCAIMDEVMMTNNYRRFIVKDGTVDICRACHRPGESIRHIISGCSRLANGEYLHRHNLVARIIYQQLALKYSLVESEVPYYRYVPDPVLENGNITLYWDRSIITDRTIVTNKPDIVVVDRSERRAMIVDITVPHDENLVKAEKDKQVKYLDLAREVVDMWDVDSAIIVPIVVTANGLIAKSLDQHLKRLSLGSWIKGLIQKAVLLDTARIVRRFLSLEP

SEQ ID NO: 12444 - protein, 962 aa, Mesoligia furuncula
MHKKNKALVCALDSQLSNCFNNSKDLTDTHSILYCAAVAACRVAHVKFPNSDRAPRPKPAVPAWQCRIECRIGEARALIGKLICFREGNTRPRVMRFVRRAFSGTDISSRDYLSRVTERIDFLKQKIYAWANRIRRYRRRVERYTQNRTFQSDERWVYRAWERPDHGVTDTRLPDDGAMCSFWRNIWSVPVSHTEGDWTAKIERACDLIPEMGVLTISPQDIARAVRPLPNWKSPGPDGLHNFWIKWFQGSHARLASQFQSALESGSLPQFLTTGITHLLHKSGSTADPKNYRPITCLPTVYKVLTSILKAKINKHIDTNSIMSVSQNGCKNGSRGTKELLLIDMTISQQVRRFRKDLSTCWIDYKKAYDSVPHTWLMRVLELYKVDTTLRTFLMSCMRQWRTVLRYPGCRNIQRNSEPIRIERGIFQGDSLSPLWFCLALNPLSTLLEDSGLGYRMRRGGQAISHLLYMDDLKLFAPNNLQLMELLKITETFSSAIRMEFGVDKCAVMHVKRGVIVESVGIQLSDSTNLRALSASETYKYLGMSEALAINVTDMKQSLKERFFGRLKKVFNSLLSGGNKVRAFNGWVMPVLMYSFGILKWTQTELDALDRKVRTLLTANRMHHPRSSVMRLYIPRKCGGRGFLNVKTLHNREICSLREYFLETDVGMHRDVVAVDKGLTPLSLGKENWRKPVVLDTNDRMEVWQSKELHGRFFRALHGPDVDLIASVAWLRFGDLFGETEGFVCAIMDEVMMTNNYRRFIVKDGTVDICRACHRPGESIRHIISGCSRLANGEYLHRHNLVARIIHQQLALKYSLVESEVPYYRYVPDPVLENGNITLYWDRAIITDRTIVANKPDIVVVDRSERRAMIVDITVPHDENLVKAEKDKQVKYLDLAREVVDMWDVDSAIIVPIVVTANGLIAKSLDQHLKRLSLGSWIKGLIQKAVLLDTARIVRRFLSLEP

SEQ ID NO: 12445 - protein, 1198 aa, Mesoligia furuncula
MLTRSALRKARLPPPDSSLSSASPPPVPSLTVSAVTTPAAAVASSSSDEYFSPPTTPPPARRRGGRRPPDGLGPRGPPASDRVPAPGGSVQRMRWTQSINENVMRSYYGATEGGKNLTAYRVRMLSLFQALEPTVNVSAQRLSDQVRVIQRNHMLDDTVLDRLRNEMQSSHVIAPQSQTAVVLPQSNTSHADEGSNDRATNVSTQCNEELRSTLEDAIQEYRFMSPELRPRLPRLPMHNKNRALVAVLDSQLSNYFDGCEDLTDTHSILYCAAVAACRVAHVKFANDSRATRPKPAVPAWQCRIERRIGEARALIGKLTCFREGNTRPRVMRFVRRAFLGTDISPQDYMSCVTERIDFLKQKVYAWANRIRRYKRRVERYTQNRTFQSDQRWVYRDWERPDQSVTDTCLPDDDAMCSFWRSIWSVPVSHTESDWTREVERACDPIPEMGAITICPQDVARAVRPLPNWKSPGPDGLHNFWIKWFTRSHARLASQFQTALESGSLPQFLTTGITHLLHKSGSTAEPKNYRPITCLPTVYKVLTSILRVKIDKHINTNSIMSASQNGCRNGSRGTKELLLIDMTISQQVRRFRKDLSTCWIDYKKAYDSVPHTWLMRVLGLYKVDTTLRTFLMSCMGQWRTVLRYPGCRNIQRNSEPIRIERGIFQGDSLSPLWFCLALNPLSTLLEDSGLGYRLRRGGQVISHLLYMDDLKLFAPNNLRLMELLKITETFSSAIRMEFGVDKCAVMHVKRGEIVESVGTQLSDSTNLRALSASETYKYLGMSEALGINVTDMKQSLKERFFGRLKKVFNSLLSGGNKVRAFNGWVMPVLMYSFGILKWTQTELDALDRKVRTLLTANRMHHPRSSVMRLYIPRKCGGRGFLNAKTLHNREICSLREYFLETDVGMHRDVVAVDKGLTPLSLGKENWRKPVVLDTNDRMEVWQSKELHGRFFRALHGPDVDLLASVAWLRFGDLFGETEGFVCAIMDEVMMTNNYRRFIVKDGTVDICRACHRPGESIRHIISGCSRLANGEYLHRHNLVARIIHQQLALKYSLVESEVPYYRYVPDPVLENGNITLYWDRSIITDRTIIANKPDIVVVDRSERRAMIVDITVPHDENLVKAEKDKQIKYLDLAHEVVDMWDVDSAIIVPIVVTANGLIAKSLDQHLKRLSLGSWIKGLIQKAVLLDTARIVRRFLSLEP

SEQ ID NO: 12446 - protein, 1198 aa, Mesoligia furuncula
MLTRSALRKARLPPPDSSLSSASPPPVPSLTVSAVTTPAAAVASSSSDEYFSPPTTPPPARRRGGRRPPDGLGPRGPPASDRVPAPGGSVQRMRWTQSINENVMRSYYGATEGGNNLTAYRVRMLSLFQVFEPAVNVSAQRLSDQVRVIQRNHMLDDTVLDRLRNEMQSSHVIAPQSQTAVVLPQSNTSHADEGSNDRATNVSTQCNEELRSTLEDAIQEYRFMSPELRPRLPRLPMHNKNRALVAVLDSQLSNYFDGCEDLTDTHSILYCAAVAACRVAHVKFANDSRATRPKPAVPAWQCRIERRIGEARALIGKLTCFREGNTRPRVMRFVRRAFLGTDISPQDYMSCVTERIDFLKQKVYAWANRIRRYKRRVERYTQNRTFQSDQRWVYRDWERPDQSVTDACLPDDDAMCSFWRSIWSVPVSHTESDWTREVERACDPIPEMGAITICPQDVARAVRPLPNWKSPGPDGLHNFWIKWFTRSHARLASQFQTALETGSLPQFLTTGITHLLHKSGSTAEPKNYRPITCLPTVYKVLTSILRVKIDKHINTNSIMSASQNGCRNGSRGTKELLLIDTTISQQVRRFRKDLSTCWIDYKKAYDSVPHTWLMRVLGLYKVDTTLRTFLMSCMGQWRTVLRYPGCRNIQRNSEPIRIERGIFQGDSLSPLWFCLALNPLSTLLEDSGLGYRLRRGGQVISHLLYMDDLKLFAPNKLQLMELLKITETFSSAIRMEFGVDKCAVMHVKRGEIVESVGTQLSDSTNLRALSASETYKYLGMSEALGINVTDMKQSLKERFFGRLKKVFNSLLSGGNKVRAFNGWVMPVLMYSFGILKWTQTELDALDRKVRTLLTANRMHHPRSSVMRLYIPRKCGGRGFLNAKTLHNREICSLREYFLETDVGMHRDVVAVDKGLTPLSLGKENWRKPVVLDTNDRMEVWQSKELHGRFFRALHGPDVDLLASVAWLRFGDLFGETEGFVCAIMDEVMMTNNYRRFIVKDGTVDICRACHRPGESIRHIISGCSRLANGEYLHRHNLVARIIHQQLALKYSLVESEVPYYRYVPDPVLENGNITLYWDRSIITDRTIIANKPDIVVVDRSERRAMIVDITVPHDENLVKAEKDKQIKYLDLAHEVVDMWDVDSAIIVPIVVTANGLIAKSLDQHLKRLSLGSWIKGLIQKAVLLDTARIVRRFLSLEP

SEQ ID NO: 12447 - protein, 880 aa, Spilarctia lutea
MSFRSGNTRPRVMRFVKRAFLGTTISPQEYMSCVTERIDFLKQKVYAWANRIRRYRKRVDRYNQNRMFQRNEKWVYRKWENLSPCMSDGQVPDENATNSFWRNMWSVPVTHTEGDWCRDVERSCESLLPMEPISIDEEDVSCAVRSLPNWKAPGPDGLHNFWLKWFRSSHACLASQFQTVLDSGSLPQFLTTGITHLLYKSGDAMDPKNFRPITCLPTLYKLLTSILRLKITTHINHNSILSISQNGCRSGTRGTKELLIIDMTISQQVRRNRKSLATCWIDYKKAFDSVPHTWLLKVLELYKIDTTLCTFLKVCMGQWRTALRYPGCRQSAMNDVLIKIERGIFQGDSLSPLWFCLALNPLSTLLEGSGLGYRLQKDDRVISHLFYMDDLKLLAPTKLQLTALLKVTENFSNSIKMEFGVDKCAVMYVKKGEIVESEGIELSDSTKLRSLSATETYKYLGFSQSLGMPESDMKQTLRERFFSRLKKVLKSLLSGGNKVRACNGWVMPVLMYSFRVLRWTQTELDAIDRRVRTLLTAFRMHHPRSSVMRLYIPRRLGGRGLLNIKTLHNREVYNLREYFLQTDVGVHRSVVTVDTGLTPLALAKENWRKPVVLSTNDRREVWKGKELHGRFYRALHGPDIDFKTSTSWLRYGDLFGETEGFVCAIMDEVIMTNNYRKYILKDGTVDICRACHRPGESIRHIISGCSRLANGEYLHRHNQVARIVHQQLALKYHLVNSEVPYYRYVPDPVLENGRATLYWDRSIITDRTIVANKPDIVVIDRLERRAIIIDIAVPHDENLVKVEKEKQIKYLDLSHEIVDMWNVDSVIIVPIVVSAHGLIAKSLDQHLKRLTLEGWIKGLIQKAVLLDTARIVRRFLSLEP

SEQ ID NO: 12448 - protein, 1111 aa, Spilarctia lutea
MKWTHSLNENVMRAYFRATELGTNLTAYRVRLVSLFQELEPAVNVSAQRLSDQVRAIQRCHLLDDAALERIRSDIRNSLTVPSSSHVLNVVTNSTPQVPQNDDISELVDSEIISVSTQYNDRIRSTLEDAIREYRYVNLNNRPRLSRLPIHKRNLALVSALDSLLPKYFSNSEDLSDTHSILYCAAIAVCRVAGVKFAEYTTTTRQENTLPAWQYRIERRIAEARTLIGKLMSFRSGNTRPRVMRFVKRAFLGTTISPQEYMSCVTERIDFLKQKVYAWANRIRRYRKQVDRYNQNRMFQRNEKWVYRKWENLSPCMSDGQVPDENATNSFWRNMWSVPVTHTEGDWYRDVERSCESLLPMEPISIDEEDVSCAVRSLPNWKAPGPDGLHNFWLKWFRSSHACLASQFQTALDSGSLPQFLTTGITHLLYKSGDAMDPKNFRPITCLPTLYKLLTSILRLKITTHINHNSILSISQNGCRSGTRGTKELLIIDMTISQQVRRNRKSLATCWMDYKKAFDSVPHTWLLKVLELYKIDTTLCTFLKVCMGQWRTALRYPGCRQSAMNDVLIKIERGIFQGDSLSPLWFCLALNPLSTLLEGSGLGYRLQKDDRVISHLFYMDDLKLLAPTKLQLTALLKVTENFSNSIKMEFGVDKCAVMYVKKGEIVESEGIELSDSTKLRSLSATETYKYLGFSQSLGMPESDMKQTLRERFFSRLKKVLKSLLSGGNKVRACNGWVMPVLMYSFGVLRWTQTELDAIDRRVRTLLTAFRMHHPRSSVMRLYIPRRLGGRGLLNIKTLHNREVYNLREYFLQTDVGVHRSVVTVDTGLTPLALAKENWRKPVVLGTNDRREVWKGKVLHGRFYRALNGPDIDFKASTSWLRYSDLFGETEGFVCAIMDEVIMTNNYRKYILKDGTVDICRACHRPGESIRHIISGCSRLANGEYLHRHNQVARIVHQQLALKYNLVISEVPYYRYVPDPVLENGRATLYWDRSIITDRTIVANKPDIVVIDRLERRAMIVDIAVPHDENLVKVEKEKQIKYLDLSHEIVDMWNVDSVIIVPIVVSAHGLIAKSLDQHLKRLTLGGWIKGLIQKAVLLDTARIVRRFLSLEP

SEQ ID NO: 12449 - protein, 1199 aa, Spilarctia lutea
MLTRARRRAQLSPPDSSLRSALPSPEEAIEVPAGAEASSSSSSDEFFSPPTSPIPVRRQGRGRPPTSLGSRGPLTSNRAPAAGGDVRRMKWTHSINENVMRAYFRATELGTNLTAYRVRLVSLFQELEPAVNVSAQRLSDQVRAIQRCHLLDDAALERIRSDIRNSLAVPSSSHVLNVVTNSTPQVLQNDDISELVDSEIISVSTQYNDRIRSTLEDAIREYRYVNLNNRPRLPRLPIHKRNLALVSALDSLLPKYFSNSEDLSDTHSILYCAAIAVCRVAGVKFAEYTTTTRQENTLPAWQYRIECRIAEARTLIGKLMSFRSGNTRPRVMRFVKRAFLGTTISPQEYMSCVTERIDFLKQKVYAWANRIRRYRKRVDRYNQNRMFLRNEKWVYRKWENLSPCMSDGQVPDENATNSFWRNMWSVPVTHTEGDWCRDVERSCESLLPMEPISIDEEDVSCAVRSLPNWKAPGPEGLHNFWLKWFRSSHACLASQFQTALDSGSLPQFLTTGITHLLYKSGDAMDPKNFRPITCLPTLYKLLTSILRLKITTHINHNSILSISQNGCRSGTRGTKELLIIDMTISQQVRRNRKSLATCWIDYKKAFDSVPHTWLLKVLELYKIDTTLCTFLKVCMGQWRTALRYPGCRQSAMNDVLIKIERGIFQGDSLNPLWFCLALNPLSTLLEGSGLGYRLQKDDRVISHLFYMDDLKLLAPTKLQLTALLKVTENFSNSIKMEFGVDKCAVMYVKKGEIVESEGIELSDSTKLRSLSATETYKYLGFSQSLGMPESDMKQTLRERFFSRLKKVLKSLLSGGNKVRACNGWVMPVLMYSFSVLRWTQTELDAIDRRVRTLLTAFRMHHPRSSVMKLYIPRRLGGRGLLNIKTLHNREVYNLREYFLQSDVGVHRSVVTVDTGLTPLALAKENWRKPVVLSTNDRREVWKGKVLHGRFYRALNGPDIDFKASTSWLRYSDLFGETEGFVCAIMDEVIMTNNYRKYILKDGTVDICWACHRPGESIRHIISGCSRLANGEYLHRHNQVARIVHQQLALKYNLVISEVPYYRYVPDPVLENGRATLYWDRSIITDRTIVANKPDIVVIDRLERRAMIVDIAVPHDENLVKVEKEKQIKYLDLSHEIVDMWNVDSVIIVPIVVSAHGLIAKSLDQHLKRLTLGGWIKGLIQKAVLLDTARIVRRFLSLEP

SEQ ID NO: 12450 - protein, 874 aa, Spilarctia lutea
MSFRSGNTRPRVMRFVKRAFLGTTISPQEYMSCVTERIDFLKQKVYAWANRIRRYRKRVDRYNQNRMFQRNEKWVYRKWENLSPCMSDGQVPDENATNSFWRNMWSVPVTHTEGDWYRDVERSCESLLPMEPISIDEEDVSCAVRSLPNWKAPGPDGLHNFWLKWFRSSHACLASQFQTALDSGSLPQFLTTGITHLLYKSGDAMDPKNFRPITCLPTLYKLLTSILRLKITTHINHNSILSISQNGCRSGTRGTKELLIIDMNISQQVRRNRKSLATCWIDYKKAFDSVPHTWLLKVLELYKIDTTLCTFLKVCMGQWRTALRYPGCRQSAMNDVLIKIERGIFQGDSLSPLWFCLALNPLSTLLEGSGLGYRLQKDDRVISHLFYMDDLKLLAPTKLQLTALLKVTENFSNSIKMEFGVDKCAVMYVKKGEIVESEGIELSDSTKLRSLSATETYKYLGFSQSLGMPESDMKQTLRERFFSRLKKVLKSLLSGGNKVRACNGWVMPVLMYSFGVLRWTQTELDAIDRRVRTLLTAFRMHHPRSSVMRLYIPRRLGGRGLLNIKTLHNREVYNLREYFLQTDVGVHRSVVTVDTGRTPLALAKENWRKPVVLSTNDRREVWKGKELHGRFYRALHGPDIDFKTSTSWLRYGDLFGETEGFVCVIMDEVIMTNNYRRYILKDGTVDICRACHRPGESIRHIISGCSRLANGEYLHRHNQVARIVHQQLALKYHLVNSEVPYYRYVPDPVLENGRATLYWDRSIITDRTIVANKPDIVVIDRLERRAIIIDIAVPHDEKEKQIKYLGLSHEIVDMWNVDSVIIVPIVVSAHGLIAKSLDQHLKRLALEGWIKGLIQKAVLLDTARIVRRFLSLEP

SEQ ID NO: 12451 - protein, 1198 aa, Xestia c-nigrum
MLTRAAARRARLPPPDPSLSSASPPPEPSPIVSAVTPAVAVASSSSDEYFSPPTTPPPARRRGGRRPPDGLGPRGPPASDRVPAPGGSVQRMRWTQSNNENVMRAYYGATEGGNNLTAYRVRMLSLFQVLEPAVNVSAQRLSDQVRVIQRNRMLDDTVLDRLRTEMHSSHVIATPPSQAVVPPQSTTITYRDDDVSSDMITNVSTQYSKDMRSALEGAIREYRFMTPELRPRLPRLPMHNKNRMLVAVLDSQLSNYFDNCEDLTDVHSILYCAAVAACRVARVKFSDDRATRPKPAVPAWQYRIEQRIGGARALIGKLICFREGNTRPRVMRFVRRAFSGTDINPRDYMSRVTERIDFLKQKVYAWASRIRRYKRRVDRYTQNRTFQRDERWVYRAWERPDQGVADTRLPDDDAMCSFWRSIWSVPVSHAEGEWTRVIERACDPVPEMGAITISPQDVACAVRPLPNWKSPGPDGLHNFWIKWFTRSHARLATLFQSALESGSLPEFLTTGITHLLHKSGSTAEPKNYRPITCLPTVYKVLTSILRTKICKHVDDNSVMSASQNGCRNGSRGTKELLLIDMAISQQVRRSRKDLSTCWIDYKKAYDSVPHTWLMRVLELYKVDATLRTFLMSCMGQWRTVLRYPGCRQIQRNSEPIRIERGIFQGDSLSPLWFCLALNPLSTLLEDSGLGYQLRKDGRVISHLLYMDDLKLFAPNDLQLMELLKVTETFSSAIRMEFGVDKCAVMHVKRGEIVESVGTQLSDSINLRSLSATETYKYLGMSEALGINVADMKQSLKERFFGRLKKVFNSLLSGGNKVRAFNGWVMPVLMYSFGILKWTQTELDALDTKVRKLLTAYRMHHPRSSVMRLYIPRKCGGRGFLNAKTLHNREICSLREYFLEANVGMHRDVVAMDKGLTPLSLAKENWRKPVVLTTDDRRKEWQSKELHGRFYRALHGPDVDILASVSWLRSGDLFGETEGFVYAIMDEVMMTNNYRRFIVKDGTVDICRACHRPGESIRHIISGCSRLANGEYLHRHNLVARIIHQQLALKYNLVESEVPYYRYVPDPVLDNGSITLYWDQSIITDRTVIANRPDIVVMDRSERRAMIVDITVPHDENLVKAEKDKQIKYLDLAREVVDMWEVDSAIIVPIVVSAHGLIAKSLDQYLRRLSLGSWIKGLIQKAVLLDTARIVRRFLSLEP

SEQ ID NO: 12452 - protein, 1200 aa, Xestia c-nigrum
MLTRSAARRALLPPPDPSLSSASPPPEPSPIVSAVTPAVAVASSSSDEYFSPPTTPPPARRRGGRRPPDGLGPRGPPASDRVPAPGGSVQRMRWTQSNNENVMRAYYGATEGGNNLTAYRVRMLSLFQVLEPAVNVSAQRLSDQVRVIQRNRMLDDTVLDRLRTEVQSSHVTATPRSQAVVPPQSTIITDRDDDVCSDMITNVATQCSEDMRSALEGAIREYRFVTPELRPRLPRLPMNNKNRMLVAVLDSQLSNYFDDCEDLTDVHSVVYCAAVAACRVARVKFSDDRVTRPKPAVPAWQYRIEQRIGGARALIGKLICFREGNTRPRVMRFVRRAFSGTDISPRDYMSRVTERIDFLKQKVYAWAWASRIRRYKRRVDRYTQNRTFQRDERWVYRAWERPDQGVADTHLPDDDAMCSFWRSIWSVPVSHAEGEWTRVIERACDPVPEMGAITISPQDVACAVRPLPNWKSPGPDGLHNFWIKWFTGSHARLATLFQSALESGSLPEFLTTGLTHLLHKSGSTAEPKNYRPITCLPTVYKVLTSILRTKICKHIDDNSVMSASQNGCRNGSRGTKELLLIDMAISQQVRRSRKDLSTCWIDYKKAYDSVPHTWLMRVLELYKVDATLRTFLISCMRQWRTVLRYPGCRQIQRNSEPIRIERGIFQGDSLSPLWFCLALNPLSTLLEDSGLGYQLRKDGRVISHLLYMDDLKLFAPNDLQLMELLKVTETFSSAIRMEFGVDKCAVMHVKRGEIVESVGTQLSGSINLRSLSATETYKYLGMSEALGINVADMKQSLKERFFGHLKKVFNSLLSGGNKVRAFNGWVMPVLMYSFGILKWTQTELDALDTKVRKLLTAFRMHHPRSSVMRLYIPRKCGGRGFLNAKTLHNREICSLREYFQEADVEMHRDVVAMDKGLTPLSLAKENWRKPIVLTTDDRRKEWQGKELHGRFYRALHGPDVDFLASVSWLRSGDLFGETEGFVCAIMDEVMMTNNYRRFIVKDGTVDICRACHRPGESIRHIISGCSRLANGEYLHRHNLVARIIHQQLALKYNLVESEVPYYRYVPDPVLVNGNITLYWDQSIITDRTVIANRPDIVVMDRSERRAMIIDITVPHDENLVKAEKDKQIKYLDLAREVVDMWEVDSAIIVPIVVSAHGLIAKSLDQHLRRLSLGSWIKGLIQKAVLLDTARIVRRFFSLEP

SEQ ID NO: 12453 - protein, 1198 aa, Griposia aprilina
MLTRSAARRARPPTPDSSLSSASPPPVSSPTVSAVTTPAAVVASSSSDEYFSPPTTPPPARRRGGHRPPDGLGPRGPPASDRVPAPGGSVQCMRWTRSINENVMRSYYGATEGGNNLTAYRVRMLSLFQVLEPAVNVSAQRLSDQVRVIQRNHMLDETVLDRLRNEIQSSHVIAPPSQTVVILPQPITSQADEGRDDRATNVSTQCNEELRSALEGAIREYRFMSPELRPRLPRLPMHNKNRALVATLDSQLSNYIDDCEDLTDTHSILYCAAVAACRVAHVKFANDSRATRPKPAVPAWQCRIERRIGGARALIGKLTCFREGNTRPRVIRFVRRAFTGTNISPEDYMSCVTERIDFLKQKVYAWANRIRRYKRRVERYTQNRTFQRDERWVYRDWERPDQGVIDTYLPDDDGMCSFWRNIWSVPVSHTEGDWTQAVERTCEPIPEMGAITICPQDVARAVRPLPNWKSPGPDGLHNFWIKSFLRSHARLAAQFQVALESGSLPQFLTTGVTHLLHKSSSTAEPKNYRPITCLPTVYKVLTSILRAKINNHIDTNSIMSPSQNGSRNGSRGTKELLLIDMTISQQVRRSRKDLSTCWIDYKKAYDLVPHTWLMRVLELYKVDSTLRTFLKSCMGQWRTVLHYPGCRNVQKDNEPIRIERGIFQGDSLSPLWFCLALNPLSTLLENSGLGYRLRRGGQVISHLLYMDDLKLYAPNNLQLIELLKVTETFSSAIRMEFGVDKCAVMHVKRGEIVESVGTQLSDSINLRSLSASETYKYLGISEALGINGTDMKQSLKERFFGRLKKVFNSLLSGGNKVRAFNGWVMPVLMYSFGILKWTQTELDALDKKVRSLLTANRMHHPRSSVMRLYIPRKCGGRGFLNAKTLHNREICSLREYFLEADVGMHRDVVTVDKGLTPLSLDKENWRKPVVLDTNDRMEVWQRKELHGRFFRALHGPDVDQLASVAWLRYGDLFGETEGFVCAIMDEVMMTKNYRRFIVKDGTVDICRACHRPGESIRHIISGCSRLANEEYLHRHNLVARIIQQQLALKYSLVESEVPYYRYVPNPVLENGHFTLYWDRSIITDRTIVANKPDIVAVDRIERRAVIVDITIPHDGNLVKAEKDKQIKYLDLAREVVDMWDVDSAIIVPIVVTANGLIAKSLDQHLRRLSLGSWIKGLIQKAVLLDTARIVRRFLSLEP

SEQ ID NO: 12454 - protein, 1198 aa, Griposia aprilina
MLTRSAARRARPPPPDSSLSSASLPPVSSPTVSAVTTPAAVVASSSSDEYFSPPTTPPPVRRRGGHRPPDGLGPRGPPASDRVPAPGGSVQRMRWTRSINENVMRSYYGATEGGNNLTAYRVRMLSLFQVLEPAVNVSAQRLSDQVRVIQRNHMLDDTVLDRLRNEMQSSHVIAPPSQTVVVLPQSNTSQADEESDDRATNVSTQCNDELRSALEDAIREYRFISPELRPRLPRLPMHTKNRVLVAALDAQLSNYFDDCVDLTDTHSILYCAAVAACRVAHVKFANDSRATRPKPAVPAWQCRIERRIGEARALIGKLICFREGNTRPRVMRFVRRAFAGTNISPQDYMSCVTERIDFLKQKVYAWANRIRRYKRRVERYTQNRTFQRDERWVYRGWERPDQGVADTCLPDDDAMCSFWRNIWSVPVSHTEGDWTREVERACDPIPEMGAITICPQDVTRAVRPLPNWKSPGPDGLHNFWIKWFGRSHARLAAQYQVALESGSLPQFLTTGVTHLLHKSGSTAEPKNYRPIACLPTVYKVLTSILRDKINKHIDTNYIMSPSQNGCRNGSRGTKELLLIDMAISQQVRRSRKDLSTCWIDYKKAYDSVPHTWLMRVLELYKVEATLRTFLMSCMGQWRTVLHYPACRNTQRNSEPIRIERGIFQGDSLSPLWFCLALNPLSTLLEDSGLGYRLRRGGQVISHLLYMDDLKLFAPNNSQLMDLLKVTETFSSAIRMEFGVDKCAVMHVKRGEIVESVGTQLSDSINLRALSASETYKYLGMSEALGINGTDMKQSLKDRFFGRLKKVFNSLLSGGNKVRAFNGWVMPVLMYSFGILKWTQTELDALDRKVRTLLTANRMHHPRSSVMRLYIPRKCGGRGFLNAKTLHNREICSLREYFLEADVGMHRDVVTVDKGLTPLSLAKENWRKPVVLDTNDRMEVWQSKELHGRFFRALHGPDVDQLASVAWLRFGDLFGETEGFVCAIMDEVMMTNNYRRFIVKDGTVDICRACHRPGESIRHIISGCSRLANEEYLHRHNLVARIIHQQLALRYSLVESEVPYYRYVPDPVLENGHITLYWDRSIITDRTIVANKPDIVMVDRLERRAMIVDITVPHDGNLVKAEKDKQIKYLDLAREVVDMWDVDSAIIVPIVVTANGLIAKSLDQHLRRLSLGSWIKGLIQKAVLLDTARIVRRFLSLEP

SEQ ID NO: 12455 - protein, 1197 aa, Griposia aprilina
MLTRSAALRARLPTPDSSLSSASPPPVSSPIVSAVTTPAAVVASSSSDEYFSPPTTPPPARRRGGHRPPDGLGPRGPSASDRVPAPGGSVQRMRWTQSINENVMRSYYGATEGGNNLTAYRVRMLSLFQVLEPAVNVSAQRLSDQVRVIQRNHMLDDTVLDRLRSEMQSSHVIAPPSQTVVVLPQPITSHDEGSDDRATNVSTQCNEELRSALEGAIREYRFMSPEFRPRLPRLPMHNKNRALVAALDSQLSNYFDDCVDLTDTHSILYCAAVAACRVAHVKFANDSRATRPKPAVPAWQCRIERRIGGARALIGKLICFREGNTRPRVMRFVRRAFAGTDVSPQDYISCVTERIDFLKQKVYAWASRIRRYKRRVERYTQNRTFQRDERWVYRDWERPDQGVANTYLPDDDAMCSFWHNIWSVPVSHTEGDWTREVERACEPIPEMGAITICPQDVARAVRPLPNWKSPGPDGLHNFWIKWFLKSHARLAAQFQAALESGSLPQFLTTGVTHLLHKSGSIAEPKNYRPITCLPTVYKVLTSILRAKINKHIDTNSIMSASQNGCRNGSRGTKELLLIDMAISQQVRRSRKDLSTCWIDYKKAYDSVPHTWLMRVLELYKVDATLRTFLKSCMGQWRTVLCYPTCRNTQRNSEPIRIERGIFQGDSLSPLWFCLALNPLSTLLEDSGLGYRLRRGGRVISHLLYMDDLKVFAPNNLQLIELLKVTETFSSAIRMEFGLDKCAVMHVKRGEIVESVGTQLSDSMNLRALSASETYKYLGMSEALGVNNTDMKQSLKERFFGRLKKVFNSLLSGGNKVRAFNGWVMPVLMYSFGILKWTQTELDTLDRRVRTLLTANRMHHPRSSVMRLYIPRKCGGRGFLNAKSLHNREICSLREYFLEADVGMHRDVVAVDKGLTPLSLAKENWRKPVVLDTNDRMEVWQSKELHGRFFRALHGPDVDEQASVAWLRFGDLFGETEGFVCAIMDEVMMTNNYRRFIVKDGTVDICRACHRPGESIRHIISGCSRLANEEYLHRHNLVARIIHQQLALKYSFVESEVPYYRYVPDPVLENGTITLYWDRSIITDRTIIANKPDIVLVDRRERRAMIVDITIPHDGNLVKAEKDKQIKYLDLAREVVDMWDVDSAIIVPIVVTANGLIAKSLDQHLRRLSLGSWIKGLIQKAVLLDTARIVRRFLSLER

SEQ ID NO: 12456 - protein, 1197 aa, Griposia aprilina
MLTRSAALRARLPTPDSSLSSASPPPVSSPIVSAVTTPAAVVASSSSDEYFSPPTTPPPARRRGGHRPPDGLGPRGPPASDRVPAPGGSVQRMRWTQSINENVMRSYYGATEGGNNLTAYRVRMLSLFQVLEPAVNVSAQRLSDQVRVIQRNHMLDDTVLDRLRSEMQSSHVIAPPSQTVVVLPQPITSHDEGSDDRATNVSTQCNEELRSALEGAIREYRFMSPELRPRLPRLPMHNKNRALVAALDSQLSNYFDDCVDLTDTHSILYCAAVAACRVAHVKFANDSRATRPKPAVPAWQCRIERRIGGARALIGKLICFREGNTRPRVMRFVRRAFAGTDVSPQDYISCVTERIDFLKQKVYAWASRIRRYKRRVERYTQNRTFQRDERWVYRDWERPDQGVADTYLPDDDAMCSFWHNIWSVPVSHTEGDWTREVERACEPIPEMGAITICPQDVARAVRPLPNWKSPGPDGLHNFWIKWFLKSHARLAAQFQAALESGSLPQFLTTGVTHLLHKSGSIAEPKNYRPITCLPTVYKVLTSILRAKINKHIDTNSIMSASQNGCRNGSRGTKELLLIDMAISQQVRRSRKDLSTCWIDYKKAYDSVPHTWLMRVLELYKVDATLRTFLKSCMGQWRTVLRYPTCRNTQRNSEPIRIERGIFQGDSLSPLWFCLALNPLSTLLEDSGLGYRLRRGGRVISHLLYMDDLKVFAPNNLQLIELLKVTETFSSAIRMEFGLDKCAVMHVKRGEIVESVGTQLSDSMNLRALSASETYKYLGMSEALGVNNTDMKQSLKERFFGRLKKVFNSLLSGGNKVRAFNGWVMPVLMYSFGILKWTQTELDTLDRRVRTLLTANRMHHPRSSVMRLYIPRKCGGRGFLNAKSLHNREICSLREYFLEADVGMHRDVVAVDKGLTPLSLAKENWRKPVVLDTNDRMEVWQSKELHGRFFRALHGPDVDVQASVAWLRFGDLFGETEGFVCAIMDEVMMTNNYRRFIVKDGTVDICRACHRPGESIRHIISGCSRLANEEYLHRHNLVARIIHQQLALKYSFVESEVPYYRYVPDPVLENGTITLYWDRSIITDRTIIANKPDIVLVDRRERRAMIVDITIPHDGNLVKAEKDKQIKYLDLAREVVDMWDVDSAIIVPIVVTANGLIAKSLDQHLRRLSLGSWIKGLIQKAVLLDTARIVRRFLSLEP

SEQ ID NO: 12457 - protein, 1196 aa, Omphaloscelis lunosa
MLTRSAARRARLPPPDSPLSSASSPPVLSPTVNAVMTPAAAVASSSSDEYFSPPTTPPPARRRGRRRPPDGLGPRGPPASDRVPAPGGSVQRMRWTRSINENVMRSYYGATEGGNNLTAYRVRMLSLFQVLEPAVNVSAQRLSDQVRVIQRNHMLDDTVLDRLRSEMQSSHVIAPPVRSVIVPSRIITSQADERIDDRAISTQCNEELRSALEGAIHEYRFMSPELRPRLPRLPMHNKNRALVAALDSQLSNYFDDCEDLTDTHSILYCAAVAVCRVAHVKFCNDSRATRPKPAVPAWQCRIERRICGARTLIGKLICFREGNTRPRVMRFVRRAFLGTDISPQDYMTRVTERIDFLKQKVYAWANRIRRYKRRVERYTQNRTFQSDERWVYRAWERPNQGVTDTHLPDEDAMCSFWRSIWSVPVSHTEGDWTREVERACDSIPEMGAITICPQDVARAVRPLPNWKSPGPDGLHNFWIKWFVRSHARLAAQYQTALESGSLPHFLTTGVTHLLHKSGSTAEPKNYRPITCLPTVYKVLTSVLRAKINKHIDTNSIMSASQNGCRNGSRGTKELLLIDMAISQQVRRSRKDLSTCWIDYKKAYDSVPHTWLMRVLELYKVDITLRTFLMSCMGQWRTVLRYPGCRNIQRNSEPIRIERGIFQGDSLSPLWFCLALNPLSTLLEDSGLGYRLRRGGQVISHLLYMDDLKLFAPNNLQLMELLKVTETFSSAIRMEFGVDKCAVMHVKRGKIMESVGTQLSDSINLRALSASETYKYLGMSEALGINVTDMKQSLKERFFGRLKKVLNSLLSGGNKVRAFNGWVMPVLMYSFGILKWSQTELDALDRRVRTLLTAYRMHHPRSSVMRLYIPRKCGGRGFLNAKTLHNREICSLREYFLEADVGMHRDVVVVDKGLTPLSLAKENWRKPVVLDTKNRMEIWQSKELHGRYFRALHGPDVDLPASVAWLRCGDLFGETEGFVCAIMDEVMMTNNYRRFIVKDGTVDICRACHRPGESIRHIISGCSRLANEEYLHRHNLVARIIHQQLALKYSLVESEVPYYRYVPDPVLENGNITLYWDRSIITDRTIVANKPDIVVVDRGERSAMIIDITVPHDENLVKAEKDKQIKYLDLAREVVDMWDVDSAIIVPIVVTANGLIAKSLDQHLRRLSLGSWIKGLVQKAVLLDTARIVRRFLSLEP

SEQ ID NO: 12458 - protein, 868 aa, Omphaloscelis lunosa
MRFVRRAFLGTDISPQDYMTRVTERIDFLKQKVYAWANRIRRYKRRVERYTQNRTFQSDERWVYRAWERPDQGVADTHLPDDDAMCSFWRSIWSVPVSHTEGDWTREVERACDPIPEMGAITICPQDVARAVRPLPNWKSPGPDGLHNFWIKWFVRSHARLAAQYQTALESGSLPQFLTTGVTHLLHKSGSTAEPKNYRPITCLPTVYKVLTSILRAKINKHIDTNSIMSVSQNGCRNGSRGTKELLLIDMAISQQVRRSRKDLSTCWIDYKKAYDSVPHTWLMRVLELYKVHTTLRTFLMSCMGQWRTVLRYPGCRNIQRNSEPIRIERGIFQGDSLSPLWFCLALNPLSTLLEDSGLGYRLRRGGQVISHLLYMDDLKLFAPNNLQLMELLKVTETFSSAVRTEFGVDKCAVMHVKRGEIMESVGTQLSDSINLRALSASETYKYLGMSEALGINVTDMKQSLKERFFGRLKKVLNSLLSGGNKVRAFNGWVMPVLMYSFGILKWTQTDLDALDRRVRTLLTAYRMHHPRSSVMRLYIPRKCGGRGFLNAKTLHNREICSLREYFLGVDVGMHRDVVVVDKGLTPLSLAKENWRKPVVLDTKDRMEIWQSKELHGRYFRALHGPDVDLPASVTWLRFGDLFGETEGFVCAIMDEVMMTNNYRRFIVKDGTVDICRACHRPGESIRHIISGCSRLANEEYLHRHNLVARIIHQQLALKYSLVESEVPYYRYVPDPVLENGNITLYWDRSIITDRTIAANKPDIVVVDRGERRTMIIDITVPHDENLVKAEKDKQIKYLDLAREVVDMWDVDSAIIVPIVVTANGLIAKSLDQHLRRLSLGSWIKGLIQRAVLLDTARIVRRFLSLGP

SEQ ID NO: 12459 - protein, 962 aa, Omphaloscelis lunosa
MHKKNKALMCTLDSLLSNCFDGSKDLADTHSILYCAAVAACRVAHVKFPNSDRAPRPKPAVPAWQCRIERRIGEARVLIGKLTCFREGNTRPRVMRFVKRAFSGTDISSRDYLSRVTERIDFLKQKICAWANRIRRYRRRVERYTQNRTFQSDERWVYRAWEQPDQGVIDTRLPDDDAMCSFWRSIWSAPINHTEGDWTREIERACEQIPEMGALTISPRDVARAVRPLPNWKSPGPDGLHNFWIKWLQRSHARLASQFQSALESGSLPQFLTTGITHLLHKSGSTAEPKNYRPITCLPTVYKVFTSILRAKINKHIDTNSIMSASQNGCRNGSRGTKELLLIDMAISQQVRRSRRDLSTCWIDYKKAYDSVPHTWLMRVLELYKVDATLRTFLMSCMRQWRTVLRYPGYRHILRNSEPIRIERGIFQGDSLSPLWFCLALNPLSTLLENSGLGYRLRRGGQVISHLLYMDDLKLFAPNNLQLLELLKVTETFSSAIRMEFGVDKCAVMHVKRGEIVESVETHLSDSIHLRSLSSNETYKYLGMSEALGINAADMKQSLRERFFSRLNKVLNSLLSGGNKVRAFNGWVMPVLMYSFGILKWTQTELDALDRRVRTLLTANRMHHPRSSVMRLYIPRKCGGRGFLNAKTLHNREVCSLREYFLGADMGMHRDVVSVDKGLTPLSLANENWRKPIVLDTNDRREVWQSKELHGRYYRALHGPDVDLLASVSWLRFGDLFGETEGFVFAIMDEVIMTNNYRKYIVKDGTVDICRACHRPGESIRHIISGCSRLANGDYLHRHNLVARIIHQQLALKYNLVESEVPYYRYVPDPALENGNITLYWDRSIITDRTIVANKPDIVVIDRLERRTMIIDIAVPHDENLVKAEKDKQIKYLDLAREVVDMWDVDTAIIVPIVVTANGIIAKSLDQHLRRLSLGSWIKGLIQKAVLLDTARIVRRFLSQEP

SEQ ID NO: 12460 - protein, 1198 aa, Omphaloscelis lunosa
MLTRSAARRARLPPPDSPLSSASSPPVLSPTVNAVMTPAAAVASSSSDEYFSPPTTPPPARRRGRRRPPDGLGPRGPPASDRVPAPGGSVQRMRWTRSINENVMRSYYGATEGGNNLTAYRVRMLSLFQVLEPAVNVSAQRLSDQVRVIQRNHMLDDTVLDRLRSEMQSSHVIAPPVRSVIVPSQIITSQADERIDDRATNVNTQCNEELRSALEGAIHEYRFMSPELRPRLPRLPMHNKNRALVAALDSQLSNYFDDCEDLTDTHSILYCAAVAVCRVAHVKFSNDSRATLPKPAVPAWQCRIERRIDGARTLIGKLICFREGNTRPRVMRFVRRAFLGTDISPQDYMTRVTERIDFLKQKVYAWANRIRRYKRRVERYTQNRTFQSDERWVYRAWERPNQGVTDTHLPDEDAMCSFWRSIWSVPVSHTEGDWTREVERACDSIPEMGAITICPQDVARAVRPLPNWKSPGPDGLHNFWIKWFVRSHARLAAQYQTALESGSLPQFLTTGVTHLLHKSGSTAEPKNYRPITCLPTVYKVLTSVLRAKINKHIDTNSIMSASQNGCRNGSRGTKELLLIDMAISQQVRRSRKDLSTCWIDYKKAYDSVPHTWLMRVLELYKVDITLRTFLMSCMGQWRTVLRYPGCRNIQRNSEPIRIERGIFQGDSLSPLWFCLALNPLSTLLEDSGLGYRLRRGGQVISHLLYMDDLKLFAPNNLQLMELLKVTETFSSAIRMEFGVDKCAVMHVKRGKIMEPVGTQLSDSINLRALSASETYKYLGMSEALGINVTDMKQSLKERFFGRLKKVLNSLLSGGNKVRAFNGWVMPVLMYSFGILKWSQTELDALDRRVRTLLTAYRMHHPRSSVMRLYIPRKCGGRGFLNAKTLHNREICSLREYFLEADVGMHRDVVVVDKGLTPLSLAKENWRKPVVLDTKNRMEIWQSTELHGRYFRALHGPDVDLPASVAWLRCSDLFGETEGFVCAIMDEVMMTNNYRRFIVKDGTVDICRACHRPGESIRHIISGCSRLANEEYLHRHNLVARIIHQQLALKYSLVESEVPYYRYVPDPVLENGNITLYWDRSIITDRTIVANKPDIVVVDRGERSAMIIDITVPHDENLVKAEKDKQIKYLDLAREVVDMWDVDSAIIVPIVVTANGLIAKSLDQHLRRLSLGSCIKGLVQKAVLLDTARIVRRFLSLEP

SEQ ID NO: 12461 - protein, 1197 aa, Sesamia nonagrioides
MLTRSAARRARPPSPDSLLSSASPPPASSTTVSAVTTPAAAVALSSSDEYFSPPTTPPPARRRGGRRPPDRLGPRGPSASDRVPAPGGSVQRMRWTQSINENVMRSYYGATEGGNNLTAYRVRMLSLFQVLEPVVNVSAQRLSDQVRVIQRNHMLDDTVLDRLRNEMQSSRIIAHQSQTAEIPPQPTNYADEGSNDRATNVSTQCNEELINALEAAIREYRFTPAEQRPRLPRLPMHNRNRALMAALDAQLSDYFDTCEDLTDTHSILYCAAVAACRVAHVKFPSDSRATRPKPVVPAWQRRIERRIGGARALIGNLICFREGNTRPRVMRFVRRAFAGTNISPQNYMARVTERIDFLKQKVYAWANRIRRYKRRVERYTQNRTFQSNERWVYRDWERPEQGVTDTCLPDDDAMCSFWRSIWSVPVSHTEGDWARDVERACDPIPEMGAITICPQDVACAVRPLPNWKSPGPDGLHNFWIKWFPRSHARLASQFQTALVSGSLPQFLTTGITHLLHKSGSTAEPKNYRPITCLPTVYKVLTSILKTKINKHIDSNSIMSASQNGCKSGSRGTKELLLIDMAISQQVRRSRKDLSTCWIDYRKAYDSVPHTWLMRVLELYKVDATLRTFLMSCMKTWRTVLRYPGCRNIQRNSEPIRIERGIFQGDSLSPLWFCLALNPLSTLLEDSGLGYRLRRGGQVISHLLYMDDLKLFAPNNSQLRELLKITETFSSSIRMEFGVDKCAVMHVKRGEIMESVGTQLTDSINLRALSASETYKYLGMSEALGINVTDMKQSLKERFFGRLKKVLNSLLSGGNKVRAFNGWVMPVLMYSFGILKWTQTELDALDQRVRTLLTANRLHHPRSSVMRLYIPRKCGGRGFLNAKTLHNREVCSLRDYFLVTDVGMHRDVVAADKGLTPLSLAKENWRKPVVLDTNDRMEVWMSKELHGRFFRALHGLDVDFQASVAWLRFGDLFGETEGFVFAIMDEVMMTNNYRRFIVKDGTVDICRACHRPGESIRHIISGCSRLANGEYLHRHNLVARIIHQQLALKYNLVESEVPYYRYTPDPVLENGYITLYWDRSIITDRTIVANKPDIVMVDRSERRAMIVDITIPHDENLVKAEKDKQIKYLDLAHEVVDMWEVDSAIIVPIVVTANGLIAKSLDQHLRRLSLGSLIKGLIQKAVLLDTARIVRKFLSLEP

SEQ ID NO: 12462 - protein, 1094 aa, Sesamia nonagrioides
MRSYYGATEGGTNLTAYRVRMLSLFQVLEPAVNVSAQRLSDQVRVIQRNHMLDDTVLDRLRNEMQSSRVIAHQSQSAEIPPQPTNYADEGSNDRATNVSTQCNEELRNALEAAIREYRSMSAELRPRLPCLPMHNRNRALMAALDAQLSNYFDTCEDLTDTHSILYCAAVAACRVAHVKFPSDSRATRPKPVVPAWQHRIEHRIGGARALIGKLICFREGNTRPRVMRFVRRAFSGTNTSPQNYMARVTERIDFLKQKVYAWANRIRRYKRRVERYTQNRTFQSNERRVYRDWERPEQGVTDTCLPDDDAMCSFWRSIWSVPVSHTEGDWARDVERACDPIPEMGAITICPQDVAHAVRPLPNWKSPGPDGLHNFWIKWFPRSHARLASQFQTALVSGSLPQFLTTGITHLLHKSGSTAEPKNYRPITCLPTVYKVLTSILKTKINKHIDSNSILSASQNGCRSGSRGTKELLLIDMAISQQVRRSRKDLSTCWIDYKKAYDSVPHTWLMRVLELYKVDATLRTFLMTCMRTWRTVLRYPGCRNIQRNSEPIRIERGIFQGDSLSPLWFCLALNPLSTLLEDSGLGYRLRRGGQVISHLLYMDDLKLFAPNNSQLNELLKITEIFSSSIRMEFGVDKCAVMHVKRGEIMEPVGTQLTSSINLRALSASETYKYLGMSEALGINVTDMKQSLKERFFGRLKKVLNSLLSGGNKLRAFNGWVMPVLMYSFGILKWTQTELDALDQRVRTLLTANRLHHPRSSVMRLYIPRKCGGRGFLNAKTLHNREICSLRDYFLETNVGMHRDVVAADKGLTPLSLAKENWGKPVVLDTNDRMEVWKSKELHGRFFRALHGPDVDFQASVAWLRFGDLFGETEGFVFAIMDEVMMTNNYRRFIVKDGTVDICRACHRPGESIRHIISGCSRLANGEYLHRHNLVARIIHQQLALKYKLVESEVPYYRYMPDPVLENGLITLYWDRSIITDRTIIANKPDIVLVDRSERRAMIFDITIPHDENLVKAEKDKQTKYLDLAHEVVDMWEVDSAIIVPIVVTANGLIAKSLDQHLRRLSLGSWIKGLIQKAVLLDTARIVRKFLSLEP

SEQ ID NO: 12463 - protein, 1078 aa, Sesamia nonagrioides
MLSLFQVLEPAVNVSAQRLSDQVRVIQRNYMLDDVVLDRLRLESRNSHVTPASSLVAVQLNSVSPRPNRVDEEDDHRAISVSPQCNEQLRSALEDAFREYRSTPPELRPRLPRLPMHKRNKALVCALDSQLSNYLKDSKDLTDLTHSILYCGAVAICRVAHVKFPDSDRATRPKPAVPAWQCRIERRIGETRALIGKLISFREGNTRPRVMRFVRRAFSGTDISTRDYLLRVTERIDFFKQKIYAWANRIRRYRRRVERYSQNRNFQSDERRVYRAWERSDQGVTDTCRPDDDATCSFWRNIWSVPVSHTEGGWTRDVERACDPVPEMGAITICPQDVARAVRPLPNWKSPGPDGLHNFWLKWFSGSHAYLASQFQTALESGSLPQFLTTGITHLLHKSGSTAEPKNYRPITCLPTVYKVLTSILKAKINTHIDSNSIMSASQNGCRNGSRGIKELLLIDMAISQQVRRSRKDLSTCWIDYKKAYDSVPHTWLMRVLELYKVDATLRTFLMSCMSQWRTVLRYPGCRNIQRNSEPIRIERGIFQGDSLSPLWFCLALNPLSTLLEDSGLGYRLRRGGQVISHLLYMDDLKLFAHTDSQLKELLKITETFSSSIRMEFGVDKCAVMHVKRGEIMESVGTQLTSSINLRALSASETYKYLGMSEAWGINVTDMKQSLKERFFGRLKKVLNSLLSGGNKVRAFNGWVMPVLMYSFGILKWTQTELDALDQRVRTLLTANRLHHPRSSVMRLYIPRKCGGRGFLNAKTLHIREICSLRKYFLETDVGKHRDVVAADKGLTPLSLAKENWRKPVVLDTNDRLEVWKSKELHGRFFRALHGPDVDFQASVAWLRFGDLFGETEGFVFAIMDEVMMTNNYRRFIVKDGTVDICRACHRPGESIRRIISGCSRLANGEYLHRHNLVARIIHQQLALKYKLVELEVPYYRYMPDPVLENGHITLYWDRSIITDRTIVANKPDIVLVDRSERRAMIVDITIPHDENLVKAEKDKQIKYLDLAHEVVDMWEVDSAIIVPIIVTANGLIAKSLDQHLRRLSLGSWIKGLIQKAVLLDTACIVRKFLSLEP

SEQ ID NO: 12464 - protein, 1197 aa, Sesamia nonagrioides
MLTRSAARRARPPSPDSLLGSASPPPVSSPTVSAVTTPAAAVALSSSDEYFSPPTTPPPVRRRGGRRPPDRLGPRGPSASDRVPAPGGSVQRMRWTQSINENVMRSYYGATEGGNNLTAYRVRMLSLFQVLEPAVNVSAQRLSDQVRVIQRNHMLDDTVLDRLRNEMQSSRVIAHQSQTAEIPPQSTDYTDEGSNDRATNVSTQCNEELINALEAAIREYRSTSAELRPRLPRLPMHNRNRALMAALDAQLSNYFDTCEDLTDTHSILYCAAVAACRVAHVKFPSDSRATRPKPVVPAWQHRIERRIGGARALIGKLICFREGNTRPRVMRFVRRAFAGTNISPQNYMARVTERIDFLKQKVYAWANRIRRYKRRVERYTQNRTFQNNERWVYRDWERPEQGVTDTCLPDDDVMCSFWRSIWSVPVSHTEGDWARDVERACDPIPEMGAITICPQDVACAVRPLPNWKSPGPDGLHNFWIKWFPRSHARLASQFQTALVSGSLPQFLTTGITHLLHKSGSTAEPKNYRPITCLPTVYKVLTSILKTKINKHIDSNSIMSASQNGCKSGSRGTKELLLIDMAISQQVRRSRKDLSTCWIDYRKAYDSVPHTWLMRVLELYKVDATLRTFLMSCMRTWRTVLRYPGCRNIQRNSEPIRIERGIFQGDSLSPLWFCLALNPLSTLLEDSGLGYRLRRGGQVISHLLYMDDLKLFAPNNSQLRELLKITETFSSSIRMEFGVDKSAVMHVKRGEIMESVGTQLTGSINLRALSASETYKYLGMSEALGINVTDMKQSLKERFFGRLKKVLNSLLSGGNKVRAFNGWVMPVLMYSFGILKWTQTELDALDQRVRTLLTANRLHHPRSSVMRLYIPRKCGGRGFLNAKTLHNREVCSLREYFLETDVGMHRDVVAADKGLTPLSLAKENWRKPVVLDTNDRLEVWKSKELHGRFFRALHGPDVDFQASVAWLRFGDLFGETEGFVFAIMDEVMMTNNYRRFIVKDGTVDICRACHRPGESIRHIISGCSRLANGEYLHRHNLVARIIHQQLALKYKLVESEVPYYRYMPDPVLENGHITLYWDRSIITDRTIVANKPDIVLVDRSERRAMIVDITIPHDENLVKAEKDKQIKYLDLAHEVVDMWEVDSAIIVPIVVTANGLIAKSLDQHLRRLSLGSWIKGLIQKAVLLDTARIVRKFLSLEP

SEQ ID NO: 12465 - protein, 1197 aa, Sesamia nonagrioides
MLTRSAARRARPPSPDSLPSSASPPPASSTTVSAVTTPAAAVASSSSDEYFSPPTTPPPVRRRGGRRPPDCLGPRGPSASDRVPAPGGSVQRMRWTQSINENVMRSYYGATEGGNNLTAYRVRMLSLFQVLEPAVNVSAQRLSDQVRVIQRNRMLDDTVLDRLRNEMQSSRVITHQSQSAEIPPQPTNYADEGSNDRATNVSTQCNEELRNALEAAIREYRFMSAELRPRLPRLPMHNRNRALMAALDAQLSNYFDTCENLTDTHSILYCAAVAACRVAHVKFSSDSRATRPKPVVPAWQHRIERRIGGARALIGKLICFREGNTRPRVMRFVRRAFSGTNTSPPNYMARITERIDFLKQKVYAWANRIRRYKRRVERYAQNRTFQSNQRCVYRDWERPEQGVADTCLPDDDAMCSFWRSIWSVPVSHTEGDWARDVERACDPIPEMGAITICPQDVARAVRPLPNWKSPGPDGLHNFWIKWFPRSHASLASQFQTALVSGSLPQFLTTGITHLLHKSGSTAEPKNYRPITCLPTVYKVLTSILKAKINNHIDSNSIMSVSQNGCRSGSRGTKELLLIDMAISQQVRRSRKDLSTCWIDYKKAYDSVPHTWLMRVLELYKVDTTLRTFLMTCMGQWRTVLRYPGCRNIQRNSEPIRIERGIFQGDSLSPLWFCLALNPLSTLLEDSGLGYRLRRGGQVISHLLYMDDLKLFAPNNLQLKELLKITETFSSAIRMEFGVDKCAVMHIKRGEIVESVGTQLTSSINLRALSASETYKYLGMSEALGINVTVMKQSLKERFFGRLKKVLNSLLSGGNKVRAFNGWVMPVLMYSFGILKWTQTELDALDQRVRTLLTANRLHHPRSSVMRLYIPRKCGGRGFLNAKTLHNREICSLREYFLETDVGMHRDVVVVDKGLTPLSLAKENWRKPVVLDTNDRMEVWKSKELHGRFFRALHGPDVDLQASVAWLRFGDLFGETEGFVCAIMDEVMMKNNYRRFIVKDGTVDICRACHRPGESIRHIISGCSRLANGEYLHRHNLVARIIHQQLALKYNLVESEVPYYRYMPDPVLENGHITLYWDRSIITDRTIVANKPDIVMVDRSERRAMIVDITIPHDENLVKAEKDKQIKYLDLAHEVVDMWEVDSAIIVPIVVTANGLIAKSLDQHLRRLSLGSWIKGLIQKAVLLDTARIVRKYLSLEP

SEQ ID NO: 12466 - protein, 1031 aa, Sesamia nonagrioides
MYRRQHIKLLHSVRFLFYNNNNNRANRSNDRATNVSTQCNEELINALEAAIREYRFTPAELRPRLPRLPMHNRNRALMAALDAQLSDYFDTCEDLTDTHSILYCAAVAACRVAHVKFPSDSRATRPKPVVPAWQHRIERRIGGARALIGKLICFREGNTRPRVMRFVRRAFAGTNISPQNYMARVTERIDFLKQKVYAWANRIRRYKRRVERYTQNRTFQSNERWVYRDWERPEQGVTDTCLPDDDAMCSFWRSIWSVPVSHTEGDWARDVERACDPIPEMGAITICPQDVACAVRPLPNWKSPGPDGLHNFWIKWFPRSHARLASQFQTALVSGSLPQFLTTGITHLLHKSGSTAEPKNYRPITCLPTVYKVLTSILKTKINKHIDSNSIMSASQNGCKSGSRGTKELLLIDMAISQQVRRSRKDLSTCWIDYRKAYDSVPHTWLLRVLELYKVDATLRTFLMSCMRTWRTVLRYPGCRNIQRNSEPIRIERGIFQGDSLSPLWFCLALNPLSTLLEDSGLGYRLRRGGQVISHLLYMDDLKLFAPNNSQLRELLKITETFSSSIRMEFGVDKCAVMHVKRGEIMESVGTQLTDSINLRALSASETYKYLGMSEALGINVTDMKQSLKERFFGRLKKVLNSLLSGGNKVRAFNGWVMPVLMYSFGILKWTQTELGALDQRVRTLLTANRLHHPRSSVMRLYIPRKCGGRGFLNAKTLHNREVCSLRDYFLVTDVGMHRDVVAADKGLTPLSLAKENWRKPVVLDTNDRMEVWKSKELHGRFFRALHGPDVDFQASVAWLRFGDLFGETEGFVFAIMDEVMMTNNYRRFIVKDGTVDICRACHRPGESIRHIISGCSRLANGEYLHRHNLVARIIHQQLALKYNLVESEVPYYRYTPDPVLENGYITLYWDRSIITDRTIVANKPDIVMVDRSERRAMIVDITIPHDENLVKAEKDKQIKYLDLAHEVVDMWEVDSAIIVPIVVTANGLIAKSLDQHLRRLSLGSWIKGLIQKAVLLDTARIVRKFLSLEP

SEQ ID NO: 12467 - protein, 1197 aa, Sesamia nonagrioides
MLTRSAARRARPPSPDSLLGSASPPPVSSATASAVTTPAAAVASSSSDEYFSPPTTPPPARRRGGRRPPDRLGPRGPSASDRVPAPGGSVQRMRWTQSINENVMRSYYGATEGGNNLTAYRVRMLSLFQVLEPAVNVSAQRLSDQVRVIQRNHMLDDTVLDRLRNEMQSNRIIAHQSQTAEIPPQPTNYADEGSNDRATNVSTQCNEELINALEAAIREYRFTPAELRPRLPRLPMHNRNRALMAALDAQLSDYFDTCEDLTDTHSILYCAAVAACRVAHVKFPSDSRATRPKPVVPAWQHRIERRIGGARALIGKLICFREGNTRPRVMRFVRRAFSGTNTSPQNYMARVTERIDFLKQKVYAWANRIRRYKRRVERYTQNRTFQSNERWVYRAWERSDQGVTDTCLPDDDATCSFWRNIWSVPVSHTEGSWTRVVERACDPVPEMGAITICPQDVARAVRPLPNWKSPGPDGLHNFWIKWFSRSHARLASQFQTALESGSLPQFLTTGVTHLLHKSGSTAEPKNYRPITCLPTVYKVLTSILKSKINTHIDSNSIMSASQNGCRSGSRGTKELLLIDMAISQQVRRSRKDLSTCWIDYKKAYDSVPHTWLMRVLELYKVDATLRTFLMTCMRTWRTVLRYPGCRNIQRNSEPIRIERGIFQGDSLSPLWFCLALNPLSTLLEDSGLGYRLRRGGQVISHLLYMDDLKLFAHTDSQLKELLKITETFSSSIRMEFGVDKCAVMHVKRGEIMESVGTQLTSSINLRALSASETYKYLGMSEALGINVTDMKQSLKERFFGRLKKVLNSLLSGGNKVRAFNGWVMPVLMYSFGILKWTQTELDALDQRVRTLLTANRLHHPRSSVMRLYIPRKCGGRGFLNAKTLHNREVCSLREYFLETDVGMHRDVVAADKGLTPLSLAKENWRKPVVLDTNDRLEVWKSKELHGRFFRALHGPDVDFQASVAWLRFGDLFGETEGFVFAIMDEVMMTNNYRRFIVKDGTVDICRACHRPGESIRHIISGCSRLANGEYLHRHNLVARIIHQQLALKYKLVESEVPYYRYMPDPVLENGHITLYWDRSIITDRTILANKPDIVLVDRTERRAMIVDITIPHDENLVKAEKDKQIKYLDLAHEVVDMWEVDSAIIVPIVVTANGLIAKSLDQHLRRLSLGSWIKGLIQKAVLLDTARIVRKFLSLEP

SEQ ID NO: 12468 - protein, 1197 aa, Sesamia nonagrioides
MLTRSAARRARPPSPDSLLSSASPPPASSATVSAVTTPAAAVASSSSDEYFSPPTTPPPARRRGGRRPPDRLGPRGPSASDRVPAPGGSVQRMRWTQSINENVMRSYYGATEGGNNLTAYRVRMLSLFQVLEPAVNLSAQRLSDQVRVIQRNHMLDDTVLDRLRNEMQSSRVIAHQSQTAEIPPQSTNYADEGSNDRATNVSTQCNEELINALEAAIREYRYTSAELRPRLPRLPMHNRNRALMAALDAQLSNYFDTCEDLTDTHSILYCAAVAACRVAHVKFPSDSRATRPKPVVPAWQHRIERRIGGARALIGKLICFREGNTRPRVMRFVRRAFAGTNISPQNYMARVTERIDFLKQKVYAWANRIRRYKRRVERYTQNRTFRSNERWVYRDWERPEQGVTDTCLPDDDAMCSFWRSIWSVPVSHTEGDWARDVERACDPIPEMGAITICPQDVACAVRPLPNWKSPGPDGLHNFWIKWFPRSHARLASQFQTALVSGSLPQFLTTGITHLLHKSGSTAEPKNYRPITCLPTVYKVLTSILKTKINKHIDSNSIMSASQNGCRSGSRGTKELLLIDMAISQQVRRSRKDLSTCWIDYRKAYDSVPHTWLMRVLELYKVDATLRTFLMSCMKTWRTVLRYPGCRNIQRNSEPIRIERGIFQGDSLSPLWFCLALNPLSTLLEDSGLGYRLRRGGQVISHLLYMDDLKLFAPNNSQLRELLKITETFSSSIRMEFGVDKYAVMHVKRGEIIESVGTQLTDSINLRALSASETYKYLGMSEALGINVTDMKQSLKERFFGRLKKVLNSLLSGGNKVRAFNGWVMPVLMYSFGILKWTQTELDALDQRVRTLLTANRLHHPRSSVMRLYIPRKCGGRGFLNAKTLHNREVCSLRDYFLVNDVGMHRDVVAADKGLTPLSLAKENWRKPVVLDTNDRMEVWKSKELHGRFFRALHGPDVDLQASVAWLRFGDLFGETEGFVFAIMDEVMMTNNYRRFIVKDGTVDICRACHRPGESIRHIISGCSRLANGEYLHRHNLVARIIHQQLALKYNLVESEVPYYRYTPDPVLENGYITLYWDRSIITDRTIVANKPDIVMVDRSERRAMIVDITIPHDENLVKAEKDKQIKYLDLAHEVVDMWEVDSAIIVPIVVTANGLIAKSLDQHLRRLSLGSWIKGLIQKAVLLDTARIVRKFLSLEP

SEQ ID NO: 12469 - protein, 868 aa, Sesamia nonagrioides
MRFVRRAFSGTDVSTRDYLLRVTERIDFLKQKIYAWANRIRRYRRRVERYSQNRNFQSDERWVYRAWERSDQGVTDTCLPDDDATRSFWRNIWSVPVSHTEGGWTRDVERACDPVPEMGAITICPQDVARAVRPLPNWKSPGPDGLHNFWIKWFSGSHACLASQFQTALESGSLPQFLTTGITHLLHKSGSTAEPKNYRPITCLPTVYKVLTSILKAKINTHIDSNSIMSASQNGCRNGSRGTKELLLIDMAISQQVRRSRKDLSTCWIDYKKAYDSVPHTWLMRVLELYKVDATLRTFLMTCMSQWRTVLRYPGCRNIQRNSEPIRIQRGIFQGDSLSPLWFCLALNPLSTLLEDSGLGYRLRRGGQVISHLLYMDDLKLFAHTNSQLKELLKITETFSSAIRMEFGVDKCAVMHVQRGEIVESVGTQLTGSINLRSLSASETYKYLGMSEALGINVTDMKQSLKERFFGRLKKVLNSLLSGGNKVRAFNGWVMPVLMYSFGILKWTQTELDALDQRVRTLLTANRLHHPRSSVMRLYIPRKCGGRGFLNAKTLHNREVCSLREYFLKTDVGMHRDVVAVDKGLTPLSLAKENWRKPVVLETNDRMEVWQSKELHGRFFRALRGPDVDFQASVAWLRYGDLFGETEGFVCAIMDEVMMTNNYQKFIVKDGTVDICRACHRPGESIRHIISGCSSLANGEYLHRHNLVARIIHQQLALKYNLVESEVPYYRYMPEPVLENGHITLYWDRSIITDRTIVANKPDIVMVDRSERRAMIVDITIPHDENLVKAEKDKQIKYLDLAHEVVDMWEVDSAIIVPIVVTANGLIAKSLDQHLRRLSLGGWIKGLIQKAVLLDTARIVRKFLSLEP

SEQ ID NO: 12470 - protein, 1047 aa, Sesamia nonagrioides
MLDDVVLDRLRLESRNSHVTPASSLVAVQLNSVSPRPNRVDEEDDDRAISVSPQCIEKLRSALEDAFCEYRSTPPELRPRLPRLPMHKKNKALVCALDSQLSYYLKDSKDLTDTHSILYCGAVAICRVAHVKFPDSDRATRPKSAVPAWQCRIERRIGETRALIGKLTSFREGNTRPRVMRFVRRAFSGTDTSTRDYLFRVTERIDFFKQKIYAWANRIRRYKRRVERYSQNRNFQSDERRVYRAWERSDQGVTDTCLPDDDAMCSFWRNIWSVPVSHTEGSWTRVVERACDPVPEMGAITICPQDVARAVRPLPNWKSPGPDGLHNFWIKWFSGSHARLASQFQTALESGSLPQFLTTGVTHLLHKSGSTAEPKNYRPITCLPTVYKVLTSILKSKINTHIDSNSIMSASQNGCRSGSRGTKELLLIDMAISQQVRRSRKDLSTCWIDYKKAYDSVPHTWLMRVLELYKVDATLRTFLMTCMRTWRTVLRYPGCRNIQRNSEPIRIERGIFQGDSLSPLWFCLALNPLSTLLEDSGLGYRLRRGGQVISHLLYMDDLKLFAHTDSQLKELLKITETFSSSIRMEFGVDKCAVMHVKRGEIMESVGTQLTSSINLRALSASETYKYLGMSEALGINVTDMKQSLKERFFGRLKKVLNSLLSGGNKVRAFNGWVMPVLMYSFGLLKWTQTELDALDQRVRTLLTANRLHHPRSSVMRLYIPRKCGGRGFLNAKTLHNREVCSLREYFLETDVGMHRDVVAADKGLTPLSLAKENWRKPVVLDTNDRLEVWKSKELHGRFFRALHGPDVDFRASVAWLRFGDLFGETEGFVFAIMDEVMMTNNYRRFIVKDGTVDICRACHRPGESIRHIISGCSRLANGEYLHRHNLVARIIHQQLALKYNLVESEVPYYRYMPDPVLENGHITLYWDRSIITDRTIVANKPDIVLVDRSERRAMIVDITIPHDENLVKAEKDKQIKYLDLAHEVVDMWEVDSAIIVPIVVTANGLIAKSLDQHLRRLSLGSWIKGLIQKAVLLDTARIVRKFLSLEP

SEQ ID NO: 12471 - protein, 1106 aa, Apamea monoglypha
MRWTQSINENVMRSYYGATEGGNNLTAYRVRMLSLFQVLEPAVNVTAQRLSDQVRVIQRNHMLDDTVLDRLRNEMQSSHVIAPQSQTAAVLPQSNTSHADEGSNDRATNVSIQCNEELRNALEGAIREYRFMSPELRPRLPRLPMHNKNRALVAVLDAQLSSYFDVCEDLTDTHSILYCAAVAACRVAHVKFASDSRATRPKPAIPPWQCRIERRIGGARALIGKLICFREGNTRPRVMRFVRRAFSGTDISSQDYLSHVTERIDFLKQKVYAWANRIRRYKRRVDRYTQNRTFQSDERWVYRGWERPDQGVADTCLPDDDAMYSFWRSIWSVPVSHTEGDWAREVKRACDPIPEMEAITICAQDVARAVRPLPNWKSPGPDGLHNFWIKWFTRSHARLASQFQIALESGSLPQFLTTGVTHLLHKSASTAEPKNYRPITCLPTVYKVLTSILRAKINKHIDTNSIMSASQNGCKNGSRGTKELLLIDMAISQQVRRSRKDLSTCWIDYKKAYDSVPHTWLMRVLELYKVDTTLRTFLMTCMGQWRTVLRYPGCRNIQRNSEPIRIERGIFQGDSLSPLWFCLALNPLSTLLEDSGLGYRLRRGGQVISHLLYMDDLKLFAPNNLQLMELLKITETFSSAIRMEFGVDKCAVMHVKRGEIVESVGTQLSDSTNLRALSASETYKYLGMSEALGINVTDMKQSLMERFFGRLKKVLNSLLSGGNKVRAFNSWVMPVLMYSFGILKWTQTELDALDRRVRTLLTANRMHHPRSSVMRLYIPRKCGGRGFLNAKTLHNREICSLREYFQETDVGMHRDVVAVDKGLTPLSLAKENWRKPVVLDTNDRLEVWQSKELHRRFYRALHGPDVDLLASVAWLRFGDLFGETEGFVCAIMDEVMMTNNYLRFIVKDGTVDICRACHRPGESIRHIISGCSRLANGEYLYRHNLVARIIHQQLALKYSLVESEVPYYRYVPDPVLENGHITLYWDRSIITDRTIVANKPDIVVVDRSERRAMIVDITVPHDENLVKAEKDKQIKYLDLAREVVDMWDVDSAIIVPIVVTANGLIAKSLDQHLRRLSLGSWIKGLIQKAVLLDTARIVRRFLSLEP

SEQ ID NO: 12472 - protein, 1200 aa, Apamea monoglypha
MMMLTRSAARRARPPPPDSSLSSASPPPVPSLTVSAVTTPAAVVASSSSDEYFSPPTTPPPARRRGGRRPPDGLGPRGPPASDRVPALGGSVQRMRWTQSINENVMRSYYGATEGGNNLTAYRVRMLSLFQVLEPAVNVTAQRLSDQVRVIQRNHMLDDTVLDRLRNEIQSSHVIAPQSQTAAVLPQSNTSHADEGSNDRATNVSIQCNEELRNALEGAIREYRFMSPELRPRLPRLPMHNKNRALVAVLDAQLSSYFDVCEDLTDTHSILYCAAVAACRVAHVKFVSDSRATRPKPAIPPWQCRIERRIGGARALIGKLICFREGNTRPRVMRFVRRAFSGTDISSQDYLSRVTERIDFLKQKVYAWANRIRRYKRRVDRYTQNRTFQSDERWVYRGWERPDQGVADTCLPDDDAMYSFWRSIWSVPVSHTEGDWAREVERACDPIPEMEAITICAQDVARAVRPLPNWKSPGPDGLHNFWVKWLTRSHARLASQFQIALESGSLPQFLTTGVTHLLHKSASTAEPKNYRPITCLPTVYKVLTSILRAKINKHIDTNSIMSASQNGCKNGSRGTKELLLIDMAISQQVRRSRKDLSTCWIDYKKAYDSVPHTWLMRVLELYKVDTTLRTFLMTCMGQWRTVLRYPGCRNIQRNSEPIRIERGIFQGDSLSPLWFCLALNPLSTLLEDSGLGYRLRRGGQVISHLLYMDDLKLFAPNNLQLMELLKITETFSSAIRMEFGVDKCAVMHVKRGEIVESVGTQLSDSTNLRALSASETYKYLGMSEALGINVTDMKQSLKERFFGRLKKVLNSLLSGGNKVRAFNSWVMPVLMYSFGILKWTQTELDALDRRVRTLLTANRLHHPRSSVMRLYIPRKCGGRGFLNAKTLHNREICSLREYFLETDVGMHRDVVAVDKGLTPLSLAKENWRKPVVLDTNDRMEVWQSKELHGRFYRALHGPDVDLLASVAWLRFGDLFGETEGFVCAIMDEVMMTNNYRRFIVKDGTVDICRACHRPGESIRHIISGCSRLANGEYLHRHNLVARIIHQQLALKYNLVESEVPYYRYVPDPVLENGNITLYWDRSIITDRTIVANKPDIVVVDRSERRAMIVDITVPHDENLMKAEKDKQIKYLDLAREVVDMWHVDSAIIVPIVVTANGLIAKSLDQHLRRLSLGSWIKGLIQKAVLLDTARIVRRFLSLEP

SEQ ID NO: 12473 - protein, 1198 aa, Apamea monoglypha
MLTRSAARRARLPSPDSSLSSASPPPVPSPTVSAVTTPAAVVASSSSDEYFSPPTTPPPARRRGGRRPPDGLGPRGPLASDRVPAPGGSVQRMRWTRSINENVMRSYYGATEGGNNLTAYRVRMLSLFQVLEPAVNVSAQRLSDQVRVIQRNHMLDDTVLDRLRSEMQSSHVIAPQSQTAAVLPQSNTSHADEGSNDRTTNVSIQCNEELRNALEGAIREYRFMSPELRPRLPRLPMHNKNRALVAVLDAQLSSHFDACEDLTDTHSILYCAAVAACRVAHVKFDSDSRATRPKPAIPAWQCRIERRIGGARALIGKLICFREGNTRPRVMRFVRRAFLGTDISSQDYLSRVTERIDFLKQKVYAWANRIRRYKRRVERYTQNRTFQSDERWVYRGWERPDQSVADTCLPDDDAMCSFWRSIWSAPVSHTEGDWTGKIERACELIPEMGAITICPQDVARAVRPLPNWKSPGPDGLHNFWIKWFQRSHAPLAAQFQSALESGLLPQFITTGITHLLHKSGSTADPKNYRPITCLPTIYKVLTSILRAKINKHIDSNSIMSVSQNGCRNGSRGTKELLLIDMAISQQVRRSRKDLSTCWIDYKKAYDSVPHTWLMRVLELYKVDTTLRTFLMTCMGQWRTVLRYPGCRNIQRNSEPIRIERGIFQGDSLSPLWFCLALNPLSTLLDDSGLGYRLRRGGQVISHLLYMDDLKLFAPNNLQLMKLLKITETFSSAIRMEFGVDKCAVMHVKRGEIVESVGTQLSDFTNLRALSAAETYKYLGMSEALGINVTDMKQSLKERFFGRLKKVFNSLLSGGNKVRAFNSWVMPVLMYSFGILKWTQTELEALDRRVRTLLTANRMHHPRSSVMRLYIPRKCGGRGFLNAKTLHNREICSLREYFLETDVGMHRDVVAVDKGLIPLSLAKENWRKPVVLDTNDRMEVWQSKELHGRFYRALHGPDVDLLASVAWLRFGDLFGETEGFVCAIMDEVMMTNNYRRYIVKDGTVDICRACHRPGESIRHIISGCSRLANGEYLHRHNLVARIIHQQLALKYSLVESEVLYYRYVPDPVLENGNITLYWDRSIITDRTIVANKPDIVVVDRSERRAMIVDITVPHDENLVKAEKDKQIKYLDLAREVVDMWDVDSAIIVPIVVSANGLIAKSLDQHLRRLSLGSWIKGLIQKAVLLDTARIVRRFLSLEP

SEQ ID NO: 12474 - protein, 1045 aa, Apamea monoglypha
MLDDTVLDRLRNEIQSSHVIAPQSQTAAVLPQSNTSHADEGSNDRATNVSIQCNEELRNALEGAIREYRFMSPELRPRLPRLPMHNKNRALVAVLDAQLSSYFDVCEDLTDTHSILYCAAVAACRVAHVKFVSDSRATRPKPAIPPWQCRIERRIGGARALIGKLICFREGNTRPRVMRFVRRAFSGTDISSQDYLSRVTERIDFLKQKVYAWANRIRRYKRRVDRYTQNRTFQSDERWVYRGWERPDQGVADTCLPDDDAMYSFWRSIWSVPVSHTEGDWAREVERACDPIPEMEAITICAQDVARAVRPLPNWKSPGPDGLHNFWVKWLTRSHARLASQFQIALESGSLPQFLTTGVTHLLHKSASTAEPKNYRPITCLPTVYKVLTSILRAKINKHIDTNSIMSASQNGCKNGSRGTKELLLIDMAISQQVRRSRKDLSTCWIDYKKAYDSVPHTWLMRVLELYKVDTTLRTFLMTCMGQWRTVLRYPGCRNIQRNSEPIRIERGIFQGDSLSPLWFCLALNPLSTLLEDSGLGYRLRRGGQVISHLLYMDDLKLFAPNNLQLMELLKITETFSSAIRMEFGVDKCAVMHVKRGEIVESVGTQLSDSTNLRALSASETYKYLGMSEALGINVTDMKQSLKERFFGRLKKVLNSLLSGGNKVRAFNSWVMPVLMYSFGILKWTQTELDALDRRVRTLLTANRLHHPRSSVMRLYIPRKCGGRGFLNAKTLHNREICSLREYFLETDVGMHRDVVAVDKGLTPLSLAKENWRKPVVLDTNDRMEVWQSKELHGRFYRALHGPDVDLLASVAWLRFGDLFGETEGFVCAIMDEVMMTNNYRRFIVKDGTVDICRACHRPGESIRHIISGCSRLANGEYLHRHNLVARIIHQQLALKYNLVESEVPYYRYVPDPVLENGNITLYWDRSIITDRTIVANKPDIVVVDRSERRAMIVDITVPHDENLVKAEKDKQIKYLDLAREVVDMWHVDSAIIVPIVVTANGLLAKSLDQHLRRLSLGSWIKGLIQKAVLLDTARIVRRFLSLEP

SEQ ID NO: 12475 - protein, 1197 aa, Furcula furcula
MLTRSKVAQLRPPDSSPCSASQPPAPSTDGTPPAAVASSESDEYFSPPSSPPPVRRRRGRPPRELGRLGQPAPNRVLAPGGVVRRMKWTSSINESVMRAYYEATEGGTNLTAYRDRMLSLFQVLEPAVNVSAQRLSDQVRAIQRGHMLDDTVLDRLRSVVQGSRVAPCIPSQAVAPAVDTAPAPRLAANSDDDRDDTTTNVSTQYINLLRSTLEDVVREYRTMPQSLRPRLPRLPMHKRNRALVCALDSLLSSYFDSSEDLADAHSLLYCAAMTACRVARVKLPNTDAATRPGPAVPAWQCRIERRIGEARVLIGKLTCFREGNTRPRVMRFVRRAFSGTGIGPREYVSRITERIDFLKQKVCAWANRIRRYRARVDRYSQNNMFQRDQRWVYRSWERPSQTGGEAQRPDDDAMIRFWRNIWSVPVTHSEGDWIRDVEQVCEPIPEMGAITIRPQDVADAVRPLPNWKAPGPDGLHNFWLKWLRSSHACLASLFQSAVESGSLPDFLTTGITHLLHKTNSTTDPKNYRPITCLPTVYKTLTSILRAKIYRHVEGNSIMSASQNGCKSGARGTKELLLIDMAICQQARRNRKDLSTCWIDYKKAYDSVPHTWLMRVLELYKVNTTLCTFLASCMRQWRTVLLYPGSRQTLGDGEPIRIERGIFQGDSLSPLWFCLALNPLSTLLKSSGLGCRLRRGGQVISHLLYMDDLKLFAPTELQLMGLLKVTETFSNSIRMEFGVDKCAVMHVKRGRLVESRSVQLSDSTDLRTLSAIETYKYLGMSQALGINETDMKQSLRERFLGRLRKVLKSLLSGGNRVRAYNGWVMPVLMYSFGILKWTQTELDTLDRTVRTLLTTYRMHHPRSSVMRLYIPRKCGGRGFLNAKTLHNREICNLREYFLHCGGEMQTDVVAVDNGLTPLSLAKGNWRKPVVLTTGDREAVWQSKELHGRFYRALHGPDVDFSASVAWLRFGDLFGETEGFVCAIMDEVVMTNNYRKYILRDGTIDICRACHRPGESLRHIISGCSRLANGEYLHRHNQVARIIHQQLALKYRLVTSEVPYYRYVPEPVLEDGHITLYWDRSIITDRTIVANKLDIVLIDRTERRAMIVDVTVPHDENLVKAEKDKECKYLDLAHEVVDMWDIDRAIIVPIVVSVHGLMAKSLDKHLKRLTLDGWIKGQMQKAVLLETARIVRKFLSLEP

SEQ ID NO: 12476 - protein, 1132 aa, Furcula furcula
MGRLGQPAPNRVLAPGGVVRRMKWTSSINESVMRAYYEATEGGTNLTAYRNRMLSLFQALEPAVNVSAQRLSDQVRAIQRGHMLDGPVLDRLRSEVQGSRVAPCIPSSQAVAPVVNTALVPRLAANSDDDRYDMTTDVSTNVSTQLRSTLEDVVREYRTMPQSLRPRLPRLPMHRRNRALVCALDSLLSSYFDSSEDLADAHALLYCAAITACRVARVKFPDAATRPKPAVPAWQYRIERRIGEARVLIGKLTCFREGNTRPRVMRFVRRAFSGTGIDPREYLSRVTERIDFLKQKVCAWANRIRRYRARVDRYSQNNMFQRDQRWVYRSWERPSQTVGEVQRPDDDAMIRFWRNIWSVPVAHSEGDWIGDVEEVCEPLPEMGPITIGPQDVADAVRPLPNWKAPGPDGLHNFWLKWLRSSHVCLASLFQSALESGSLPEFMTTGITHLLHKTDSTTNPKNYRPITCLPTVYKTLTSILRAKIYRHVEDNSIMSSSQNGCRSGARGTKELLLIDMAICQQARRNRKDLSTCWIDYKKAFDSVPHTWLMRVLELYKVNTTLRTFLASCMRQWRTVLLYPGSRQTLGNGDPIRIERGIFQGDSLSPLWFCLALNPLSTLLKSSGLGCRLRRGGQVISHLLYMDDLKLFAPTELQLTGLLKVTETFSNSIRMEFGVDKCAVMHVKRGRMVESRSVQLSDSTDLRTLSATETYKYLGMSQALNINETDMKQSLRERFLGRLRKVLKSLLSGGNRVRAYNGWVMPVLMYSFGILKWTQTELDALDRTVRTLLTTYRMHHPRSSVMRLYIPRKCGGRGFLNAKTLHNREIYNLREYFLHCGGEMHTDVVAVDNGLTPLSLAKGNWRKPVVLTTGDREAVWQSKELHGRFYRALHGPDVDFSASVAWLRFGDLFGETEGFVCAIMDEVVMTNNYRKYILRDGTIDICRACHRPGESLRHIISGCSRLANGEYLHRHNQVARIIHQQLALKYRLVTSEVPYYRYVPEPVLEDGHITLYWDRSIITDRTIVANKPDIVLIDRTERRAMIVDVTVPHDENLVKAEKDKQCKYLDLAHEVVDMWDIDNAIIVPIVVSAHGLMAKSLDKHLKRLTLDGWIKGQMQKAVLLETARIVRKFLSLEP

SEQ ID NO: 12477 - protein, 1202 aa, Spodoptera exigua
MLTRAAARRARPPPPASSLSSASPPPESSPTVSDVTPAVAAASSSSDEYYSPPTTPPPTRRRGGRRPPARLGPRGPPASDRVPAVGGSVQRMRWTQAINENVMRAYYGATEGGNNLTAYRVRMLSLFQVLEPAVNVSAQRLSDQVRVIQRNRMLDDTVLDRLQTEMGSRASASSSRTVVPATLPLTSHGIVSTVADEESTDTVAHVSTQCIDELRSALECAIREYRYISPELRPRLPRLPMHNKNRALVAALDSQLSNYLDDCEDLGDTHSIMYCAAVAACRVAHVKFPTNDVTTRPKPAVPAWQRRIECRIAGARALIGKLICFREGNTRPRVMRFVRRAFSGTDISPRDYISRVTERIDFLKQKVYAWANRIRRYRRRVERYTQNRTFRSNERWVYRTWERPDHGVTDRRLPDDDAMCSFWRSIWSVPVSHTEGDWIRDVERACDPIPQMGTINISPQDVARAVRPLPNWKSPGPDGLHNFWIKWLTRAHARLASQFQSAVESGSLPKFLTTGVTHLLHKSGSTAEPKNYRPITCLPTVYKVLTSILRSKINSHIDKNKIMSTAQNGCKNGSRGTKELLLIDMAISQQVRRSRKDLSTCWIDYKKAYDSIPHTWLMRVLELYKIDTILRTFLMSCMRQWSTVLRYPGCRHTQRNSEPVRIERGIFQGDSLSPLWFCLALNPLSTLLENSGLGYRLKRGGQVISHLLYMDDLKLFAPNKLQLMELLKLTETFSSAIRMEFGVDKCAIMHVKRGEVVESVGTQLTDSINLRSLSPTETYKYLGMSEALGINVTDMKQSLKERFFGRLKKVFNSFLSGGNKVRAFNGWVMPVLMYSFGVLKWSQTEMDALDRQVRTMLTAYRMHHPRSSVMRLYIPRKCGGRGFLNAKTLHNREVCSLREYFLAADVDMHRDVVAVDKGLTPLSLAIENWRKPVVLDTNARREVWQSKELHGRFFRALHGPDVDQEASVAWLRFGDLFGETEGFVCAIMDEVIMTNNYRRFIVKDGTVDICRACHRPGESIRHIISGCSRLANGEYLHRHNLVARIIHQQLALKYSLVESEVPYYRYEPDPVLDNGHITLYWDRSIITDRTIVANKPDIVVVDRKERRAMIVDIAVPHDENLVKAEKDKLIKYIDLAREVVDMWEVDSAIIVPIVVSANGLIAKSLDQHLRRLSLGGWIKGLIQKVVLLDTARIVRRFLSLEP

SEQ ID NO: 12478 - protein, 1200 aa, Arctia plantaginis
MITRARSKAQLTSPDSSLRSVLPSTETTTEAPAVAEASSSTSSDEFFSPPTSPTPVRRQGRGRPPICLGSRGPLTSNRVPATGGNVRRMKWTNSINENVMRAYYRATEMGTNLTAYRVRLVSLFQELEPAVNVSAQRLSDQVRAIQRCHLLDDAVLERIRSDIRNSLIIPSSSHTVDLVANSTPQFVSHTNDVDELVEGEVISVSTQYNDRIRSALEDAILEYRYVHWNNRPRLSRLPIHKRNLALVGALDSLLPDYLDNSEDLGDTHSILYCAAVAVCRVAGVNIVENVTTTRPKSTVPAWQCRIERRIAETRVLIGKLISFRSGNTRPRVMRFVKQAFLGTTIGPQQYMSCVTEHIDFLKQKIYAWANRIRRYKKRIDRYNQNRMFQRNEKWVYRKWEEPDPCVSHGHLPDENVTHTFWRNIWSVPVTHIEGDWLRDVRRSCESITPMEPVIIDKDDVSCAVRSLPNWKSPGLDGLHNFWLKWFRSSHACLASQFQAALNSGSLPQFLTTGITHLLYKSGSVMDPKNFRPITCLPTMYKLLTSILRLKITLHINNNSIMSVSQNGCRSGSRGTKDLLIIDRAISQQVRRNRKSLATCWIDYKKAYDSVPHTWLLRVLELYKIDTTLCTFLKSCMGQWRTALRYPGCRQTTVIDAPIKIERGIFQGDSLSPLWFCLALNPLSTLLEGSGLGYRLQKDDQVISHLLYMDDLKLLAPTKLQLSALLKVTENFSNSIKMEFGVDKCAVMYVKKGEIVESEGIELSDSTKLRSLSATETYKYLGISQSLGIPESDMKQTLQERFFGRLKKVLKSLLSGGNKVRACNGWVMSILMYSFGILEWTQTELDALDRRVRTLLTAFRMHHPRSSVMRLYIPRKLGGRGLLNIKTLHNREICNLREYFLHTDVGMHRNVVAVDIGFTPLALAKENWRKPVVFSTNDRREVWKGKELHGRFYRALNGSDIDFKASTTWLRYGDLFGETEGFVCAIMDEVIMTNNYRKYILKDGTVDICRACHRPGESIRHIISGCSRLANGEYLHRHNQVARIVHQQLALKYHLVNLEVPYYRYVPDPVLENGRATLYWDRSIITDRTIVANKPDIVVIDRLERRAMIVDIAVPHDENLVKVEKEKQIKYLDLSHEIVDMWNVDSVIIVPIVVSAHGLIAKSLDQHLKRLTLDGWIKGLIQKAVLLDTARIVRRFLSLQS

SEQ ID NO: 12479 - protein, 1200 aa, Arctia plantaginis
MITRARSKAQLTSPDSSLRSVLPATETTTEAPAVAEASSSTSSDEFFSPPTSPTPVRRQGRGRPPICLGSRGPLTSNRVPATGGNVRRMKWTNSINENVMRAYYRATEMGTNLTAYRVRLVSLFQELEPAVNVSAQRLSDQVRAIQRCHLLDDAVLERIRSDLRNSLIIPSSSHTVDLVATSTPQLVSHTNDVDELVEGEVISVSTQYNDRIRSALEDAILEYRYVNWNNRPRLSRLPIHKRNLALVGALDSLLPDYLDNSEDLGDTHSILYCAAVAVCRVAGVNIVENVTTTRPKSTVPAWQCRIERRIAETRVLIGKLISFRSGNTRPRVMRFVKQAFLGTTIGPQQYMSCVTERIDFLKQKIYAWANRLRRYKKRIDRYNQNRMFQRNEKWVYRKWEEPDPCVSHGHLPDENVTHTFWRNIWSVPVTHIEGDWLRDVRRSCESINPMEPVIIDKDDVSCAVRSLPNWKSPGLDGLHNFWLKWFRSSHACLASQFQAALNSGSLPQFLTTGITHLLYKSGSVMDPKNFRPITCLPTMYKLLTSILRLKITLHINNNSIMSVSQNGCRSGSRGTKDLLIIDRAISQQVRRNRKSLATCWIDYKKAYDSVPHTWLLRVLELYKIDTTLCTFLMSCMGQWRTVLRYPGCRQTTVIDAPIKIERGIFQGDSLSPLWFCLALNPLSTLLEGSGLGYRLQKDDQVISHLLYMDDLKLLAPTKLQLSALLKVTENFSNSIKMEFGVDKCAVMYVKKGEIVESEGIELSDSTTLRSLSATETYKYLGISQSLGIPESDMKQTLQERFFGRLKKVLKSLLSGGNKVRACNGWVMPILMYSFGILKWTQTELDALDRRVRTLLTAFRMHHPRSSVMRLYIPRKLGGRGLLNIKTLHNREICNLREYFLHTDVGMHRNVVAVDIGFTPLALAKENWRKPVVFSTNDRREVWKGKELHGRFYRALNGSDIDFKASTTWLRYGDLFGETEGFVCAIMDEVIMTNNYRKYILKDGTVDICRACHRPGESIRHIISGCSRLANGEYLHRHNQVARIVHQQLALKYRLVNLEVPYYRYVPDPVLENGRATLYWDRSIITDRTIVANKPDIVVIDRLERRAIIVDIAVPHDENLVKVEKEKQIKYLDLSHEIVDMWNVDSVIIVPIVVSAHGLIAKSLDQHLKRLTLDGWIKGLIQKAVLLDTARIVRRFLSLQS

SEQ ID NO: 12480 - protein, 1046 aa, Mamestra configurata
MLDDAVLDRLRLESRSGRVSPTSPPAAVQIQSSVSPRPNNVGEDDDDGAISVSTQCNERLRSALEDAFREYRTTPPELRPRLPRLPMHNKNRALVCALDSQLTNCFDSSEDLADTHSILYCAAAAACRVAHVKFPNSDRATRPAVPAWQCRIERRIGEARALIGKLICFREGNTRRRVMRFVRRAFSGTDTSPRDYLTRVTERIDFLKQKIYAWANRIRRYKRRVERYTQNRTFQSNERWVYRAWERPDQGVTDTRLPDDDVMCSFWRNIWSVPVSHTEGDWTREVERACDPIPEMGAITISPQDVARAVRPLPNWKSPGPDGLHNFWIKWFKRSHARLASQFQSALESGSLPQFLTTGITHLLHKSGSTAEPKNYRPITCLPTVYKVLTSILRAKINHHIETNSIMSASQNGCRNGSRGTKELLLIDVAISQQVRRSRRDLSTCWIDYKKAYDSVPHTWLMRVLELYKVDAVLRTFLMSCMGQWRTVLRYPGCRQIQANSDPIRIERGIFQGDSLSPLWFCLALNPLSTLLEGSGQGYRLKRGGQVISHLLYMDDLKLFAPNNLQLMKLLKVTETFSSAISMEFGVDKCAVMHVKRGEIMESVGTQLSDSINLRSLSSTETYKYLGMSEALGINAADVKQSLKERFFGRLNKVLNSLLSGGNKVRAFNGWVMPVLMYSFGILKWTQTELDALDRRVRSLLTANRMHHPRSSVMRLYIPRKCGGRGFLNAKTLHNREICSLREFFLEADVGMHRDVVAVDKGLTALSLANENWRKPVVLDTNDRREVWQSKELHGRFYRVLHGPDVDFLASVAWLRFGDLFGETEGFVCAIMDEVMMTNNYRKYIVKDGTVDICRACHRPGESIRHIISGCSSLANGDYLHRHNLVARIIHQQLALKYNLVESEVPYYRYVPDPVLENGNCTLYWDRSIITDRTIVANKPDIVVIDRLERRAMIVDIAVPHDENLVKTEKDKQTKYLDLAREVVDMWDVNTAVIVPIVVTANGIIAKSLDQHLKRLSLGSWIKGLIQKAVLLDTARIVRRFLSQGP

SEQ ID NO: 12481 - protein, 1202 aa, Amphipyra berbera
MLTRSRTRTTEQRSARPPPPDSPFSSASQPPELGLPVTPAAAASSSSSDEYFSPPTSPRPVRRQGRGRPPNSLGPRGPPAPSRVLAAGGYVQRMKWTQSINENVMRAYYGSTEGGTNLTAYRVRMLTLFQELEPAINVSAQRLSDQVRVIQRNHRLDDAALDRLRLEVQNSRAIPVPSQTAVHQLINVAPPRSDRVDGDEDDGAVTVSSQYNDRLRSALEDAIRECRANPESRPRLPRLPMHNKNRALVCALDSLLASYFESSEDLGDTHSILYCAAVAACRVANVKFNNSERATRPKLAVPAWQCRIERRIDETRALIGKLICFREGNTRPRVMRFVRRAFSGTGISPREYTSRATERIDFLKQKVCAWASRIRRYKRRVERYTQNRMFQCDQRWVYRAWERPDQSVSGGRLPDDDAMSSFWRSIWSVPVIHTEGDWMRDIERTCESIEEMGEIVISPQDVAGAVRPLPNWKSPGPDGLHNFWIKWLRSSHARLASQFQSSLESGSLPQFLTTGVTHLLHKSGSTAEPKNYRPITCLPTVYKLLTSILRSKINTHIGNNSVLSSSQNGCRNGSRGTKELLLIDTAISQQVRRSQKSLSTCWIDYKKAYDSVPHTWLMRVLELYKINTTLRTFLRSCMGQWRTVLRYPGCQPIRGSGEPIRIERGIFQGDSLSPLWFCLALNPLSTLLEGSGLGYPLRRGGQVVSHLLYMDDLKLFAPTKLQLVDLLKVTETFSNSIRMEFGVDKCAVMHVRRGRIMESEGLQLSDSIHLSPLSANDTYKYLGMSEGLGISEADMKQSLRERFFGRLKKVLKSLLSGGNKVRAFNGWIMPVLMYSFGILKWTQTELDALDRRVRTLLTANRMHHPRSSVMRLYIPRKCGGRGLLNAKTLHNREVCSLREFFLHADAGMHRDVVAVDKGLTPLSLARENWRKPVVLSTNDRREIWQSKELHGRFYRALHGPDVDFLASVSWLRFGDLFGETEGFVCAIMDEVIMTNNYRKYIVKDGTVDICRACHCPGESLRHIISGCSRLANGEYLHRHNQVARIIHQQLALKYNLVESEVPYYRYVPDPVLENGRITLYWDRSIITDRTIVANKPDIVVIDRSERRTIIVDVTIPHDGNLVKAEKDKQIKYLDLAHEVVNMWDVESATIVPIVVTANGLMAKSLDKHLMRLSLGGWIKGLIQKAVLLDTTRIVRRFLSLEP

SEQ ID NO: 12482 - protein, 1203 aa, Amphipyra berbera
MLTRARARKQTAHPRSPDSSLSSASQPPESSPPVSAVTPAAAVASSSSDEYYSPPSSPPPVRRRGGARPPACLGPRGQPATNRVPAAGGNVSRMRWTQSINENVMRAYYGATEGGINLTAYRERMLFLFQVLEPAINVSAQRLSDQVRVVQRNRRLDDTVLERLRSEARNSQTVTFPVQAAVQMQPLAVPPRPIHVDGEGDGEAINVSNQCSEELRSALDDAILEFRTTPPEIRPRLPRLPMHGKNRALMCALDSLLSNYFDGSEDLADTHSILYCAAIAACRVAHVKFTENERATRPKPAVPAWQSRIERRIGGARVLIGKLICFREGNNRPRVMRFVRRAFSGTDISPRDYMSRVTERIDFLKQKVYAWANRIRRYKRRVERYTQNRIFQSDQRRVYRAWERPDFGGGDVRLPDDDALSSFWRSIWSVPIAHTEDGWMRDIEQACEPIAEMEPITITPQDVADAARPLPNWKSPGPDGLHNFWLKWLRSSHARLASQFQSSLESGSLPQFLTTGVTHLLYKSGSTAEPKNYRPITCLPTVYKLLTSILRVKITTHIDNNCIMSASQNGCRKGSRGTKELLLIDMAISQQVRRSQKDLSTCWIDYKKAYDSVPHSWLMRVLELYKINTTLRTFLMSCMRHWRTVLRYPGCRRIRGSGEQIRIERGIFQGDSLSPLWFCLALNPLSTLLEGTGLGYQLRRGGQVISHLLYMDDLKLFAPTDVQLMELLKVTENFSNSIRMEFGVDKCAVMHVKRGRIAESEGIQLPNSVQLRSLSPTETYKYLGMSEALGISETDMRQSLRERFFGRLNKLLKSFLSGGNKVRAFNGWVMPVLMYSFGTLKWTQADLDALDRRVRALLTAHRMHHPRSSVMRLYIPRKCGGRGFLNAKTLHNREVYSLREYFLQAEGVMHRDVVAVDKGFTPLALARENWRKPAVLSTNDREVVWQSKELHGRYYRALHGPDVDFSASVSWLRSGNLFGETEGFVCAIMDEVMMTNNYRKYIVKDGTVDICRACHRPGESIRHIVSGCSRLANGEYLHRHNLVARIIHQQLALKYNLVESEVPYYRYVPDPVLENGHATLYWDRSIITDRTIVANKPDIVVIDRSERRTMIVDITVPHDENLVKAEKDKQIKYLDLAHEVVGMWDVDSAVIVPIVVTANGIIAKSLDIHLMRLSLGGWIKGLIQRAVLLDTARIVRRFLSLEP

SEQ ID NO: 12483 - protein, 1111 aa, Amphipyra berbera
MRWTQSMNENCMRAYFGATEGGTNLTAYRGRMLSLFQVLEPAVNVSAQRLSDQVRVIQRDHRLTDVALDRLRSEVQSNRIISPQSQTAAQPRAPTVVPPPPIHADEESNDRVTNVSTQCNEQLRSALELAIREYRFTPPNLRPRIPRLPMHRKNRALMCALDSLLSSYFDNSENLEDTHSILYCAAVAACRVAHVKFDNNDRATRPKPTVPAWQCRIERRINEARALIGKLICFREGNTRPRVMRFVRRAFSGTDINPRDYMSRVTERIDFLKQKVYAWANRIRRYKRRVERYTQNRMFHSDERRVYRTWERPDHDVNDTHLPDNDVMNTFWRNIWSMPVTHTEGDWMQEVQRACEPIEEMGDITIVPQDVTSAVRPMANWKSPGPDGLHNFWLKWLRSSHARLASQFQSSLESGSLPQFLTTGVTHLLHKSGSTAEPKNYRPITCLPTVYKLLTSILRAKINSHIINNSIMSVSQNGCKNGSRGTKELLLIDMAISQQVRRSRKDLSTCWIDYKKAYDSVPHTWLMRVLELYKVNTTLCAFLTSCMGQWRTVLHYPGCRQIQGRGEPIRIERGIFQGDSLSPLWFCLALNPLSTLLEGSGLGYRLRRGGQVISHLLYMDDLKLFAPNNLQLMKLLKVTETFSNSIRMEFGVDKCAVMHVKRGGIMESVGTQLSDSIHLRSLSSTETYKYLGMSETLGINETDMKQSLRERFYGRLKKVLKSLLSGGNKVRAFNGWVMPVLMYSFGILKWTQTELDALDRRVRTLLTAYRMHHPRSSVMRLYIPRKCGGRGFLNAKTLHNREVCSLREYFLQADVGMHRDVVAVDKGFTPLSLAKENWRKPVVLDTNGRREVWQSKELHGRFYRALHGPDVDFLASVAWLRFGDLFGETEGFVCAIMDEVIMTNNYRKYIVKDGTVDICRACHCPGESIRHIISGCSRLANGEYLHRHNLVARIIHQQLALKYNLVDAEVPYYKYVPDPVLENGHITLYWDRSIITDRTIVANKPDIVVIDRTERLTMIVDITVPHDENLVKAEKDKEIKYQDLAHEVVDMWEIDSAVIVPIVVTANGLIAKSLDHHLTRLSLGSWVKGLIQKAVLLDTARIVRKFLSLRP

SEQ ID NO: 12484 - protein, 1202 aa, Amphipyra berbera
MLTRSRTRTTEQRSARPPPPDSPLSSASQPPELGLPVTPAAAASSSSSDEYFSPPTSPRPVRRQGRGRPPNSLGPRGPPAPSRVLAAGGYVQRMKWTQSINENVMRAYYGSTEGGTNLTAYRVRMLTLFQELEPAINVSAQRLSDQVRVIQRNHRLDDAALDRLRLEVQNSRAIPVPLQTAVHQLINVAPPRSDRVDGDEDDGAVTVSSQYNDRLRSALEDAIRECRANPESRPRLPRLPMHNKNRALVCALDSLLASYFESSEDLGDTHSILYCAAVAACRVANVKFNNSERATRPKLAVPAWQCRIERRIDETRALIGKLICFREGNTRPRVMRFVRRAFSGTGISPREYTSRATERMDFLKQKVCAWASRIRRYKRRVERYTQNRMFQCYQRWVYRAWEQPDQSVSGGRLPDDDAMSSFWRSIWSVPVIHTEGDWMRDIERTCESIEEMGEIVISPQDVAGAVRPLPNWKSPGPDGLHNFWIKWLRSSHARLASQFQSSLESGSLPQFLTIGVTHLLHKSGSTAEPKNYRPITCLPTVYKLLTSILRSKINTHIGNNSVLSSSQNGCRNGSRGTKELLLIDTAISQQVRRSQKSLSTCWIDYKKAYDSVPHTWLMRVLELYKINTTLRTFLRSCMGQWRTVLRYPGCQPIRGSGEPIRIERGIFQGDSLSPLWFCLALNPLSTLLEGSGLGYPLRRGGQVVSHLLYMDDLKLFAPTKLQLVDLLKVTETFSNSIRMEFGVDKCAVMHVRRGRIMESEGLQLSDSIHLSPLSANDTYKYLGMSEGLGISEADMKQSLRERFFGRLKKVLKSLLSGGNKVRAFNGWVMPVLMYSFGILKWTQTELDALDRRVRTLLTANRMHHPRSSVMRLYIPRKCGGRGLLNAKTLHNREVCSLREFFLHADAGMHRDVVAVDKGLTPLSLARENWRKPVVLSTNDRREIWQSKELHGRFYRALHGPDVDFLASVSWLRFGDLFGETEGFVCAIMDEVIMTNNYRKYIVKDGTVDICWACHCPGESLRHIISGCSRLANGEYLHRHNQVARIIHQQLALKYNLVESEVPYYRYVPDPVLENGRITLYWDRSIITDRTIVANKPDIVVIDRSERRTMIVDVTIPHDGNLVKAEKDKQIKYLDLAHEVVNMWDVESATIVPIVVTANGLMAKSLDKHLMRLSLGGWIKGLIQKAVLLDTARIVRRFLSLEP

SEQ ID NO: 12485 - protein, 1106 aa, Noctua janthe
MRWTQSINANVMRAYYGATEGGNNLTAYRVRMLSLFQVLEPAVNVSAQRLSDQVRVIQRNGMLDDTVLDRLRTEMQSSHVIATPPQTVVPPQSTIIPTHDNNVSNDMVTNVSTQCNEEMRCALEGAIREYWFMQPDLRPRVPRLPMHNKNKVLVAVLDSQLSNYFDNCENLTDAHSVLYCAAVAACRVAHVKFSDDRATRPNPAVPSWQYRIERRIGEARALIGKLICFREGNTRPRVMRFVRRAFSGTDISTRDYMSRVTERIDFLKQKVYAWANRIRRYKRRVDRYTQNRTFQRDERWVYRAWERPDQGVADTHLPDDDAMCSFWRSIWSVPVSHTEGEWTREVERACDLVPEMGAITISPQDVVRAVRPLPNWKSPGPDGLHNFWIKWFTRSHARLAILFQSALESGSLPEFLTTGITHLLHKSGSTAEPKNYRPIACLPTVYKVLTSILRAKINKHIDDNSVMSASQNGCRNGSRGTKELLLIDMAISQQVRRSRRDLSTCWIDYKKAYDSVPHTWLMRVLELYKVDSTLRIFLMSCMGQWRTVLCYPGCRQIQRNSEPIRIERGIFQGDSLSPLWFCLALNPLSTLLEDSGLGYRLRRGGQVISHLLYMDDLKLFAPNDLQLMELLKVTETFSSAIRMEFGVDKCAVMHVKRGEIVESVGTQLSDSINLRSLSATETYKYLGMSEALGINVADMKQSLKERFFGRLKKVFNSLLSGGNKVRAFNGWVMPVLMYSFGILKWTQTELDALDRRVRTLLTTYRMHHPRSSVMRLYIPRRCGGRGFLNAKTLHNREIYSLREYFLETDVGMHRDVVAVDKGLTPLSLAKENWRKPVVLDTNDRMEVWQSKELHGRFFRALHGPDVDLPASVAWLRSGDLFGETEGFVCAIMDEVMMTNNYRRFIVKDGTVDICRACHRPGESIRHIISGCSRLANGEYLHRHNLVARIIHQQLALKYNLVESEVPYYKYVPDPVLENGNITLYWDRSIVTDRTIVANKPDIVVVDRSERRAMIVDITVPHDGNLVKAEKDKQIKYLDLAHEVVDMWDVDSAIIVPIVVSAHGLIAKSLDQYLRRLSLGSWIKGLIQKAVLLDTARIVRRFLSLEP

SEQ ID NO: 12486 - protein, 1197 aa, Noctua janthe
MLTRSATRRARLSPPDPSLSSASPPPESSPIVSAVTPAVAVASSSSDEYFSPPTTPPPVRRRGGRRPPDGLGPRGPPASDRVPAPGGSVPRMRWTQSINANVMRAYYGATEGGNNLTAYRVRMLSLFQVLEPAVNVSAQRLSDQVRVIQRNGMLDDTVLDRLRTEMQSSHVIATPPQTVVPPQSTIIPTHDNNVSNDMVTNVSTQCNEEMRCALEGAIREYRFMQPDLRPRVPRLPMHNKNKVLVAVLDSQLSNYFDNCENLTDAHSVLYCAAVAACRVAHVKFSDDRATRPKPAVPSWQYRIERRIGEARALIGKLICFREGNTRPRVMRFVRRAFSGTDISARDYMSRVTERIDFLKQKVYAWANRIRRYKRRVDRYTQNRTFQRDERWVYRAWERPDQGVADTHLPDDDAMCSFWRSIWSVPVSHTEGEWTREVERACHLVPEMGAITISPQDVVRAVRPLPNWKSPGPDGLHNFWIKWFTRSHARLAILFQSALESGSLPEFLTTGITHLLHKSGSTAEPKNYRPIACLPTVYKVLTSILRAKINKHIDDNSVMSASQNGCRNGSRGTKELLLIDMAISQQVRRSRRDLSTCWIDYKKAYDSVPHTWLMRVLELYKVDSTLRIFLMSCMGQWRTILRYPGCRQIQRNSEPIRIERGIFQGDSLSPLWFCLALNPLSTLLEDSGLGYRLRRGGQVISHLLYMDDLKLFAPNDLQLMELLKVTETFSSAIRMEFGVDKCAVMHVKRGEIVESVGTQLSDSINLRSLSATETYKYLGMSEALGINVADMKQSLKERFFGRLKKVFNSLLSGGNKVRAFNGWVMPVLMYSFGILKWTQTELDALDRRVRTLLTTYRMHHPRSSVMRLYIPRRCGGRGFLNAKTLHNREIYSLREYFLETDVGMHRDVVAVDKGLTPLSLAKENWRKPVVLDTNDRMEVWQSKELHGRFFRALHGPDVDLPASVAWLRSGDLFGETEGFVCAIMDEVMMTNNYRRFIVKDGTVDICRACHRPGESIRHIISGCSRLANGEYLHRHNLVARIIHQQLALKYNLVESEVPYYKYVPDPVLENGNITLYWDRSIVTDRTIVANKPDIVVVDRSERRAMIVDITVPHDGNLVKAEKDKQIKYLDLAHEVVDMWDVDSAIIVPIVVSAHGLIAKSLDQYLRRLSLGSWIKGLIQKAVLLDTARIVRRFLSLEP

SEQ ID NO: 12487 - protein, 908 aa, Noctua janthe
MNKGNNNNNNTIRIERRIGEARALIGKLICFREGNTRPRVMRFVRRAFSGTDISARDYMSRVTERIDFLKQKVYAWANRIRRYKRRVDRYTQNRTFQRDERWVYRAWERPDQGVADTRLPDDDAMCSFWRSIWSVPVSHTEGEWTREVERACDLVPEMGAITISPQDVVRAVRPLPNWKSPGPDGLQNFWIKWFTRSHARLAILFQSALESGSLPEFLTTGITHLLHKSGSTAEPKNYRPITCLPTVYKVLTSILRAKINKHIDDNSVMSASQNGCRNGSRGTKELLLIDMAISQQVRRSRRDLSTCWIDYKKAYDSVPHTWLMRVLELYKVDSTLRIFLMSCMGQWRTVLRYPGCRQIQRNSEPIRIERDIFQGDSLSPLWFCLALNPLSTLLEDSGLGYRLRRGGQVISHLLYMDDLKLFAPNDFQLMELLKVTETFSSAIRMEFGVDKCAVMHVKRGEIVESVGTQLSDSINLRSLSATETYKYLGMSEALGINVADMKQSLKERFFGRLKKVFNSLLSGGNKVRAFNGWVMPVLMYSFGILKWTQTELDALDRRVRTLLTAYRMHHPRSSVMRLYIPRRCGGRGFLNAKTLHNREICSLREYFLETDVGMHRDVVAVDKGLTPLSLAKENWRKPVVLDTNDRMEVWQSKELHGRFFRALHGPDVDLPASVAWLRSGDLFGETEGFVCAIMDEVMMTNNYRRFIVKDGTVDICRACHRPGESIRHIISGCSRLANGEYLHRHNLVARIIHQQLALKYNLVESEVPYYKYVPDPVLENGSITLYWDRSIVTDRTIVANKPDIVVVDRSERRAMIVDITVPHDGNLVKAEKDKQIKYLDLAHEVVDMWDVDSAIIVPIVVSAHGLIAKSLDQYLRRLSLGSWIKGLIQKAVLLDTARIVRRFLSLEP

SEQ ID NO: 12488 - protein, 1200 aa, Mythimna ferrago
MLTRAAARRARPPPPASSLSSASPPPEPSPIVSAVTPAVAAASSSSDEYYSPPTTPPPTRRRGGRRPPDCLRPRGPPASDRVPAPGGSVQRMRWTQSINENVMRSYYGATEGGNNLTAYRVRMLSLFQVLEPAVNVSAQRLSDQVRVILRNHMLDDTVLDRLRTEMSDRVITPPSQPVVPAVVPPSNYISFHTDEVSSDTVTNVSNQCNSELRSALECAIREYRNIPPELRPRIPRLPMCNKNRALVAALDSQLSNYFDDCEDLTDTHSIMYCAAVAACRVAHVKFPNSDVATRPKPAVPAWQCRIERRIGGARALIGKLICFREGNTRPRVMRFVRRAFSGTDISPRDYMSRVTERIDFLKQKVYAWANRIRRYKRRVERYTQNRTFRSNERWVYRAWERPDQGVTDARLPDDDAMSSFWRSIWSVPVSHTEGDWTREVERACDPIPQMGAIDISPQDVARAVRPLPNWKSPGPDGLHNFWIKWFTRSHARLAYQFQSALESGSLPQFLTTGITQLLHKSGSTAEPKNYRPITCLPTVYKVLTSILRSKINSHIDENSIMSPSQNGCRNGSRGTKELLLIDMTISQQVRRSRKDLSTCWIDYRKAYDSVPHTWLMRVLELYKIDTTLRTFLMSCMRQWSTVLRYPGCRNIQRNSEPVRIERGIFQGDSLSPLWFCLALNPLSTLLENSGLGYRLKRGGQVISHLLYMDDLKLFAPNNLQLMELLKVTEIFSSAIRMEFGVDKCAVMHVKRGEVVESVSTQLTDSINLRSLSPTETYKYLGMSEALGISITGMKQSLRERFFGRLKKVFNSLLSGGNKVRAFNGWVMPVLMYSFGVLKWTQTELDTLDRRVRTLLTAYRMHHPRSSVMRLYIPRKCGGRGFLNAKTLHNREVCSLREYFLAADVGMHRDVVVVDQGLTPLSLANENWRKPIVLDTNDRREVWQSKELHGRFFRALHGPDVDQLASVAWLRFGDLFGETEGFVCAIMDEVIMTNNYRRFIVKDGTVDICRACHRPGESIRHIISGCSRLANGEYLHRHNLVARIIHQQLALKYSLVESEVPYYRYEPDPVLDNGHITLYWDRPIITDRTIVANKPDIVVVDRSERRAMIVDISVPHDENLVKAEKDKQIKYIDLAREVVDMWEVDSAVIVPIVVSANGLIAKSLDQHLRRLSLGDWIKGLIQKAVLLDTARIVRRFLSLEP

SEQ ID NO: 12489 - protein, 1200 aa, Mythimna ferrago
MLTRAATRRARPPPPALSLSSASPPPEPSPIVSAVTPAVAAASSSSDEYYSPPTTPPPTRRRGGRRPPDCLGPRGPPASDRVPAPDGSVQRMRWTQSINENVMRSYYGATEGGNNLTAYRVRMLSLFQVLEPAVNVSAQRLSDQVRVILRNHMLDDTVLDRLRTEMSDRVITPPSQPVVPAVVPPSSYISFHTDEVSSDTVTNVSNQCNSELRSALECAIREYRNIPPELRPRIPRLPMCNKNRALVAALDSQLSNYFDDCEDLTDTHSIMYCAAVAACRVAHVKFPNSDVATRPKPAVPAWQCRIERRIGGARALIGKIICFREGNTRPRVMRFVRRAFSGTDISPRDYMSRVTERIDFLKQKVYAWANRIRRYKRRVERYTQNRTFRSNERWVYRAWERPDQGVTDARLPDDDAMSSFWRSIWSVPVSHTEGDWTREVERACDPIPQMGAIDISPQDVARAVRPLPNWKSLGPDGLHNFCIKWFTRSHARLAYQFQSALESASLPQFLTTGITHLLHKSGSTAEPKNYRPITCLPTVYKVLTSILRSKINSHIDENSIMSPSQNGCRNGSRGTKELLLIDMTISQQVRRSRKDLSTCWIDYRKAYDSVPHTWLMRVLELYKIDTTLRTFLMSCMRQWSTVLRYPGCRNIQRNSEPVRIERGIFQGDSLSPLWFCLALNPLSTLLENSGLGYRLKRGGQVISHLLYMDDLKLFAPNNLQLMELLKVTEIFNSAIRMEFGVDKCAVMHVKRGEVVESVSTQLTDSINLRSLSPTETYKYLGMSEALGISITGMKQSLRERFFGRLKKVFNSLLSGGNKVRAFNGWVMPVLMYSFGVLKWTQTELDALDRRVRTLLTAYRMHHPRSSVMRLYIPRKCGGRGFLNAKTLHNREVCSLREYFLAADVGMHRDVVAVDKGLTQLSLANENWRKPIVLDTNDRREVWQSKELHGRFFRALHGPDVDQLASVAWLRFGDLFGETEGFVCAIMDEVIMTNNYRRFIVKDGTVDICRACHRPGESIRHIISGCSRLANGEYLHGHNLVARIIHQQLALKYSLVESEVPYYRYEPDPVLDNGHITLYWDRPIITDRTIVANKPDIVVVDRSERRAMIVDISVPHDENLVKAEKDKQIKYIDLAREVVDMWEVDSAVIVPIVVSANGLIAKSLDQHLRRLSLGDWIKGLIQKAVLLDTARIVRRFLSLEP

SEQ ID NO: 12490 - protein, 1200 aa, Mythimna ferrago
MLTRSRARSQIAQPTSSGSSLSSASQPPGPAPAVSPEIPAAAVASSSSDEYFSPPTTPPPARRRGRGRPPACLGFRGPPASDRVPAAGGSVQRMRWTESINENVMRSYFGATEGGTNLTAYRGRMLSLFQVLEPAVNVSAQRLSDQVRVIQRNRMLDDAVLDRLRLESRNGRVTPISPPAAVQRQPSVSPRPDHVGEDDDDGAISVSTQCNARLRSALEDAFREYRSIPPELRTRLPRLPMHRKNKALVCALDSQLSNCFDSSKDLTDTHSILYCAAAAACRVAHVKIPNSDRATRPAKPAWQCRIERRIGEARALIGKLICFREGNTRPRVMRFVRRAFSGTDITPRDYLPRITERIDFLRQKVYAWANRIRRYKRRVERYTQNRAFQSNERWVYRAWERPDQSVIDTRLPDDDAMYSFWRSIWSVPVSHTEGDWTREVERECELIPEMGAITISPQDVARAVRPLPNWKSPGPDGLHNFWLKWFKSSHARLASQFQSALESGSLPQFLTTGITHLLHKSGSTAEPKNYRPITCLPTVYKVLTSILRAKINSHIETNSIMSASQNGCRNGSRGTKELLLIDVAISQQVRRSRRDLSTCWIDYKKAYDSVPHTWLMRVLELYKIDVTLRAFLMSCMGQWRTVLHYPGCRRVSENSEPLRIERGIFQGDSLSPLWFCLALNPLSTLLEGSGLGYRLRREGQVISHLLYMDDLKLFASNNLQLMELLKVTETFSSAIRMEFGLDKCAVMHVKRGEIMESVGTQLSDSIHLRSLSSTETYKYLGMSEALGINAADVKQSLRERFFGRLNKVLKSLLSGGNKVRAFNGWVMPVLMYSFGILKWTQTELDALDRRVRTLLTANRMHHPRSSVMRLYIPRKCGGRGFLNAKTLHNREVCSLREYFLETDVGMHRDVVAVDKGLTPLSLANENWRKPIVMDTNERKEVWKGKELHGRFYRALHGPDVDLLASVSWLRFGDLFGETEGFVFAIMDEVMMTNNYRKYIVKDGTVDICRACHRPGESIRHIISGCSHLANGDYLHRHNLVARIIHQQLALKYNLVESEVPYYRYVPDPVLENGSVTLYWDRSIITDRTIVANKPDIVVIDRLERRTMIVDIAVPHDENLVKAEKDKQTKYLDLAREVVDMWEVDRAIIVPIVVTANGLIAKSLDQHLRRLSLGSWIKGLIQKAVLLDTARIVRRFLSQEP

SEQ ID NO: 12491 - protein, 1008 aa, Mythimna ferrago
MWLDCTDTVTNVSTQCNNELRSALECAIREYRNMPLELRPRLPRMPMHNKNKALVAALDSQLSNYFDDCEDLTDTHSIMYCAAVAACRVAHVKFPNSDVATRPKPAVPAWQYRIERRIGGARALIGKLICFREGNTRPRVMRFVRRAFSGTDISPRDYMSRVTERIDFLKQKVYAWANRIRRYKRRVERYIQNSTFRSNERWVYRAWERPDQGVTDTRPPDDDAMCSFWRNIWSVPVSHTEGGWTREVERACESVTEMGAITISPQDVARAVRPLPNWKSPGPDGLHNFWIKWLQRSHARLASQYQAALESGSLPEFLTTGVTHLLHKSGSTAEPKNYRPITCLPTVYKVLTSILRAKINHHVDNNAIMSASQNGCRNGSRGTKELLLIDMAISQQVRRSRKDLSTCWIDYKKAYDSVPHTWLMRVLELYKVDATLRTFLMSCMRQWRTVLRYPGCRNIQRNSEPVRIERGIFQGDSLSPLWFCLALNPLSTLLENSGLGYRLKRGGQVISHLLYMDDLKLFAPNNLQLMELLKVTETFSSAIRMEFGVDKCAVMHIKRGEIVESVGIQLSDSIHLRSLSPTETYKYLGMSEALGINATDMKQSLRERFFGRLKKVLNSLLSGGNKVRAFNGWVMPVLMYAFGVLKWTQTELDALDRRVRTLLTAYRMHHPRSSVMRLYIPRKCGGRGFLNAKSLHNREVCSLREYFLAADGGMHRDVVAVDKGLTPLSLANENWRKPVVLDTNVRREVWQSKELHGRFFRALHGPDVDQLASVAWLRVGDLFGETEGFVCAIMDEVIMTNNYRRFIVKDGTVDICRACHRPGESIRHIISGCSRLANGEYLHRHNLVARIIHQQLALKYSLVESEVPYYRYVPDPVLDSGDITLYWDRSIITDRTIVANKPDIVVVDRSERRAMIVDISVPHDENLAKAEKDKQIKYIDLAREVVDMWEVDSAIIVPIVVSANGLIAKSLDQHLRRLSLGDWIKGLIQKAVLLDTARIVRRFLSLEP

SEQ ID NO: 12492 - protein, 975 aa, Mythimna ferrago
MPSVLRPRLPRLPMHNKNKALVAALDMQLTNYFDNCKDLTDAHSIMYCAAVAACRVAHVKFPNSDVATRPKPAVPAWQCRIERRIGEARALIGKLICFREGNTRPRVMRFVRRAFSGTDICPRDYMLRVTERIDFLKQKVYAWANRIRRYKRRVERYTQNRAFQSNERWVYRAWERPDQGVTDTRLPDDDAMCSFWRNIWSVPVSHTEGGWTREVEQACEPITEMGAITISPQDVARAVRPLPNWKSPGPDGLHNFWIKWLQRSHACLASQNQAALESSSLPEFLTTGVTHLLHKSGSTAEPKNYRPITCLPTVYKVLTSILRHKINNHIDNNSIMSASQNGCRKGSRGTKELLLIDMAISQQVRRSRKDLSTCWIDYKKAYDSVPHTWLMRVLELYKIDATLRTFLMSCMRQWRTVLRYPGCRNIQRSSEPVRIERGIFQGDSLSPLWFCLALNPLSTLLENSGLGYQLKRGGQVTSHLLYMDDLKLFAPNKLQLMELLKVTETFSSAIRMEFGVDKCAVMHVKRGEIVESVSTQLSDSISLRSLSATETYKYLGMSEALGINATDMKQSLRERFFGRLKKVFNSLLSGGNKVRAFNGWVMPVLMYSFGVLKWTQTELDALDRRVRSLLTANRMHHPRSSVMRLYIPRKCGGRGFLNAKTLHNREVCSLREYFLAADVGMHRDVVAVDKGLTPLSLANENWRKPVVLDTNDRKEVWQSKELHGRFFRALHGPDVDQLASVAWLRVGDLFGETEGFVCAIMDEVIMTKNYRRFIVKDGTVDICRACHRPGESIRHIISGCSRLANGEYLHRHNLVARIIHQQLALKYSLVESEVPYYRYVPDPVLDNGDITMYWDRSIITDRTIVANKPDIVVVDRSERRAMIVDISVPHDENLVKAEKDKQIKYIDLAREVVDMWDVDSAIIVPIVVSGNGLIAKSLDQHLRRLALGSWIKGLIQRAVLLDTARIVRRFLSLEP

SEQ ID NO: 12493 - protein, 1200 aa, Mythimna ferrago
MLTRAAARRARLPPPASSLNSASPPPEPSPIVSAVTPAVAAASSSSDEYYSPPTTPPPTRRRGGRRPPDCLGPRGPLASDRVPAPGGSVQRMRWTQSINENVMRSYYGATEGGNNLTAYRVRMLSLFQVLEPAVNVSAQRLSDQVRVILRNHMLDDTVLDRLRTEMSDRVITPPSQPVVPTVVPPSSYISFHTDEVSSDTVTNVSNQCNSELRSALECAIREYLNIPPELRPRIPRLPMCNKNRALVAALDSQLSNYFDDCEDLTDTHSIMYYAAVAACRVAHVKFPNSDVATRPKPAVPAWQCRIERRIGGARALIGKLICFREGNTRPRVKRFVRRAFSGTDISPRDYMSRVTERIDFLKQKVYAWANRIRRYKRRVERYTQNRTFRSNERWVYRAWERPDQGVTDARLPDDDAMSSFWRSIWSVPVSHTEGDWTREVERACDPIPQMGAIDISPQDVARAVRPLPNWKSPGPDGLHNFWIKWFTRSHARLAYQFQSALESGSLPQFLTTGITHLLHKSGSTAEPKNYRPITCLPTVYKVLTSILRSKINSHIDENSIMSPSQNGCRNGSRGTKELLLIDMTISQQVQRSRKDLSTCWIDYRKAYDSVPHTWLMRVLELYKIDTKLRTFLMSCMRQWSTVLRYPGCRNIQRNSEPVRIERGIFQGDSLSTLWFCLALNPLSTLLENSGLGYRLKRGGQVISHLLYMDDLKLFAPNNLQLMELLKVTEIFSSAIRMEFGVDKCAVMHVKRGEVVESVSTQLTDSINLRSLSPTETYKYLGMSEALGISITGMKQSLRERFFGRLKKVFNSLLSGGNKVRAFNGWVMPVLMYSFGVLKWTQTELDALDRRVRTLLTAYRMHHPRSLVMRLYIPRKCGGRGFLNAKTLHNREVCSLREYFLAADVGMHRDVVAVDKGLTPLSLANENWRKPIVLDTNDRREVWQSKELHGRFFRALHGPDVDQLASVAWLRFGDLFGETEGFVCAIMDEVIMTNNYRRFIVKDGTVDICRACHRPGESIRHIISGCSRLANGEYLHRHNLVARIIHQQLALKYSLVESEVPYYRYEPDPVLDNGHITLYWDRPIITDRTIVANKPDIVVVDRSERRAMIVDISVPHDENFVKAEKDKQIKYIDLAREVVDMWEVDSAVIVPIVVSANGLIAKSLDQHLRRLSLGDWIKGLIQKAVLLDTARIVRRFLSLEP

SEQ ID NO: 12494 - protein, 868 aa, Mythimna ferrago
MRFVRRAFSGTDISPRDYLPRITERIDFLRQKVYAWANRIRRYKRRVERCTQNRAFQSNERWVYRAWERPDQSVIDTHLPDDDAMYSFWRSIWSVPVNHTEGDWTREVERECELIPEMGAITISPQDVARAVRPLPNWKSPGPEGLHNFWLKWFKSSHARLASQFQSALESGSLPQFLTTGITHLLYKSGSTAEPKNYRPITCLPTVYKVLTSILRAKINSHIETNSIMSASQNGCRNGSRGTKELLLIDVAISQQVRRSRRDLSICWIDYKKAYDSVPHTWLMRVLELYKIDVTLRTFLMSCMGQWRTVLHYPGCRRVSENSEPLRIERGIFQGDSLSPLWFCLALNPLSTLLEGSGLGYRLRREGQVISHLLYMDDLKLFASNNLQLMELLKVTETFSSAIRMEFGLDKCAVMHVKRGEIMESVGTQLSDSIHLRSLCSTETYKYLGMSEALGINAADVKQSLRERFFGRLNKVLKSLLSGGNKVRAFNDWVMPVLMYSFGILKWTQTELDALDRRVRTLLTANRMHHPRSSVMRLYIPRKCGGRGFLNAKTLHNREVCSLREYFLETDVGMHRDVVAVDKGLTPLSLANENWRKPIVMDTNERKEVWKGKELHGRFYRALHGPDVDLLASVSWLRFGDLFGETEGFVFAIMDEVMMTNNYRKYIVKDGTVDICRACHRPGESIRHIISGCSHLANGDYLHRHNLVARIIHQQLALKYNLVESEVPYYRYVPDPVLENGSVTLYWDRSIITDRTIVANKPDIVVIDRLERRTMIVDIAVPHDENLVKAEKDKQTKYLDLAREVVDMWEVDRAIIVPIVVTANGLIAKSLDQHLRRLSLGSWIKGLIQKAVLLDTARIVRRFLSQEP

SEQ ID NO: 12495 - protein, 1198 aa, Mythimna ferrago
MLTRAAARRARPPPPASSLSSASPPPEPSLNASAVTPAATVASSSSDEFYSPPTSPPPARRRRGRRPPSSLGPRGPPASDRVPAPGGSVQRMRWTQSINVMRSYYGATEGGNNLTAYRVRMLSLFQVLEPAVNVSAQRLSDQVRVILRNHMLDDSVLDRLRTEMSDRVITPPSQPVVPVVVPPSSHISFHTDEVSTDMVINVSTQCNNELRSALECAIREYRNIPPELRPRIPRLPMCNKNRALVAALDSQLSNYFDDCEDLTETHSIMYCAAVAACRVAHVKFPDSDEATRPKSAVPAWQCRIERRIGGARALIGKLICFREGNTRPRVMPFVRRAFSGTNISPRDYMSRVTERIDFLKQKVYAWANRIRRYKRRVERYTQNRTFRSNERWVYRAWERPDQGVTDARLPEDDAMCSFWRSIWSVPVSHTEGDWTREVERACDPIPQMGAIDISLQDVARAVRPLPNWKSPGPDGLHNFWIKWFTRSHARLAYQFQSALESGSLPQFLTTGITHLLHKSGSTAEPKNYRPITCLPTVYKVLTSILRSEINSHIDENSIMSPSQNGCRNGSRGTKELLLIDMTISQQVRRSRKDLSTCWIDYKKAYDSVPHTWLMRVLELYKIDTTLRTFLMSCMRQWSTVLRYPGCRNIQRNSEPVRIERGIFQGDSLSPLWFCLALNPLSTLLENSGLGYRLKRGGQVISHLLYMDDLKLLAPNNLQLMELLKVTETFSSAIRMEFGVDKCAVMHVKRGEVVESVGVQLTDSINLRSLSPTETYKYLGMSEALGISTIDMKQSLKERFFGRLKKVFNSLLSGGNKVRAFNGWVMPVLMYSFGVLKWTQTELDALDRRVRTLLTAYRMHHPRSSVMRLYIPRKCGGRGFLNAKTLHNREVCSLREYFLAADVGMHRDVVALDKGLTPLSLANENWRKPIVLDTDDRREVWQSKELHGRFFRALHGPDIDQLASVAWLRFGDLFGETEGFVCAIMDEVIMTNNYRRFIVKDGTVDICRACHRPGESIRHIISGCTRLANGEYLHRHNLVARIIHQQLALKYSLVESEVPYYRYEPDPVLDNGHITLYWDRPIITDRTIVANKPDIVVVDRSERRAMIVDISVPHDENLVKAEKDKQIKYIDLAREVVDMWEVDSAIIVPIVVSANGLIAKSLDQHLRRLSLGDWIKGLIQKAVLLDTARIVRRFLSLEP

SEQ ID NO: 12496 - protein, 1200 aa, Mythimna ferrago
MLTRAAARRARPPPPASSLSSASPPSEPSLTESAVTPAATVASSSSDEYYSPPTTPPPTRRRGGRRPPACLGPRGPPASDRVPAAGGNVPRMRWTQSTNENVMRAYYGATEGGNNLTAYRVRMLSLFQVLEPAVNVSAQRLSDQVRVIQRNHMLDDTVLDRLRTEMSDRVIAAPSQPVVPVVAPPPSHISFHTDEVSTDTVTNVSTQCNNELRSALECAIREYRNMPLEFRPRLPRLPMRNKNKALVAALDSQLSNYFDDCEDLTDTHSIMYCAAVAACRVAHVKFPNSDVATRPKPAVPAWQCRIERRIGGARALIGKLICFREGNTRPRVMRFVRRAFSGTDISPRDYMSRVTERIDFLKQKVYAWANRIRRYKRRVERYTQNSTFRSNERWVYRAWERPDQGVTDTRLPDDDAMCLFWRNIWSVPVSHTEGGWTREVERACESITEMGAITISPQDVARAVRPLPNWKSPGPDGLHNFWIKWLQRSHARLASQYQAALESGSLPEFLTTGVTHLLHKSGSTAEPKNYRPITCLPTVYKVLTSILRAKINHHVDNNAIMSASQNGCRNGSRGTKELLLIDMAISQQVRRSRKDLSTCWIDYKKAYDSVPHTWLMRVLELYKVDATLRTFLMSCMRQWRTVLRYPGCRNIQRNSEPVRIERGIFQGDSLSPLWFCLALNPLSTLLENSGLGYRLKRGGQAISHLLYMDDLKLFAPNNLQLMELLKVTETFSSAIRMEFGVDKCAVMHIKRGEIVESVGIQLSDSIHLRSLSPTETYKYLGMSEALGINATDMKQSLRERFFGRLKKVLNSLLSGGNKVRAFNGWVMPVLMYAFGVLKWTQTELDALDRRVRTLLTACRMHHPRSSVMRLYIPRKCGGRGFLNAKTLHNREVCSLREYFLAADGGMHRAVVAVDKGLTPLSLANENWRKPVVHDTNVRKEVWQSKELHGRFFRALHGPDVDQLASVAWLRVGDLFGETEGFVCAIMDEVIMTNNYRRFIVKDGTVDICRACHRPGESIRHIISGCSRLANGEYLHRHNLVARIIHQQLALKYSLVESEVPYYRYVPDPVLDSGDITLYWDRSIITDRTIVANKPDIVVVDRRERRAMIVDISVPHDENLVKAEKDKQIKYIDLAREVVDMWNVDSAIIVPIVVSANGLIAKSLDQHLRRLSLSGWIKGLIQKAVLLDTARIVRRFLSLEP

SEQ ID NO: 12497 - protein, 868 aa, Acronicta aceris
MRFVRRAFSGTNIDPRDYASCVTERIDFLKQKVYAWANRIRRYKRRAERYSLNRAFQGDQRWVYRTWDRPDNGVSDVCRPNDDAMSLFWRNIWSVPVNHTEDDWICDVERACESLPAMEEINISPQDVACAVHSVPNWKAPGPDGLHNFWIKWLRSSHARLASQFQSSLESGTLPQFLTTGITHLLHKSGDTADPKNYRPITCLPTVYKLLTSILRAKICYHIDESSIMSASQNGCRNGSRGTKELLLIDMTISQQVRRLRKNLSTCWIDYKKAYDSVPHTWLMRVLELYKVDVSLRTFLRSCMGQWRTVLHYPGCRQIQRISEPIRIERGIFQGDSLSPLWFCLALNPLSTLLEESRLGYRLRRGGQVISHLLYMDDLKLFASSDLHLMELLKITENFSNSIRMEFGVEKCAVMHVKRGGIVESVGIQLSDSTQLRSLASTETYKYLGMAEALGINVADMKQSLQVRFFGRLTKVLKSLLSGGNKVRAFNGWVMPVLMYSFGVLKWTQTELETLDRKVRTLLTAYRMHHPRSSVMRLYIPRKCGGRGFLNAKNLHNREVCSLREHFLKTEMGMHRDVVAVDNGLTPLSMAKENWRKPVVLSTNDRRNVWQGKELHGRYYRALHEPGVDTLASVSWLRFGDLFGETEGFVCAIMDEVMMTNNYRKFIVKDGTVDICRACHRPGESIRHIISGCSRLANGEYLHRHNLVARIIHQQLALKYNLVESEVPYYKYVPDPVLENGHATLYWDRSIITDRTIIANKPDIVVIDRLERRAMIVDITVPHDENLFKAEKEKEIKYLDLAHEVVDMWGVDAAIIVPIVVSANGLIAKSLDRHLKRLSLGGWIKGLIQKAVLLDTARIVRRFLSLGP

SEQ ID NO: 12498 - protein, 1183 aa, Eilema sororculum
MLTRAKTKIIIQDAHLTPTDSSCSSASQAPGTTSPRPTPVEASSSDEFFSPPTSPTPVRRPGRGRPPTCLGPRRPPASNRAPAAGGNVHRMRWTNSINENVMRAYFAATEGGTNLSAYRTRMLPLFQALEPSINTSAQRLSDQVRVIHRNRMLNETVLETLRQECLRNICVTPASAPAPASTAEINNDTCVAPDDTPIPVSIQYNEEIKEALECALREYRSVPVHVRPRLPRLPIHRRNIALVSALDSLLPRYLENSENLGDTHSILYCTAVAACRMAGAKFPIKDPAIRPKSAIPAWQCRIERRVAEARVLIGKLICFRSGNTRPRVSPQDYTSRVTERIDFLKQKVYAWANRIRRYKRRVDRYTVNHMFQRDQRWVYRSWERTDESVDDVRRPDAEATNAFWRSIWSVPVSHTEGDWMREVERACETISEMEEIYIDATDVDCAVRSLSNWKSPGPDGLHNFWLKWLRSSHVVLASQFQSAIESGTLPAFMTTGVTHLLHKTGSTLEPNNYRPITCLPTVYKLLTSILRAKINNHINNNSIMCASQNGCRNGARGTKELLLIDMAISQQARRNRKDLTACWIDYKKAFDSVPHTWLLRVLELYKVNTTLCTFLRSCMGQWRTVLFYPGCRQALGGGVPITIERGIFQGDSLSPLWFCLALNPLSTLLVNSGLGYRLRREGQMVSHLFYMDDLKLFAHTNPQLIALLKVTETFSNSIKMAFGVDKCAVIHVKRGRVVEWEGIQLSDSTNLRSLLVTETYKYLGMSQALCINEVDMKQMLQERFYGRLKKVLNSLLSGGNKVRACNSWVMPLLMYSFGILRWTQTELDTIDRKVRTQLTAFRMHHPRSSVMRLYIPRKCGGRGFLNAKTLHNREVCNLRDYFLKSNVDMHRDVVNVDTGLTPLGLAKENWRRPTIVSTDSRREVWQSKELHGRFYRPLHRPEVDLLASVSWLRFSDLFGETEGFVCAIADEVIKTNNYRKYIMRDGTIDICRACHQPGESLRHITSGCSRLANGEYLHRHNQVARIIHQRLALKYNLVEVEVPYYKYVPEPVLENSHITLYWDRSIITDRTVVANKPDVVVIDRSERRALIVDVTIPHDENLVKAEKDKQVKYLDLAHEVVDMWNVDSAIIVPIVVSVNGLIAKSIDQHLKRLGLDGWVKGQMQKAVLLDTARIVRKFLSLEP

SEQ ID NO: 12499 - protein, 1106 aa, Eilema sororculum
MRWTNSINENVMRAYFAATEGGTNLSAYRSRMLPLFQALEPSVNTSAQRLSDQVRVIQRNHMLNETVLETLRQECLRNICVTPALAPAPASTTALNEDSHVTRDDTPIPVSIQYNEEIKEALEYALREYRSMPIHVRPRLPRLPIHRRNIALVSALDSLLPKYLENSENLGDTHSILYCTAVAACRMAGAKFPIKDPAIRPKPAIPAWQCRIERRVAEARVLIGKLICFRSGNTRPRVMRYVTRAFAGTNISPQDYTSRVTERIDFLKQKVCAWANRIRRYKKRVDRYTVNRMFQRDQRWVYRSWERTDESVDDLRRPDAEATNAFWRSIWSVPVSHTEGDWMREVERACETIPEMEEIYIDATDVDCAVRSLSNWKSPGPDGLHNFWLKWLRSSHVVLASQFQSAIESGTLPAFMTTGVTHLLHKTGSTLEPNNYRPITCLPTVYKLLTSILRAKINNHINNNSIMCTSQNGCRNGARGTKELLLIDMTISQQARRNRKDLVACWIDYKKAFDSVPHTWLLRVLELYKVNTTLCTFLRSCMGQWRTVLLYPGCRQALGSGEPITIERGIFQGDSLSPLWFCLALNPLSTLLVNSGLGYRLRREGQMVSHLFYMDDLKLFAHTNPQLIALLKVTETFSNSIKMAFGVDKCAVIHVKRGRVVESEGIQLSDSTNLRSLLVTETYKYLGMSQALCINEVGMKQMLQERFFGRLKKVLNSLLSGGNKVRACNSWVMPLLMYSFGILKWTQTELDTIDRKVRTQLTAFRMHHPRSSVMRLYIPRKCGGRGFLNAKTLHNREVCNLRDYFLKSNVDMHRDVVNVDTGLTPLGLAKENWRRPTIVGTDSRREVWQSKELHGRFYRALHRPEVDLLASVSWLRFGDLFGETEGFVCAIADEVIKTNNYRKYIMRDGTIDICRACHQPGESLRHITSGCSRLANGEYLHRHNQVARIIHQRLALKYNLVEVEVPYYRYVPEPVLENSHITLYWDRSIITDRTVVANKPDIVVIDRSERRALIVDVTIPHDENLVKAEKDKQVKYLDLAHEVVDMWNVDSAIIVPIVVSVNGLIAKSLDQHLKRLGLDGWVKGQMQKAVLLDTARIVRKFLSLEP

SEQ ID NO: 12500 - protein, 1192 aa, Eilema sororculum
MLTRAQAKRNGSAPITSPDSSLSSAAQPPAVEPAASSSSSSDEFFSPPTSPTPVRRPGRGRPPTCLGPRRPPASNGAPATGGDVHRMRWTNSINENVMRAYFAATEGGTNLSAYRTRMLPLFQALEPSINVSAQRLSDQVRVIQRNRMLNETVLETLRLECLRNICVTPAPVPVPASTVELNDDTCVAPDDTPIPVSIQYNEEIKEALECALREYRSMPVHVRPRLPRLPIHRRNIALVSALDSLLPRYLENSENLGDTHSILYCTAVAACRMAGAKFPIKDPAIRPKSAIPAWQCRIERRVTEARVLIGKLICFRSGNTRPRVMRYVTRAFAGTDISPQDYTSRVTERIDFLKQKVYAWANRIRRYKKRVDRYTVNRMFQRDQRWVYRSWERTEESVDDLRRPDAEVTNAFWRSIWSVPVSHTEGDWMHEVKRACETIPEMEEINIDAIDVDCAVRSLSNWKSPGPDGLHNFWLKWLRSSHVVLASQFQSAVESGTLPAFMTTGVTHLLHKTGSTLEPNNYRPITCLPTVYKLLTSILRAKINNHINNNSIMCASQNGCRNGARGTKELLLIDMAISQQARRNRKDLTACWIDYKKAFDSVPHTWLLRVLELYKVNTTLCTFLRSCMGQWRTVLFYPGCRQALGGGVPITIERGIFQGDSLSPLWFCLALNPLSTLLVNSGLGYRLRREGQMVSHLFYMDDLKLFAHTNPQLITLLKITETFSNSIKMAFGVDKCAVIHVKRGRVVESEGIQLSDSTNLRSLLVTETYKYLGMSQALCINEVDMKQMLQERFFGRLKKVLNSLLSGGNKVRACNSWVMPLLMYSFGILKWTQTELDTIDRKVRTQLTAFRMHHPRSSVMRLYIPRKCGGRGFLNAKTLHNREVCNLRDYFLKSNVDMHRDVVNVDTGLTPLGLAKENWRRPTIVGTDSRREVWQSKELHGRFYRALHRPEVDLLASVSWLRFSDLFGETEGFVCAIADEVIKTNNYRKYIMRDGTIDICRACHQPGESLRHITSGCSRLANGEYLHRHNQVARIIHQRLALKYNLVEFEVPYYRYVPEPVLENTHITLYWDRSIITDRTVVANKPDIVVIDRSERRALIVDVTIPHDENLVKAEKDKQVKYLDLAHEVVDMWNVDSAIIVPIVVSVNGLIAKSLDQHLKRLGLDGWVKGQMQKAVLLDTARIVRKFLSLEP

SEQ ID NO: 12501 - protein, 1192 aa, Eilema sororculum
MLTRAQAKRHRNAPTTSPDSSLSSAAQPPAVEPAASSSSSSDEFFSPPTSPTPVRRPGRGRPPTCLGPRRPPASSGAPATGGDVHRMRWTTSINENVMRAYFAATEGGTNLSAYRTRMLPLFQALEPSINTSAQRLSDQVRVIQRNRMLNETVLETLRLECLRNICVTPAPAPAPASTAERNDDTRVAPDDTPIPVSIQYNEEIKEALECALREYRSMPVHVRPRLPRLPIHRRNIALVSALDSLLPRYLENSENLGDTHSILYCTAVAACRMAGAKFPIKDPAIRPKFTIPAWQCRIERRVTEARVLIGKLICFRSGNTRPRVMRYVTRAFAGTDISTQDYTSRVTERIDFLKQKVCAWANRIRRYKKRVDRYTVNRMFQRDQRWVYRSWERTDESVDDVRRPDAEATNAFWRSIWSVPVSHTEGDWMREVERACETIPEMEEIYIDATDVDCAVRSLSNWKSPGPDGLHNFWLKWLRSSHVVLASQFQSAIESGTLPAFMTTGVTHLLHKTGSTLEPNNYRPITCLPTVYKLLTSILRAKINNHINNNSIMCASQNGCRNGARGTKELLLIDMAISQQARRNRKDLTACWIDYKKAFDSVPHTWLLRVLELYKVNTTLCTFLRSCMRQWRTVLFYPGCRQALGGGVPITIERGIFQGDSLSPLWFCLALNPLSALLVNSGLGYRLRREGQVVSHLFYMDDLKLFAHTNPQLIALLKVTETFSNSIKMAFGVDKCAVIHVKRGRVVESEGIQLSDSTNLRSLLVTETYKYLGMSQALCINEVDMKQLLQERFFGRLKKVLNSLLSGGNKVRACNSWVMPLLMYSFGILKWTQTELDTIDRKVRTQLTAFRMHHPRSSVMRLYIPRKCGGRGFLNAKTLHNREVCNLRDYFLKSNVDMHRDVVNVDTGLTPLGLAKENWRRPTIVSTDSRREVWQSKELHGRFYRALHRPEVDLLASVAWLRFSDLFGETEGFVCAIADEVIKTNNYRKYIMRDGTIDICRACHQPGESLRHITSGCSRLANGEYLHRHNQVARIIHQRLALKYNLVEVEVPYYRYVPEPVQENSHITLYWDRSIITDRTVVANKPDIVVIDRSERRALIVDVTIPHDENLVKAETDKQVKYLDLAHEVVDMWNVDSAIIVPIVVSVNGLIAKSLDQHLKRLGLDGWVKGQMQKAVLLDTARIVRKFLSLEP

SEQ ID NO: 12502 - protein, 1212 aa, Ptilodon capucinus
MTDAPRRNPRRLCRQRTVNEPNAQSTPPDPSPRSASPSPASIIRTSVTAVASSESDEYFSPPTSPPPVRRQRGRPPGHLGLLGQPAPNRVLVPSGVVRRMRWTSSINENVMRAYYEATEGGTNLTAYRNRMLPLFQSLEPAVNVSAQRLSDQVRVIQRGNMLADTVLDRLRSEMQSRRVVPVASSQPAAQPVASATVTSRLAADSDVDRDNAPIDVSNQYNDLLRSTLEDVVRVYRSMPNHLRPRIPRLPMHKGNRAIVGALDSLLSIYFDSSDNLADTHSILYCAAITVCRVARVKVFNTDTATRPKPAVPAWQCRIERRISEARALIGKLSCFREGNTRPRVMRFVRRAFAGTDVSPREYISRVTERIDFLKQKIYAWANRIRRYKVRVDRYSQNSMFQRDQRWVYRSWERPNEPVSELQRPDDNAMTTFWRDIWSVPVTHYEGDWIGDVERMCEPIKEMEAISIGPLDVANAVRSLPNWKAPGPDGLHNFWLKWLRSSHVRLASQFQSALQSGSLPEFITTGVTHLLHKSGSTTDPKNYRPITCLPTIYKTLTSILRAKIARHVEDNSIMSASQNGCRSGSRGTKELLLIDMTICQQARRNRKDLSTCWIDYKKAYDSVPHTWLVRVLELYKIDTTLRTFLESCMRQWKTVLLCPGSRQILGNGEPIRIERGIFQGDSLSPLWFCLALNPLSTLLEESGFGFRLRRGGQVISHLLYMDDLKLFAPTALQLTGLLKVTETFSNSIRMEFGVDKCAVMHAKQGRLVESEGIQLSDSIQLRSLAATETYKYLGMSQGLGISETDMKQLLRDRFLGRLKKVLKSLLSGGNKVRAYNGWVMPVLMYSFGILKWTQTELDTLDRTVRTTLTAYRMHHPRSSVMRLYIPRKCGGRGFLNVKTLHNREICSLREYFLRADGEMHADVVAVDNGLTPLSLAKENWRKPVVLTTDARRLVWQGKELHGRYYRALHGPDVDLAASVAWLRFGDLFGETEGFVCAIMDEVVMTNNYRKYILRDGTIDICRACHRPGESLRHIISGCSRLANGQYLHRHNQVARIIHQQLALKYRLVTSEVPYYRYEPQPVLEEGHISLYWDRSIITDRTIVANKPDIVLIDRQERRAMIVDITVPHDENLVKAEKDKESKYLDLAHEVIDMWDIDAAIIVPIVVSAHGLLAKSLDKHLKRLALGGWIKGQIQKAVLLETARIVRKFLSLEP

SEQ ID NO: 12503 - protein, 1212 aa, Ptilodon capucinus
MTDAPRRNPRRQCRQRSAVRHYAQSTPPDQSPRSASPSPASIIRTSVTAVASSESDEYFSPPTSPPPVRRQRGRPPGHLGLLGQPAPNRVLVPSGVVRRMRWTSSMNENVMRAYYEATEGGTNLTAYRDRMLPLFQSLEPAVNVSAQRLSDQVRVIQRGNMLADTVLDRLRSEVQSRRVVPVASSQPAAQPVARATVTSRLAADSDVDRDNAPIDVSTQYNDLLRSTLEDVVREYRSMPNHLRPRIPRLPMHKGNRALVGALDSLLSIYFDSSDDLVDTHSILYCAAITVCRVARVKVFNTDTTTRPKPAVPAWQCRIERRISEARALIGKLSCFREGNTRPRVMRFVKRAFAGTDVSPREYISRVTERIDFLKQKIYAWANRIRRYKARVDRYSQNSMFQRDQRWVYRSWERPNEPVSELQRPDDNAMTTFWRDIWSVPVTHYEGNWIGDVERMCEPIKEMEAISIGPLDVANAVRSLPNWKAPGPDGLHNFWLKWLRSSHVRLASQFQSALQSGSLPEFITTGVTHLLHKTGSTTDPKNYRPITCLPTIYKTLTSILRAKIARHVEDNSIMSASQNGCRSGSRGTKELLLIDMTICQQARRNRKDLSTCWIDYKKAYDSVPHTWLVRVLELYKIDTTLRTFLESCMRQWKTVLLCPGSRQILGNGEPIRIERGIFQGDSLSPLWFCLALNPLSTLLEESGFGFRLRRGGQVISHLLYMDDLKLFAPTALQLSGLLKVTETFSNSIRMEFGVDKCAVMHAKQGRMVESEGIQLSDSIQLRSLAATETYKYLGMSQGLGISETDMKQLLRDRFLGRLKKVLKSLLSGGNKVRAYNGWVMPVLMYSFGILKWTQTELDALDRTVRTTLTAYRMHHPRSSVMRLYIPRKCGGRGFLNVKTLHNREICSLREYFLRADGEMHVDVVAVDNGLTPLSLAKENWRKPVVLTTDDRRVVWQGKELHGRYYRALHGPDVDLAASVAWLRFGDLFGETEGFVCAIMDEVVMTNNYRRYILRDGTIDICRACHRPGESLRHIISGCSRLANGQYLHRHNQVARIVHQQLALKYRLVTSEVPYYRYEPQPVLEEGHITLYWDRSIITDRTIVANKPDIVLIDRQERRAMIIDITVPHDENLVKAEKDKESKYLDLAHEVVDMWDIDAAIIVPIVVSAHGLLAKSLDKHLKRLALGSWIKGQIQKAVLLETARIVRKFLSLEP

SEQ ID NO: 12504 - protein, 868 aa, Ptilodon capucinus
MRFVKRAFAGTDVSPREYISRVTERIDFLKQKIYAWANRIRRYKARVDRYSQNSMFQRDQRWVYRSWERPNEPVSELQRPDDNAMTTFWRDIWSVPVTHYQGNWIGDVERMCEPIKEMEAISIGPLDVANAVRSLPNWKAPDPDGLHNFWLKWLRSSHVRLASQFQSALQSGSLPEFITTGVTHLLHKTGSTTDPKNYRPITCLPTIYKTLTSILRAKIARHVEDNSIMSASQNGCRSGSRGTKELLLIDMTICQQARRNRKDLSTCWIDYKKAYDSVPHTWLVRVLELYKIDTTLRTFLESCMRQWKTVLLCPGSRQILGNGEPIRIERGIFQGDSLSPLWFCLALNLLSALLEESGFGFRLRRGGQVISHLLYMDDLKLFAPTALQLSGLLKVTETFSNSIRMEFGVDKCAVMHAKQGRMVESEGIQLSDSIQLRSLAATETYKYLGMSQGLGISETDMKQLLRDRFLGRLKKVLKSLLSGGNKVRAYNGWVMPVLMYSFGILKWTQTELDALDRTVRATLTAYRMHHPRSSVMRLYIPRKCGGRGFLNVKTLHNREICSLREYFLRADGEMHVDVVAVDNGLTPLSLAKENWRKPVVLTTDNRRVVWQGKELHGRYYRALHGPDVDLAASVAWLRFGDLFGETEGFVCAIMDEVVMTNNYRRYILRDGTIDICRACHRPGESLRHIISGCSRLANGQYLHRHNQVARIVHQQLALKYRLVTSEVPYYRYEPQPVLEEGHITLYWDRSIITDRTIVANKPDIVLIDRQERRAIIIDITVPHDENLVKAEKDKESKYLDLAHEVVDMWDIDAAIIVPIVVSAHGLLAKSLDKHLKRLALGSWIKGQIQKAVLLETARIVRKFLSLEP

SEQ ID NO: 12505 - protein, 1212 aa, Ptilodon capucinus
MTDAPRRNPRRQCRQRSAVRHYAQSTPPDQSPRSASPSPASIIRASVNAVASSESDEYFSPPTSPPPVRRQRGRPPGHLGLLGQPAPNRVLVPSGVVRRMRWTSSMNENVMRAYYEATEGGTNLTAYRDRMLPLFQSLEPAVNVSAQRLSDQVRVIQRGNMLADTVLDRLRSEVQSRRVVPVASSQPAAQPVARATVTSRLAADSDVDRDNAPIDVSTQYNNLLRSTLEDVVREYRSMPNHLRPRIPRLPMHKGNRALVGALDSLLSIYFDSSDDLVDTHSILYCAAITVCRVARVKVFNTDTTTRPKPAVPAWQCRIERRISEARALIGKLSCFREGNTRPRVMRFVKRAFAGTDVSPREYISRVTERIDFLKQKIYAWANRIRRYKARVDRYSQNSMFQRDQRWVYRSWERPNEPVSELQRPDDNAMTTFWRDIWSVPVTHYEGNWIGDVERMCEPIKEMEAISIGPLDVANAVRSLPNWKAPGPDGLHNFWLKWLRSSHVRLASQFQSALQSGSLPEFITTGVTHLLHKTGSTTDPKNYRPITCLPTIYKTLTSILRAKIARHVEDNSIMSASQNGCRSGSRGTKELLLIDMAICQQARRNRKDLSTCWIDYKKAYDSVPHTWLVRVLELYKIDTTLRTFLESCMRQWKTVLLCPGSRQILGNGEPIRIERGIFQGDSLSPLWFCLALNPLSTLLEESGFGFRLRRGGQVISHLLYMDDLKLFAPTALQLSGLLKVTETFSNSIRMEFGVDKCAVMHAKQGRMVESEGIQLSDSIQLRSLAATETYKYLGMSQGLGISETDMKQLLRDRFLGRLKKVLKSLLSGGNKVRAYNGWVMPVLMYSFGILKWTQTELDALDRTVRTTLTAYRMHHPRSSVMRLYIPRKCGGRGFLNVKTLHNREICSLREYFLRADGEMHVDVVAVDNGLTPLSLAKENWRKPVVLTTDDRRVVWQGKELHGRYYRALHGPDVDLAASVAWLRFGDLFGETEGFVCAIMDEVVMTNNYRRYILRDGTIDICRACHRPGESLRHIISGCSRLANGQYLHRHNQVARIVHQQLALKYRLVTSEVPYYRYEPQPVLEEGHITLYWDRSIITDRTIVANKPDIVLIDRQERRAMIIDITVPHDENLVKAEKDKESKYLDLAHEVVDMWDIDAAIIVPIVVSAHGLLAKSLDKHLKRLALGSWIKGQIQKAVLLGTARIVRKFLSLEP

SEQ ID NO: 12506 - protein, 1203 aa, Agrochola circellaris
MLTRSATRRARPPPPDSSLSSALPPPVSSPIISAVTTPVAVVASSSSDEYFSPPTSPTPVRRQGRGRPPRSLGLRGQPAPNRVPAAGGCVRRMRWTQNVNENVMRAYFGATEGGSNLTAYRGRMLSLFQVLEPAVNVSAQRLSDQVRVIQRNHMLDDAVLDRLRLESRNNRVTPASPLVAVQLQNSPSATPRADHVGEEDDDGVISVSSQCNARLRNALEDAFRDYRSTPPGLRPRLPRLPMHKKNKALVCTLDSLLSNYFDGSKDLADTHSILYCAAVAACRVAHVKFPSSDRAPRPKPAVPAWQCRIERRIGEARVLIGKLICFREGNTRPRVMRFVKRAFSGTDTSSRDYLARVTERIDFLKQKICAWANRIRRYRRRVERYTQNRTFQSDERWVYRAWERLDQGVIDTRLPDDDAMCSFWRSIWSAPVNHTEGDWTGKIERACERIPEMGAITISPQDVACAVRPLPNWKSPGPDGLHNFWIKWFQRSHARLASQFQSALESGSLPQFLTTGITHLLHKSGSTAEPKNYRPITCLPTVYKVFTSILRTKINKHIDTNSIMSASQNGCKNGSRGTKELLLIDMAISQQVRRSRRDLSTCWIDYKKAYDSVPHTWLMRVLELYKVDTTLRTFLISCMGQWRTVLRYPGCRQIQRNSEPIRIERGIFQGDSLSPLWFCLALNPLSTLLEDSGLGYRLRRGGQVISHLLYMDDLKLFAPNNLQLVELLKVTETFSSAIRMEFGVDKCAVMHVKRGGIVESGGTQLPDSIHLRSLSSIETYKYLGMSEALGINTADMKQSLKERFFDRLNKVLNSLLSGGNKVRAFNGWVMPVLMYSFGILKWTQTELDALDRRVRTLLTVNRMHHPRSSVMRLYIPRKCGGRGFLNAKTLHNREVCSLREYFLEADVGMHRDVVSVDKGLTPLSLANENWRKPIVLDTNDRREVWQSKELHGRFYRALHGPDVDLLASVSWLRFGDLFGETEGFVFAIMDEVMMTNNYRKYIVKDGTVDICRACHRPGESIRHIISGCSRLANGDYLHRHNLVARIIHQQLALKYSLVESEVPYYRYMPDPVLENGNITLYWDRSIITDRTIVANKPDIVVIDRLERRTMIIDIAVPHDENLVKAEKDKQIKYLDLAREVVDMWDVDTAVIVPIVVTANGIIAKSLDQHLRRLSLGSWIKGLIQKAVLLDTARIVRRFLSQEP

SEQ ID NO: 12507 - protein, 1203 aa, Agrochola circellaris
MLTRSATRRAHPPPPDSSLSSALPPPVSSPIISAVTTPVAVVASSSSDEYFSPPTSPTPVRRQGRGRPPRSLGLRGQPAPNRVPAAGGCVRRMRWTQNVNENVMRAYFGATEGGSNLTAYRGRMLSLFQVLEPAVNVSAQRLSDQVRVIQRNHMLDDAVLDRLRLESRNNRVTPASPLVAVQLQNSPSATPRADHVGEEDDDGVISVSSQCNARLRNALEDAFRDYRSTPPGLRPRLPRLPMHKKNKALVCTLDSLLSNYFDGSKDLADTHSILYCAAVAACRVAHVKFPSSDRAPRPKPAVPAWQYRIERRIGEARVLIGKLICFREGNTRPRVMRFVKRAFSGTDTSSRDYLARVTERIDFLKQKICAWANRIRRYRRRVERYTQNRTFQSDERWVYRAWERLDQGVIDTRLPDDDAMCSFWRSIWSAPVNHTEGDWTGKIERACERIPEMGAITISPQDVACAVRPLPNWKSTGPDGLHNFWIKWFQRSHARLASQFQSALESGSLPQFLTTGITHLLHKSGSTAEPKNYRPITCLPTVYKVFTSILRTKINKHIDTNSIMSASQNGCKNGSRGTKELLLIDMAISQQVRRSRRDLSTCWIDYKKAYDSVPHTWLMRVLELYKVDATLRTFLISCMGQWRTVLRYPGCRQIQRNSEPIRIERGIFQGDSLSPLWFCLALNPLSTLLEDSGLGYRLRRGGQVISHLLYMDDLKLFAPNNLQLVELLKVTETFSSAIRMEFGVDKCAVMHVKRGGIVESGGTQLSDSIHLRSLSSIETYKYLGMSEALGINTADMKQSLRERFFNRLNKVLNSLLSGGNKVRAFNGWVMPVLMYSFGILKWTQTELDALDRRVRTLLTVNRMHHPRSSVMRLYIPRKCGGRGFLNAKTLHNREVCSLREYFLEADVGMHRDVVSVDKGLTPLSLANENWRKPIVLDTKDRREVWQSKELHGRFYRALHGPDVDLLASVSWLRFGDLFGETEGFVFAIMDEVMMTNNYRKYIVKDGTVDICRACHRPGESIRHIISGCSRLANGDYLHRHNLVARIIHQQLALKYSLVESEVPYYRYMPDPVLENGNITLYWDRSIITDRTIVANKPDIVVIDRLERRTMIIDIAVPHDENLVKAEKDKQIKYLDLAREVVDMWDVDTAVIVPIVVTANGIIAKSLDQHLRRLSLGSWIKGLIQKAVLLDTARIVRRFLSQGP

SEQ ID NO: 12508 - protein, 1032 aa, Agrochola circellaris
MRNSHATAPPSQTVMVAPQFTINQVDEGIDDMATNVSTQYNEELRSALERAIREYRSMSPELRPRLPRLPMHNKNRALVAALDSQLSNYFDDCEDLTDAHSILYCAAVAACRVAHVKFANDSRATRPETAVPAWQCRIERRIGGARALIGKLICFREGNTRPRVMRFVRRAFSGTDISPEDYVSRATERIDFLKQKVYAWANRIRRYKRRVERYTQNRTFQSDERRVYRAWEQPDQGVADARLPDDDAMCSFWRSIWSAPVSHTEGDWTREVERACDPIPEMGAITICPQDVARAVRPLPNWKSPGPDGLHNFWIKWFKRSHARLAAQYQTALESGSLPEFLTTGVTHLLHKSGSTADPKNYRPITCLPTVYKVLTSILRAKINKHIDTNSIMSASQNGCRNGSRGTKELLLIDMTISQQVRRSRKDLSTCWIDYKKAYDSVPHTWLMRVLELYKVDATLRTFLLSCMGQWRTVLRYPGCRNIQRNSEPIRIERGIFQGDSLSPLWFCLALNPLSTLLEGSDLGYRLRRGGQVISHLLYMDDLKLFAPNNFQLMELLKVTETFSRAIRMEFGVDKCAVMHVKRGEIVESVGTQLTDSINFRALSASETYKYLGMSETLGINVTDMKQSLKERFFGRLKKVFNSFLSGGNKVRAFNGWVMPVLMYSFGVLKWTQTELDALDRRVRTLLTGYRMHHPRSSVMRLYIPRKCGGRGFLNAKTLHNREICSLREYFLEADVGMHRDVVAVDKGLTPLSLAKENWRKPAVLDTNDRKEVWQNKELHGRYFRALHGPDVDLLASVAWLRFGDLFGETEGFVCAIMDEVMMTNNYRRFIVKDGTVDICRACHRPGESIRHIISGCSRLANEEYLHRHNLVARIIHQQLALKYSLVESEVPYYRYVPDPVLESGHITLYWDRSIITDRSIVANKPDIVVVDRAERRTMIIDITVPHDGNLVKAEKDKQIKYLDLAREVVDMWDVDSAIIVPIVVSANGLIAKSLDQHLRRLSLGGWIKGLIQKAVLLDTARIVRRFLSLEP

SEQ ID NO: 12509 - protein, 1202 aa, Amphipyra tragopoginis
MLTRSRAKATRPPSSASSLSSASQPPEPAPTVSDVTPAAAVALSSSDEYFSPPTSPPPPRRRGRGRPPASIGPRGPPASDRVPAPGGSVQRMRWTQAMNENCMRAYFGATEGGTNLTAYRGRMLSLFQALEPAVNVSAQRLSDQVRVIQRDHRLDGAALDRLRSEMQSSHVVPLQSQTAAQSQVPSVVAPRSIPADEESDDRVTNVSTQSNEQLRSALELAIREYRSTLPDLRPRLPRLPMNKKNKALMCALDSLLSSYFDGSEDLADTHSILYCAAVAACRVAHVKVDNNDRAARPKPAVPAWQCRIERRIGGARALIGKLICFREGNTRPRVMRFVRRAFSGTDTSPRDYMSCVTERIDFLKQKVYAWANRIRRYKRRVERYTQNRMFQRDQRWVYRAWERADQGVGDAHLPDDDATNSFWRSIWSVPVSHTEGDWMRDVERVCEPILDMGAISISPQDVASAVRPLPNWKSPGPDGLHNFWLKWLRSSHARLASQFQSSLETGTLPQFLTTGVTHLLHKSGSTAEPKNYRPITCLPTVYKLLTSILRCKINSHIENNSIMSASQNGCRNGSRGTKELLLIDMAISQQVRRSRKDLSTCWIDYKKAYDSVPHTWLMRVLELYKVNATLCTFLTSCMGQWRTVLRYPGSRQIQGIGEPIRIERGIFQGDSLSPLWFCLALNPLSTLLEGSGLGYRLRRGGQVISHLLYMDDLKLFAPNNLRLLELLKVTETFSNSIRMEFGVDKCAVMHVKRGRIMESVGTQLSDSIHLRSLSPTETYKYLGMSEALGINVTDMKQSLRERFYGRLKKVLKSLLSGGNKVRAFNGWVMPVLMYSFGILKWTQTELDALDRRVRTLLTAYRMHHPRSSVMRLYIPRKCGGRGFLNAKTLHNREVCSLREYFSQADVGMHRDVVAVDKGLTPLSLAKENWRKPVVLDTNGRRDVWRSKELHGRFYRALHGPDVDFLASVAWLRFGDLFGETEGFVCAIMDEVMMTNNYRRYVVKDGTVDICRACHCPGESIRHIVSGCSRLANGEYLHRHNLVARIIHQQLALKYNLVDAEVPYYRYVPDPVLENGHVTLYWDRSIITDRTIVANKPDIVVIDRSERRAMIVDITVPHDENLVKAENDKKIKYLDLAHEVVDMWDIDSAVIVPIVVTANGLIAKSLDQHLMRLSLGGWIKGLIQKAVLLDTARIVRKFLSLEP

SEQ ID NO: 12510 - protein, 868 aa, Amphipyra tragopoginis
MRFVRRAFSGTDVSPREYMSRVTERIDFLKQKVCAWANRMRRYRRRVDRYTQNRLFQSDERWVYRTWERPDQRVSDTHLPDNDVMNAFWRNIWSVPVTHTEGDWMQEVQRACEPIQEMGDIIISPQDVASAVRPMSNWKSPGPDGLHNFWLKWLRSSHARLASQFQSSLESGSLPQFLTTGVTHLLHKSGSTAEPKNYRPITCLPTVYKVLASILRAKINNHIDNNSIMSASQNGCRNGSRGTKELLLIDMAISQQVRRSRKDLSTCWIDYKKAYDSVPHTWLMRVLELYKVNTTLCAFLTSCMGQWRTVLHYPGCRQIQRMGEPIRIERGIFQGDSLSPLWFCLALNPLSTLLEGSGLGYRLRRGGQVISHLLYMDDLKLFAPNNLQLLELLKVTETFSNSIRMEFGVDKCAVMHVKRGRIMESVGTQLSDSIHPRSLSSTETYKYLGMSEALGVNETGMKQSLKERFFGRLKKVFNSLLSGGNKVRAFNGWVMPVLMYSFGILKWTQTELDALDRRVRSLLTANRMHHPRSSVMRLYIPRKCGGRGFLNAKTLHNREVCSLREYFSQADVGMHRDVVAVDKGFTPLSLAKENWRKPVVLDTNDRREVWRSKELHGRFYRALHGPDVDFLASVAWLRFGDLFGETEGFVCAIMDEVMMTNNYRKYIVKDGTVDICRACHCPGESIRHIVSGCSRLANGEYLHRHNLVARIIHQQLALKYNLVDSEVPYYKYVPDPVLENGHVTLYWDRSIITDRTIVANKPDIVVIDRSERLTMIVDITVPHDENLVKAEKDKEIKYQDLAHEVVAMWDVDSAIIVPIVVTANGLIAKSLDQHLKRLSLGSWIKGLIQKAVLLDTARIVRKFLSLRP

SEQ ID NO: 12511 - protein, 1202 aa, Amphipyra tragopoginis
MMLTRSQARARNYYAHPPPPDSSPSSASQQQELDPAPPAAAVASSSSDEYFSPPSSPPPVRRRGGARPPACLGPRGQPAPNRVPAAGGNVSRMRWTQSINENVMRAYYGATEGGINLTAYRDRMLSLFQVLEPAINVSTQRLSDQVRVIQRNRRLDDTVLERLRSEVQNNRTVTTPLQAAEQPQLPAVSPRPIHVDEAGDGEVIVVSNQCSDELRSALEGAILEYRATPPELKPRLPRLPMHKKNRALVCALDSLLSNYFDGSEDLGDTHSILYCAAIAACRVAHVKPTQNERATRPKPAVPAWQCRIERRIDGARALIGKLICFREGNTRPRVMRFVRRAFSGTDISPRDYMSRVTERIDFLKQKVYAWANRIRRYKRRVERYTQNRTFQSDQRRVYRTWERPVPGVSDMRLPDDDAMSSFWRSIWSVPVAHTEGDWMRDIERACETIPEMGEIVISPQDVATAARPLPNWKSPGPDGLHNFWIKWLRSSHACLASQFQSSLESGSLPQFLTTGVTHLLYKSGSTAEPKNYRPITCLPTVYKLFTSILRVKISNHIDNNYILSPSQNGCRSGSRGTKELLLIDMAISQQVRRSRKDLSTCWIDYKKAYDSVPHTWLMRVMELYKINTTLRTLLMSCMRQWRTVLRYPGCREILGRGEPIRIERGIFQGDSLSPLWFCLALNPLSTLLEGTRLGYRLRREGQVISHLLYMDDLKLFAPTDLQLMELLKVTENFSNSIRMEFGVDKCAVMHVKRGGIVESEGIQPSNSIQLRSLSPTETYKYLGMSEALGISEADMRQSLRERFFGRLNKVLKSLLSGGNRVRAFNGWVMPVLMYSFGILKWTQTDLDALDRRVRALLTVHRMHHPRSSVMRLYIPRKCGGRGFLNAKTLHSREVCSLREYFLQAEGEMHRDVVAVDRGLTPLALAKENWRKPVVLSTNDREEVWQSKELHGRFYRALHGPDVDFLASVSWLRFGDLFGETEGFVCAIMDEVMMTNNYRKYIVKDGTVDICRACHRPGESIRHIISGCSRLANGEYLHRHNLVARIIHQQLALKYNLVESEVPYYRYVPDPVLENGHATLYWDRSIITDRTIVANKPDIVVIDRSERRTMIVDITVPHDENLVKAEKDKQLKYLDLAHEVVAMWDVDSAVIVPIVVTANGLIAKSLDQHLKRLSLDGWIKGLIQKAVLLDTARIVRRFLSLEP

SEQ ID NO: 12512 - protein, 1207 aa, Amphipyra tragopoginis
MLTRSRAKARAQTTQPPPPASSLSSASQPPESSPNVSAVTPAAAVASSSSDEYFSPPTSPPPARRRGGRRPPDRLGPRGPQASDRVPAPGGSVSRMRWTQTINENAMRAYFGATEGGTNLTAYRSRMLSLFQVLEPTVNVSAQRLSDQVRAIQRGHMLDDTVLDRLRSEIQCSPVISSSSQAPGLISRNVPVASPRLQHVDEEDDDRATAVSIQCNEQLRRALEDAMREYRSTRPELRPRLPRLPMHRRNRALMCALDSLLSNYFDSSEDLGDTHSILYCAAVAACRVAHVKFINNERATRPKNAVPAWQCRIERRIAEARALIGKLICFGEGNTRPRVMRFVRRAFSGTDVSPREYMSRVTERIDFLKQKVYAWANRIRRYRRRVDRYNQNRMFRSDERWVYRNWERPDQSVGAAHLPDDDAMNSFWRSIWSVPVTHTEGDWMRDVERMCEPILDMGAIIISPQDVASAVRPLPNWKSPGPDGLHNFWLKWLRSSHARLASQFQSSLETGTLPQFLTTGVTHLLHKSGSTAEPKNYRPITCLPSVYKVLTSILRTKINNHIDNNSIMSASQNGCRNGSRGTKELLLIDMAISQQVRRSRKDLSTCWIDYKKAYDSVPHTWLMRVLELYKVNTTLCAFLTSCMRQWRTVLRYPGCRQIQGIGEPIRIERGIFQGDSLSPLWFCLALNPLSTLLEGSGLGYRLRRGGQVISHLLYMDDLKLFAPNKLQLLELLKVTETFSNSIRMEFGVDKCAVMHVKRGRIMESVGTQLTDSIHLRSLSSTETYKYLGMSEALGINETDMKQSLRERFYGRLKKVLNSLLSGGNKVRAFNGWVMPVLMYSFGILKWTQTELDALDRRVRSLLTANRMHHPRSSVMRLYIPRKCGGRGFLNAKTLHNREVCSLREYFSQADVGMHRDVVAVDKGFTPLSLAKENWRKPVIFDTNDRREVWRSKELHGRFYRALHGPDVDFLASVAWLRFGDLFGETEGFVCAIMDEVMMTNNYRKYIVKDGTVDICRACHCPGESIRHIVSGCSRLANGEYLHRHNLVARIIHQQLALKYNLVDAEVPYYKYVPDPVLENGHVTLYWDRSIITDRTIVANKPDIVVIDRSERLTMIIDITVPHDENLVKAEKDKEIKYQDLAHEVVDMWDVDSAVIVPIVVTANGLIAKSLDQHLKRLSLGGWIKGLIQKAVLLDTARIVRKFLSLRP

SEQ ID NO: 12513 - protein, 1205 aa, Amphipyra tragopoginis
MLTRSRAKTQQSTHLPPSASSLSSASQPPEPASIVSDVTPAAAVASSSSDEYFSPATTPPPARRRGRGRPPACLGPRGPPASDRVPAPGGSVQRMRWTQSMNENCMRAYFGATEGGTNLTAYRGRMLSLFQALEPAVNVSAQRLSDQVRVIQRDHRLDDAALDRLRNEMQNSHVTLLPAQIRTQPLVPPAVPLEPNHGDGEEEDRAISAGTQCSELMRSALEDALREFRSTPPELRPRLPRLPMHNKNRALVCALDLLLSNVFESSEDLGDTHSILYCAAVAACRVAHVKFPNDNRATRPKSAVPAWQCRIERRIDEARVLIGKLTCFREGNRRPRVMRFVRRAFSGTDIGPGEYVSRITERIDFLKQKVYAWANRIRRYRRRVDRYTQNRIFQSDQRWVYRTWERPDQGVSDAHLPDNDVMNAFWRNIWSVPVTHTEGDWMQEVQRACEPIQEMGAVTIGPQDVASAVRPMPNWKSPGPDGLHNFWIKWLRSSHARLASQFQSSLESGSLPSFLTTGVTHLLFKSGSTAEPKNYRPITCLPTVYKLLTSILRAKLNHHIDSNAIMCATQNGCKNGSRGTKELLLIDMAISQQVRRSRKDLSTCWIDYKKAYDSVPHTWLMRVLELYKINATLRTFLMSCMGQWRTVLHYPGCRQIQGNGELIRIERGIFQGDSLSPLWFCLALNPLSTLLEGSGLGYRLRRGGQVISHLLYMDDLKLFAPNNLQLLELLKVTETFSNSIRMEFGVDKCAVMHVKRGRIMESVGTQLSDFIHLRSLSSTETYKYLGMSEALGINEADMKQSLRERFFGRLIKVLKSLLSGGNKVRAFNGWVMPVLMYSFGILRWTQTELDALDRRVRTLLTAYRMHHPRSSVMRLYIPRKCGGRGFLNAKTLHNREVCSLREYFSQADVGMHRDVVAVDKGLTPLSLAKENWRKPVVLDTNGRRDVWRSKELHGRFYRALHGPDVDFLASVAWLRFGDLFGETEGFVCAIMDEVMMTNNYRKYIVKDGTVDICRACHCPGESIRHIVSGCSRLANGEYLHRHNLVARIIHQQLALKYNLVDTEVPYYRYVPDPVLENGHVTLYWDRSIITDRTIVANKPDIVVIDRLERRTMIVDITVPHDENLVKAENDKKIKYLDLAHEVVDMWDVDSAVIVPIVVTANGLIAKSLDQHLMRLSLGSWIKGLIQKAVLLDTARIVRKFLSLEP

SEQ ID NO: 12514 - protein, 1206 aa, Amphipyra tragopoginis
MLTRSRAKAQNTRPPSSASSLSSASQPPEPASIVSDVTPAAAVASSSSDEYFSPATSPSPPPARRRGRGRPPTCLGPRGPPASDRVPAPGGSVQRMRWTQSMNENCMRAYFGATEGGTNLTAYRGRMLSLFRALEPAVNVSAQRLSDQVRVIQRDHRLDDAALDRLRSEMQNSHAAPLPSQIRTQTLVPPAVPLESNYADEEGEDRAISAGTQYSEIMRSALEDALREFRSTPPELRPRLPRLPMHNKNRALVCALDSLLPNVFESSEDLGDTQSILYCAAVAACRVAHVKFPNDNRATRPKSAVPAWQCRIERRIDEARVLIGKLTCFREGNRRPRVMRFVRRAFSGTDIGPGEYATRVTERIDFLKQKVYAWANRIRRYRRRVDRYTQNRIFQSDQRWVYRTWERPDQGVSDTRLPDNDVMNAFWRNIWSVPVTHTEGDWMQEVQRACEPIQEMGAVTIGPQDVTSAVRPMPNWKSPGPDGLHNFWIKWLRSSHARLASQFQSSLESGSLPAFLTTGITRLLFKSGSTAEPKNYRPITCLPTVYKLLTSILRAKLNHHIDSNAIMCATQNGCKNGSRGTKELLLIDMAISQQVRRSRKDLSTCWIDYKKAYDSVPHTWLMRVMELYKVNATLRTFLMSCMGQWRTVLHYPGCRQIQGNGELIRIERGIFQGDSLSPLWFCLALNPLSTLLEGSGLGYRLRRGGQVISHLLYMDDLKLFAPNNLQLLELLKVTETFSNSIRMEFGVDKCAVMHVKRGRIMESVGTQLSDSIHLRSLSSTETYKYLGMSEALGINEADMKQSLRERFFGRLIKVLKSLLSGGNKVRAFNGWVMPVLMYSFGMLRWTQTELDALDRRVRTLLTAYRMHHPRSSVMRLYIPRKCGGRGFLNAKTLHNREVCSLREYFSQADVGMHRDVVAVDKGLTPLSLAKENWRKPVVLDAKGRMEVWRSKELHGRFYRALHGPDVDFLASVAWLRFGDLFGETEGFVCAIMDEVMMTNNYRKYIVKDGTVDICRACHCPGESIRHIVSGCSRLANGEYLHRHNLVARIIHQQLALKYNLVDTEVPYYKYVPDPVLENGHVTLYWDRSIITDRTIVANKPDIVVIDRLERRTMIVDITVPHDENLVKAENDKKIKYLDLAHEVVDMWDVDSAVIVPIVVTANGLIAKSLDQHLMRLSLGSWIKGLIQKAVLLDTARIVRRFLSLEP

SEQ ID NO: 12515 - protein, 1197 aa, Noctua pronuba
MLTRAAARRARLSPPDPSLSSASPLPESSPIVSAVTPAVAVASSSSDEYFSPPTTPPPVRRRRGRRPPDGLGPRGPPASDRVPALGGSVQRMRWTQSINENVMRSYYGATEGGNNRTAYRVRMLSLFQVLEPAVNVSAQRLSDQVRVIQRNRMLDDTVLDRLRTEMQSSHVITPSAQAVVLPQSNTIPNRGNDESNDMVTNVSTQCNEEIRSALEGAIREYRSMQPDLRPRIPRLPMHNKNRALVAVLDSQLSNYFDNCEDLTDAHSILYCAAVAACRVAHVKFSDDRATRPKPAVPAWQYRIERRIGGARALIGKLICFREGNTRPRVMRFVRRAFSGTDISPRDYMSRVTERIDFLKQKVYAWANRIRRYKRRVDRYTQNRTFQRDERWVYRAWERPDQGVADTRLPDDDAMCSFWRSIWSVPVSHTEDEWTREVERACDPVQEMGAITISPQDVVCAVRPLPNWKSPGPDGLHNFWIKWFTRSHARLATLFQSALESGSLPEFLTTGITHLLHKSGSTAEPKNYRPITCLPTVYKVLTSILRTKISKHINDNSIMSPSQNGCRNGSRGTKELLLIDMAISQQVRRFRRDLSTCWIDYKKAYDSVPHTWLMRVLELYKVDTTLRTFLMSCMGQWRTVLRYPGCRQIQRDSEPIRIERGIFQGDSLSPLWFCLALNPLSTLLEDSGLGYRLRRGGQVISHLLYMDDLKLFAPNDLQLMELLKVTETFSSAIRMEFGVDKCAVMHVKRGEIVESVRTQLSDSINLRSLSATETYKYLGMSEALGINVADMKQSLKERFFGRLKKVFNSLLSGGNKVRAFNGWVMPVLMYSFGILKWTQTELDALDRRVRTLLTAYRMHHPRSSVMRLYIPRRCGGRGFLNAKTLHNREICSLREYFLEADVGMHRDVVAVDKGLTPLSLAKENWRKPVVLDTNDRREVWQSKELHGRFFRALHGPDVDLSASVAWLRSGDLFGETEGFVCAIMDEVMMTNNYRRFIVKDGTVDICRACHRPGESIRHIISGCSRLANGEYLHRHNLVARIIHQQLALKYNLVESEVPYYKYVPDPVLENGCVTLYWDRSIITDRTIVANKPDIVVVDRSERRAMIVDITVPHDENLVKAEKDKQIKYLDLAHEVVDLWDVDSAIIVPIVVSAHGLIAKSFDQHLRRLSLGSWIKGLIQKAVLLDTARIVRRFLSLEP

SEQ ID NO: 12516 - protein, 1204 aa, Noctua pronuba
MLTRLRAKQLAHPPSPGSSLSSASQPPGRATSVSTLSPVAAVASSSSDEFFSPPSTPPPPQRRRGRGRPPAGLGPRGQQAPNRVPAAGGNVSRMRWTQSINEQVMRAYYGATEGGSNLTAYRGRMLSLFQVLKPAVSVSAQRLSDQVRVIQRNHMLDDTVLDRLRSESRSNPVTPASPMIAVQLQSVTSTSPRSDRGGEEDDNEVISVSTQCNAQLRSALEGAFREYRSTPPELRPRLPRLPMHKKNKALMCALDSQLSNCFDSSKDLADTHSILYCGAVAACRVAHVKFPNNDRATRSKLAVPAWQCRIERRIGEARALIGKLICFREGNTRPRVMRFVRRAFSGTDISFRDYLTRVTERIDFLKQKICAWANRIRRYKRRVDRYTQNRTFQSDERWVYRAWERPDQGVTDTRLPDDDAMCSFWRSIWSVPVSHTEGDWTREVERACDPIPQMGAINISPQDVACAVRPLPNWKSPGPDGLHNFWIKWFQRSHARLASQFQSALESGSLPQFLTTGITHLLHKSGSTAEPKNYRPITCLPTVYKVLTSILRAKINHHIDSNSIMSASQNGCRNGSRGTKELLLIDMAISQQVRRSRRDLSTCWIDYKKAYDSVPHTWLMRVLELYKVDATLRTFLMSCMGHWRTVLRYPGCRQIQGNSEPIRIERGIFQGDSLSPLWFCLALNPLSTLLEGSGLGYRLRRGGQVISHLLYMDDLKLFAPNNLQLMKLLKVTETFSSAIRMEFGVDKCAVMHVKRGEIMESVGTQLSDSIYLRSLSSTETYKYLGMSEALGINTADMKQSLRERFFGRLNKVLGSLLSGGNKVRAFNGWVMPVLMYSFGILKWTQTELDALDRRVRALLTANRMHHPRSSVMRLYIPRKCGGRGFLNAKTLHNREVCSLREYFLEADVGMHRDVVSVDKGLTPLSLANGNWRKPRVLDTNDRKEVWQGKELYGRFYRALHGPDVDFLASVSWLRFGDLFGETEGFVCAIMDEVMMTNNYRKYIVKDGTVDICRACHRPGESIRHIISGCSRLANGEYLHRHNLVARIIHQQLALKYNLVESEVPYYKYAPDPVLDDGNITLYWDRSIITDRTIVANKPDIVVIDRLERRAMIVDITVPHDENLVKAEKDKQFKYLDLAREVVDMWDVNTAVIVPIVVSANGLIAKSLDQHLRRLALGSWIKGLIQKAVLLDTARIVRRFLSQEP

SEQ ID NO: 12517 - protein, 1195 aa, Noctua pronuba
MLTRLRAKQLAHPTSPGSSLSSASQPPGRATSVSTLSPVAAVASSSSDEFFSPPSTPPPTQRRRGRGRPPAGLGPRGQQAPNRVPAAGGNVSRMRWTQSINEQVMRAYYGATEGGSNLTAYRGRMLSLFQVLEPAVSVSVIQRNHMLDDTVLDRLRSESRSNPVTPASPMIAVQLQSVTSTSPRSDRGGEEDDSEVISVSTQCNAQLRSALEDAFREYRSTPPELRPRLPRLPMHKKNKALMCALDSQLSNCFDSSKDLADTHSILYCGAVAACRVAHVKFPNNDRATRPKLAVPAWQCRIERRIGEARALIGKLICFREGNTRPRVMRFVRRAFSGTDISFRDYLTRVTERIDFLKQKICAWASRIRRYKRRVDRYTQNRTFQSDERWVYRAWERPDQGVTDTRLPDDDAMCSFWRSIWSVPVSHTEGDWTREVERACDPIPQMGAINISPQDVACAVRPLPNWKSPGPDGLHNFWIKWFQRSHARLASQFQSALESGSLPQFLTTGITHLLHKSGSTAEPKNYRPITCLPTVYKVLTSILRAKINHHIDSNSIMSASQNGCRNGSRGTKELLLIDMAISQQVRRSRRDLSTCWIDYKKAYDSVPHTWLMRVLELYKVDATLRTFLMSCMGHWRTVLRYPGCRQIQGNSEPIKIERGIFQGDSLSPLWFCLALNPLSTLLEGSGLGYRLRRGGQVISHLLYMDDLKLFAPNNLQLMKLLKVTETFSSAIRMEFGVDKCAVMHVKRGEIMESVGTQLSDSIYLRSLSSTETYKYLGMSEALGINTADMKQSLRERFFGRLNKVLGSLLSGGNKVRAFNGWVMPVLMYSFGILKWTQTELDALDRRVRALLTANRMHHPRSSVMRLYIPRKCGGRGFLNAKTLHNREVCSLREYFLEADVGMHRDVVSVDKGLTPLSLANGNWRKPRVLDTNDRKEVWQGKELHGRFYRALHGPDVDFLASVSWLRFGDLFGETEGFVCAIMDEVMMTNNYRKYIVKDGTVDICRACHRPGESIRHIISGCSRLANGEYLHRHNLVARIIHQQLALKYNLVESEVPYYKYAPDPVLDDGNITLYWDRSIITDRTIVANKPDIVVIDRLERRAMIVDITVPHDENLVKAEKDKQFKYLDLAREVVDMWDVNTAVIVPIVVSANGLIAKSLDQHLRRLALGSWIKGLIQKAVLLDTARIVRRFLSQEP

SEQ ID NO: 12518 - protein, 1200 aa, Tinea trinotella
MLTRSRARNQSAQLTSSGSSLSSASQPPGSTPTVSQVISVAAVASSSSDECFSPPTTPPSARRRGGGRPPASLEPRGPSASGGVPATSGRVQRMRWTQSINENVMRSYFGATEGGSSLTAYRGRMLTLFQVLEPAVNVSAQRLSDQVRVIQRNRMLDDVVLDRLRLESRSSHVSPVSPPVAVQLQPSALPRPNNIEENDDDVTISVSNQYNEQLRSALEDAFREYRSTPPGLRPRIPRLPMHKKNRALVCALDSQLVNHFKSSKDLADTHSILYCAAVAVCRVAHVKFPNNDRAARLAVPAWQCRIERRIGEARALIGKLISFREGNTRPRVMRFVRRAFSGTDISSRDYQTRVTESIDFLKQKIYAWANRIRRYKRQVERYTQNRTFQSNERWVYRAWERPDQDVSDMCLPDDDAMSLFWRNIWSVPVGHTEGEWTREVERACDFIPEMGAIIISPQDVACAVRPLSNWKSPGLDGLHNFWIKCFQRSHARLAAQFQSALELGSLPQFLTTGITHLLHKSGSTAEPKNYRPITCLPTVYKVLTSILRAKIDKHIDTNCIMSASQNGCRSGSRGTKELLLIDVAISQQVRRSRRDLSTCWIDYKKAYDSVPHTWLMRVLELYKVDAALRTFLVSCMGQWRTVLHYPGCRRILGNGEPIKIERGIFQGDSLSPLWFCLALNPLSTLLDGSGQGYRLRRDGQVISHLLYMDDLKLFAPNNLQLMKLLKVTETFSSAISMEFGVDKCAIMHVKRGEIMESVGTQLSDSIHLRSLCSTETYKYLGMSEALGINAVDVKQSLRDRFFGRLNKVLNSLLSGGNKVRAFNGWVMPVLMYSFGILKWTQTELDALDRRVRTLLTANRMHHPRSSVMRLYIPRKCGGRGFLNAKTLHNREVCSLREYFLKTDVGMHRDVVAVDKGLTSLSLANENWRKPVVLDANDRREVWQSKELHGRFYRALHGPDVDFLASVSWLRFGDLFGETEGFVCAIMDEVMMTNNYRKYIVKDGTVDICRACHRPGESIRHIISGCSRLANGDYLHRHNLVARIIHQQLALKYNLVESEVPYYRYVPDPVLENGNITLYWDRSIITDRTIVANKPDIVVIDRLERCTIIVDVAVPHDENLVKAEKDKQIKYLDLAREVVDMWEVDTAIIVPIVVTANGLIAKSLDEHLKRLSLGSWIKRLIQKAVLLDTARIVRRFLSQEP

SEQ ID NO: 12519 - protein, 918 aa, Ochropleura plecta
MSNFLMTELHDRNQLYQSGSTGLSDVLVWPERSSANLSVSGRVPNTRPRVMRFVRRAFAETDISPSDYMSRITERIDFLKQKVYAWANRIRRYKRRVERYTLNRTFQSDERWVYRAWERPDQDVSDMRLPDDDAMCSFWRSIWSVPVSHTEGEWTREVERVCDPIPEMGAITISPQDVTCAVRPLPNWKSPGPDGLHNFWLKWIQRSHARLATLFQTALESGSLPKFLTTGITHLLHKSGSTAEPKNYRPITCLPTIYKVLTSILRAKITKHIDDNSIMSASQNGCRNGSRGTKELLLIDMAISQQVRRSRRDLSTCWIDYKKAYDSVPHTWLMKVLELYKVDATLRTFLSLCMRQWNTVLRYPGCRQIQRNSEPIRIERGIFQGDSLSPLWFCLTLNPLSTLLEDSDLGYRLRRGGQVISHLLYMDDLKLFAPNDSQLMELLKVTETFSSAISMEFGVDKCAVMHVKRGEIVESVGTQLSDSIHLRSLSANETYKYLGMSEALGINVADMKQSLKERFFGRLRKVFNSLLSGGNKVRAFNGWVMPVLMYSFGILKWTQTELDALDRKVRTLLTAYRMHHPRSSVMRLYIPRSCGGRGFLNAKTLHNREICSLREYFLETDVGMHRDVVTVDKGFTPLSLAKENWHKPVVLDTNDRKEVWQTKELHGRFFRALHGPDVDQSASVAWLRSGDLFGETEGFVCAIMDEVMMTNNYRRFIVKDGTVDICRACHHPGESIRHIISGCSRLANGEFLHRHNLVARIIHQQLALKYSLVESEVPYYRYEPDPVLENGNITLYWDRSIITDRTIVANKPDIVVVDRSERRAMIIDITVPHDENLVKAEKDKQIKYIDLAREVVDMWDVDSAIIVPIVVSANGLIAKSLDQYLRRLSLGSWIKGLIQKAVLLDTARIVRRFLSLEP

SEQ ID NO: 12520 - protein, 1017 aa, Ochropleura plecta
MNYEKKLFNRANEVSNDMATNVSTQCSEEMRSTLEGAIREYRYMSPELRPRLPRLPMHNKNRALVAALDSQLSNYFDNCENLTDAYSILYCAAVAVCRVAHVKFPDDRATRPKPAVPFWQCRIERRIGAARALIGKLICFREGNTRPRVMRFVRRAFSGTDITPPDYMSRIAERIDFLKQKVYAWANRIRRYKRRVERYTQNRTFQSDERWVYRAWERPDQGVSDTHLPDDNAMCLFWRSIWSVPVSHTEGEWTREVERACDPIPEMGALTISPQDVACAVRPLPNWKSPGPDGLHNFWIKWIQRSHVRLAALFQTALESGSLPKFLTTGITHLLHKSGSTAEPKNYRPITCLPTLYKVLTSILRAKITKHIDDNSIMSASQNGCRNGSRGTKELLLIDMAISQQVRRSRRHLSTCWIDYKKAYDSVPHTWLMRVLELYKIDATLRTFLISCMRQWSTVLRYPGCRQIQRNSEPIRIKRGIFQGDSLSPLWFCLALNPLSTLLENSGLGYRLRRGGQVISHLLYMDDLKLFAPNDLQLMELLKVTETFSSSIRMEFGVDKCAVMHVKRGEIVESVGTQLSDSINLRSLSATETYKYLGMSEALGINVADMKQSLKERFFGRLRKVFNSLLSGGNKVRAFNGWVMPVLMYSFGILKWTQTELDALDRKVRTLLTAFRMHHPRSSVMRLYIPRSCGGRGFLNAKTLHNREICSLREYFLETDVGMHRDVVAVDKGLTPLSLAKENWRKPVVLDTNDRREVWQSKELHGRFFRALHGPDVDQPASVAWLRSGDLFGETEGFVCAIMDEVMMTNNYRRFIVKDGTVDICRACHRPGESIRHIISGCSRLANGEYLHRHNLVARIIHQQLALKYSLVESEVPYYRYEPDPVLEHGNITLYWDRSIITDRTIVANKPDIVVVDRSERRAMIVDITVPHDENLVKAEKDKQIKYIDLAREVVDMWDVDSAIIVPIVVSANGLIAKSLDQHLRRLSLGSWIKGLIQKAVLLDTARIVRRFLSLEP

SEQ ID NO: 12521 - protein, 1197 aa, Ochropleura plecta
MLTRSQARSARHPPPGSSLSSASPPPEPSLVVSAVTPAVAVASSSSDEYFSPPTTPPPVRRRGRHRPPDGLGPRGPPASDRVPAPGGSVQRMRWTQSINENVMRSYYGATEGGNNLTAYRVRMLSLFQVLEPAVNVSAQRLSDQVRVIQRNRMLDDTVLDRLRTEMQSSQVITSSSQAVAPPQPHQLVNRANEVSNDMATNVSTQCSEEMRSTLEGAIREYRYMSPELRPRLPRLPMHNKNRALVAALDSQLSSYFDNCENLTDAHSILYCAAVAVCRVAHVKFPDDRATRPKPAVPFWQCRIERRIGAARALIGKLICFREGNTRPRVMRFVRRAFSGTDITPPDYMSRIAERIDFLKQKVYAWANRIRRYKRRVERYTQNRTFQSDERWVYRAWERPDQGVSDTHLPDDNAMCLFWRSIWSVPVSHTEGEWTREVERACDPIPEMGALTISPQDVACAVRPLPNWKSPGPDGLHNFWIKWIQRSHVRLAALFQTALESGSLPKFLTTGITHLLHKSGSTAEPKNYRPITCLPTLYKVLTSILRAKITKHIDDNSIMSASQNGCRNGSRGTKELLLIDMAISQQVRRSRRHLSTCWIDYKKAYDSVPHTWLMRVLELYKIDATLRTFLISCMRQWSTVLRYPGCRQIQRNSEPIRIERGIFQGDSLSPLWFCLALNPLSTLLENSGLGYRLRRGGQVISHLLYMDDLKLFALNDLQLMELLKVTETFSSSIRMEFGVEKCAVMHVKRGEIVESVGTQLSDSINLRSLSATETYKYLGMSEALGINVADMKQSLKERFFGRLRKVFNSLLSGGNKVRAFNGWVMPVLMYSFGILKWTQTELDALDRKVRTLLTTFRMHHPRSSVMRLYIPRSCGGRGFLNAKTLHNREICSLREYFLETDVGMHRDVVAVDKGFTPLSLAKENWRKPVVLDTNDRREVWQSKELHGRFFRALHGPDVDQPASVAWLRSGDLFGETEGFVCAIMDEVMMTNNYRRFIVKDGTVDICRACHRPGESIRHIISGCSRLANGEYLHRHNLVARIIHQQLALKYSLVESEVPYYRYEPDPVLEHGNITLYWDRSIITDRTIVANKPDIVVVDRSERRAMIVDITVPHDENLVKAEKDKQIKYIDLAREVVDMWDVDSAIIVPIVVSANGLIAKSLDQHLRRLSLGSWIKGLIQKAVLLDTARIVRRFLSLEP

SEQ ID NO: 12522 - protein, 1200 aa, Hecatera dysodea
MLTRSRTRAQITQSTSSGSSLSSASQPPGPTPAVSPEIPVAAVASSSSDEYFSPPTTPPPARRRGRGRPPTSLGPRGPPASDRVPAIGGSVQRMRWTETINENVMRSYYGATEGGTNLTAYRGRMLSLFQVLEPAVNVSAQRLSDQVRVIQRNRMLDDAVLDRLRLESRSSRVSPPSPPAAVQIQPSISPRPDHVSEDVDDGAITVSTQCNERLRSALEDAFREYRSTPPGLRPRLPRLPMHNKNRALVCALDSQLENCFNSSKDLADTHSILYCAAAAACRVAHVKFPNSDRAARPAVPAWQCRIERRIGEARALIGKLICFREGNTRRRVMRFVRRAFSGTDISPRDYLTRVTERIDFLKQKVYAWASRIRRYKRRVERYTQNRTFQSNERWVYRAWERPDQVVTDTHLPDDDAMCSFWRSIWSVPVSHTEGDWTREVERTCDPIPEMGAITISPQDVARAVRPLPNWKSPGPDGLHNFWIKWFTRSHARLASQFQSALESRSLPQFLTTGITHLLHKSGSTAEPKNYRPITCLPTVYKVLTSILRAKINDHIESNSIMSTSQNGCRNGARGTKELLLIDVAISQQVRRSRKDLSTCWIDYKKAYDSVPHTWLMRVLELYKVNTVLRTFLMSCMGQWRTVLHYPGCRHTQANSEPIRIERGIFQGDSLSPLWFCLALNPLSTLLEGSGQGYRLRRGGQVISHLLYMDDLKLFAPNNLQLMKLLKVTETFSSDISMEFGVDKCAVMHVKRGEIMESVGTQLSDSIYLRSLCSTETYKYLGMSEALGINATSVKQSLKERFFGRLNKVLNSLLSGGNKVRAFNGWVMPVLMYSFGILKWTQTELDALDRRVRSLLTANRMHHPRSSVMRLYIPRKCGGRGFLNAKTLHNREVCSLREYFLEADVGMHRDVVAVDKGFTPLSLANENWRKPVVLDTNDRREVWQSKELHGRFYRVLHGPDVDFLASVAWLRFGDLFGETEGFICAITDEVMMTNNYRKYIVKDGTVDICRACHRPGESIRHIISGCSSLANGDYLHRHNLVARIIHQQLALKYNLVESEVPYYRYVPDPVLENGNCTLYWDRSIITDRTIVANKPDIVVIDRLERRAMIVDIAVPHDENLVKAEKDKQSKYLDLAREVVDMWNVNTAVIVPIIVTANGIIAKSLDQHLKRLSLGSWIKGLIQKAVLLDTARIVRRFLSREP

SEQ ID NO: 12523 - protein, 868 aa, Hecatera dysodea
MRFVRRAFSGTDISPSDYLSRVTERIDFLKQKVYAWANRIRRYKRRVERYTQNRTFRSNERWVYKAWERPDQDVTDMHPPDDDAMCSFWRNIWSVPVSHTEGDWIREVERACDPLPEMGAIIISPHDVARAVRPLPNWKSPGPDGLHNFWIKWFKGSHACLASRYQAALESGSLPEFFMTGVTHLLHKSGSTAEPKNYRPITCLPTVYKVLTSILRDKINQHINSNNIMSASQNGCRNGSRGTKELLLIDMVISQQVRRSRKDLSTCWIDYKKAYDSVPHSWLMRVLELYKIDTTLRTFLMSCMGQWRTVLRYPGCRNIQRNSEPVRIERGIFQGDSLSPLWFCLALNPLSTLLENSGLGYRLRRGGQVISHLLYMDDLKLFAPTNLQLMELLKVTETFSNAIRMEFGVDKCAVMHVKRGEIMESVGTQLSDSINLRSLSSTETYKYLGMSEALGINVTDMKQSLRERFFGRLKKVLNSLLSGGNKVRAFNGWVMPVLMYSFGVLKWTQTELDALDRRVRTLLTAYRMHHPRSSVMRLYIPRKCGGRGFLNAKTLHNREICSLREYFLAVDVGMHRDVVAVDKGLTPLSLANENWRKPAVLDTNDRRAVWQSKELHGRFFRALHGPDVDQLASVAWLRFGDLFGETEGFVCAIMDEVIMTRNYRRFIVKDGTVDICRACHRPGESIRHIVSGCSSLANGEYLHRHNLVARIIHQQLALKYSLVESEVPYYRYVPDPVLDNGSITLYWDRSIITDRTIVANKPDIVVVDRIVRRAMIVDITVPHDENLVKAEKDKQIKYLDLAREVVDMWDVDSAIIVPIVVSVNGLIAKSLDQHLRRLTLGGWIKGLIQKAVLLDTARIVRRFLSLEP

SEQ ID NO: 12524 - protein, 1216 aa, Mythimna impura
MYLCRQSGTITYNFVIFHNNNNNTKLHTHPTSSGSSLSSASQPPGPAPTVSPEIPVAAVASSSSDEYFSPPTTPPPARRRGRGRPPASLGPRGPPASDRVPAAGGSVQRMRWTSSINENVMRSYFGATEGGINLTAYRSRMLSLFQVLEPAVNVSVQRLSDQVRVIQRNRMLDDAVLDRLRLESQSSRVSPATTPAAVQRLPTASPRPVQVGDADDDAAISVSTQCNDRLRGALEDAFREYRSTPPGLRPRLPRLPMHKRNRALVCALDSQLSNCFDSSKDLTDTHSILYCAAVAACRVAHVKFPNCDRATRPAVPAWQCRIEHRIGEARALIGKLICFREGNTRPRVMRFVRRAFSGTDISPRDYLPCVTERIDFLKQKIYAWANRIRRYKRRVERYTRNRTFQSNERWVYRDWERSDQGVTDTRLPDDDAMCSFWRSIWSAPVSHTEGDWIREVERACDLLPEMGAITISPQDVARAVRPLPNWKSPGPDGLHNFWVKWFQRSHARLASQFQSALESGSLPQFLTTGITHLLHKSGSTAEPKNYRPITCLPTVYKVLTSILRAKINSHIETNSIMSASQNGCRNGSRGTKELLLIDIAISQQVRRSRKNLSACWIDYKKAYDSVPHTWLMRVLELYKVDATLRTFLMSCMGQWRTVLHYPGCRQIQENNEPIRIERGIFQGDSLSPLWFCLALNPLSTLLEGSGLGYRLKRGGQVISHLLYMDDLKLFAPNNLQLVELLKVTETFSSAIRMEFGVDKCAVIHVKRGEIMESVGIQLSDSIHLRSLCSTETYKYLGMSESLGINTDDVKQSLKERFFGRLNKVLNSLLSGGNKVRAFNGWVMPVLMYSFGILKWTQTELDALDRRVRTLLTANRMHHPRSSVMRLYIPRKCGGRGFLNAKTLHNREVCSLREYFLKTDVGMHRDVVAVDKGLTPLSLANENWRKPIVLDTNDRREVWQSKELHGRFYRALHGPDVDLLASVSWLRFGDLFGETEGFVFAIMDEVMMTNNYRKYIVKDGTVDICRACHRPGESIRHIISGCSHLANGDYLHRHNLVARIIHQQLALKYNLVESEVPYYRYVPDPVLDNGNITLYWDRSIITDRTIVANKPDIVVIDRLERRTMIVDIAVPHDENLVKAEKDKQTKYLDLAREVVDMWEVDNAIIVPIVVTANGLIAKSLEQHLRRLSLGSWIKGLIQKAVLLDTARIVRRFLSQEP

SEQ ID NO: 12525 - protein, 1107 aa, Mythimna impura
MRWTSSINENVMRSYFGATEGGINLTAYRGRMLSLFQVLEPAVNVSVQRLSDQVRVIQRNRMLDDAVLDRLRLESQSSRVSPATTPAAVQRLPTASPRPDQVGDADDDAAISVSTQCNDRLRGALEDAFREYRSTPPGLRPRLPRLPMHKRNRALVCALDSQLSNCFDSSKDLTDTHSILYCAAVAACRVAHVKFPNCDRATQPAVPAWQCRIEHRIGEARALIGKLICFREGNTRPRVMRFVRRAFSGTDISPRDYLPCVTERIDFLKQKIYAWANRIRRYKRRVERYTRNRTFQSNERWVYRDWERSDHGVTDTRLPDDDAMCSFWRSIWSAPVSHTEGDWIREVERACDLLPEMGAITISPQDVARAVRPLPNWKSPGPDGLHNFWVKWFQRSHARLASQFQSALELGSLPQFLTTGITHLLHKSGSTAEPKNYRPITCLPTVYKVLTSILRAKINSHIETNSIMSASQNGCRNGSRGTKELLLIDIAISQQVRRSRKNLSACWIDYKKAYDSVPHTWLMRVLELYKVDATLRTFLMSCMGQWRTVLHYPGCRQIQENNEPIRIERGIFQGDSLSPLWFCLALNPLSTLLEGSGLGYRLKRGGQVISHLLYMDDLKLFAPNNLQLVELLKVTETFSNAIRMEFGVDKCAVIHVKRGEIMESVGIQLSDSIHLRSLCSTETYKYLGMSESLGINTDDVKQSLKERFFGRLNKVLNTLLSGGNKVRAFNGWVMPVLMYSFGILKWTQTELDALDRRVRTLLTANRMHHPRSSVMRLYIPRKCGGRGFLNAKTLHNREVCSLREYFLKTDVGMHRDVVAVDKGLTPLSLANENWRKPIVLDTNDRREVWQSKELHGRFYRALHGPDVDLLASVSWLRFGDLFGETEGFVFAIMDEVMMTNNYRKYIVKDGTVDICRACHRPGESIRHIISGCSHLANGDYLHRHNLVARIIHQQLALKYNLVESEVPYYRYVPDPVLDNGNITLYWDRSIITDRTIVANKPDIVVIDRLERRTMIVDIAVPHDENLVKAEKDKQTKYLDLAREVVDMWEVDRAIIVPIVVTANGLIAKSLEQHLRRLSLGSWIKDLIQKAVLLDTARIVRRFLSQEP

SEQ ID NO: 12526 - protein, 930 aa, Mythimna impura
MYCAAVAACRVAHVKFPNCDVATRPKPAVPAWQCRIERRIGGARALIGKLICFREGNTRPRVMRFVRRAFLGTDISPRDYMSRVTERIDFLKQKVYAWANRIRRYKRRVERYTQNRTFRSNERWVYRAWERPDQGVTDACLPDDDAMSSFWRSIWSVPVSHTEGDWTREVERACDPIPQMGAINISPQDVTRAVRPLPNWKSPGPDGLHNFWIKWFTRSHARLAYQFQSALESGSLPQFLTTGITHLLHKSGSTAEPKNYRPITCLPTVYKVLTSILRSKINSHIDKNLIMSPSQNGCRNGSRGTKELLLIDMTISQQVRRSRKDLSTCWIDYKKAYDSVPHTWLMRVLELYKIDTTLRTFLMSCMRQWSTVLRYPGCRHTQRNSEPVRIERGIFQGDSLSPLWFCLALNPLSTLLENSGLGYRLKRGGQVISHLLYMDDLKLFAPNNLQLMELLKVTETFSSAIRMEFGVEKCAVMHVKRGEVVESVGTQLTDSINLRSLSPTETYKYLGMSEALGINITDMKQSLKERFFGRLKKVLNSLLSGGNKVRAFNGWVMPVLMYSFGVLKWTQTELDALDRRVRTLLTAYRMHHPRSSVMRLYIPRKCGGRGFLNAKTLHNREVCSLREYFLAADVGMHRDVVAVDKGLTPLSLANENWRKPVVLDTNDRREVWQSKELHGRFLRALHGPDVDQLASVAWLRFGDLFGETEGFVCAIMDEVIMTNNYRRFIVKDGTVDICRACHRPGESIRHIISGCSRLANGEYLHRHNLVARIIHQQLALKYSLVESEVPYYRYEPDPVLDNGHITLYWDRSIITDRTIVANKPDIVMVDRSERRAMIVDISVPHDENLVKAEKDKQIKYIDLAREVVDMWDVDSAIIVPIVVSANGLIAKSLDQHLRRLALGGWIKGLIQKVVLLDTARIVRRFLSLEP

SEQ ID NO: 12527 - protein, 1200 aa, Mythimna impura
MLTRSRAQKLHTHPTSSGSSLSSASQPPGPAPTVSPEIPVAAVASSSSDEYFSPPTTPPPARRRGRGRPPASLGPRGPPASDRVPAAGGSVQRMRWTSSINENVMRSYFGATEGGINLTAYRGRMLSLFQVLEPAVNVSVQRLSDQVRVIQRNRMLDDAVLDRLRLESQSSRVSPATTPAAVQRLPTASPRPVQVGDADDDAAISVSTQCNDRLRGALEDAFREYRSTPPGLRPRLPRLPMHKRNRALVCALDSQLSNCFDSSKDLTDTHSILYCAAVAACRVAHVKFPNCDRATRPAVPAWQCRIEHRIGEARALIGKLICFREGNTRPRVMRFVRRAFSGTDISPRDYLPCVTERIDFLKQKIYAWANRIRRYKRRVERYTRNRTFQSNERWVYRDWERSDQGVTDTRLPDDDAMCSFWRSIWSAPVSHTEGDWIREVERACDLLPEMGAITISPQDVARAVRPLPNWKSPGPDRLHNFWVKWFQRSHARLASQFQSALESGSLPQFLTTGITHLLHKSGSTAEPKNYRPITCLPTVYKVLTSILRAKINSHIETNSIMSASQNGCRNGSRGTKELLLIDIAISQQVRRSRKNLSACWIDYKKAYDSVPHTWLMRVLELYKVDATLRTFLMSCMGQWRTVLHYPGCRQIQENNEPIRIERGIFQGDSLSPLWFCLALNPLSTLLEGSGLGYRLKRGGQVISHLLYMDDLKLFAPNNLQLVELLKVTETFSSAIRMEFGVDKCAIIHVKRGEIMESVGIQLSDSIHLRSLCSTETYKYLGMSESLGINTDDVKQSLKERFFGRLNKVLNSLLSGGNKVRAFNGWVMPVLMYSFGILKWTQTELDALDRRVRTLLTANRMHHPRSSVMRLYIPRKCGGRGFLNAKTLHNREVCSLREYFLKTDVGMHRDVVAVDKGLTPLSLANENWRKPIVLDTNDRREVWQSKELHGRFYRALHGPDVDLLASVSWLRFGDLFGETEGFVFAIMDEVMMTNNYRKYIVKDGTVDICRACHRPGESIRHIISGCSHLANGDYLHRHNLVARIIHQQLALKYNLVESEVPYYRYVPDPVLDNGNITLYWDRSIITDRTIVANKPDIVVIDRLERRTMIVDIAVPHDENLVKAEKDKQTKYLDLAREVVDMWEVDRAIIVPIVVTANGLIAKSLEQHLRRLSLGSWLKGLIQKAVLLDTARIVRRFLSQEP

SEQ ID NO: 12528 - protein, 1200 aa, Mythimna impura
MLTRAAARRARLPPPASSLSSASPPPESSPTVSAVTPAVAVASSSSDEYFSPPTSPPPARRRRGRRPPSGLGPRGPPASDRVPAPGGSVQRMRWTQSINENVMRAYYGATEGGNNLTAYRVRMLSLFQVLEPAVNVSAQRLSDQVRVIQRNHMLDDTVLDRLRTEMSNHAIAPSSQPVVPVMVPPSYHLSDHADEEITDMVTHVSTQCNNELRSALECAIREYRNMPLELRPRLPRLPMHNKNKALVAALDLQLSNYFDDCEDLTDTHSIMYCAAVAACRVAHVKFPSCDVSTRPKPAVPAWQCRIERRIGGARALIGKLICFREGNTRPRVMRFVRRAFSGTDISPRDYMSRVTERIDFLKQKVYAWANRIRRYKRRVERYTQNRTFRSNERWVYRAWERPDQGVTDTRLPDDDAMSSFWRSIWSVPVSHTEGDWTREVERACDPIPQMGAIDISPQDVARAVRPLPNWKSPGPDGLHNFWIKWFTRSHARLAYQFHSALESGSLPQFLTTGITHLLHKSGSTAEPKNYRPITCLPTVYKVLTSILRSKINSHIDKNLIMSPSQNGCRNGSHGTKELLLIDMTISQQVRRFRKDLSTCWIDYKKAYDSVPHTWLMRVLELYKIDTTLRTFLMSCMRQWSTVLHYPGCRHIQRNSEPVRIERGIFQGDSLSPLWFCLALNPLSTLLENSGLGYRLKRGGQVISHLLYMDDLKLFAPNNLQLMELLKVTETFSSAIRMEFGVDKCAVMHVKRGEVVESVGTQLTDSINLRSLSPTETYKYLGMSEALGINITDMKQSLKERFFGRLKKVFNSLLSGGNKVRAFNGWVMPVLMYSFGVLKWTQTELDALDRRVRTLLTAYRMHHPRSSVMRLYIPRKCGGRGFLNAKTLHNREVCSLREYFLATDVGMHRDVVAVDKGLTPLSLANENWRKPVVLDTNDRKEVWQSKELHGRFFRAFHGPDVDQLASVAWLRFGDLFGETEGFVCAIMDEVIMTNNYRRFIVKDGTVDICRACHRPGESIRHIISGCSRLANGEYLHRHNLVARIIHQQLALKYSLVESEVPYYRYEPDPVLDNGHITLYWDRSIITDRTIVANKPDIVVVDRSERRAMIVDISVPHDENLVKAEKDKQIKYIDLAREVVDMWDVDSAIIVPIVVSANGLIAKSLDQHLRRLALGGWIKALIQKAVLLDTARIVRRFLSLEP

SEQ ID NO: 12529 - protein, 1198 aa, Mythimna impura
MLTRSRAQKLHTHPTSSGSSLSSASQPPGPAPTVSPEIPVAAVASSSSDEYFSPPTTPPPARRRGRGRPPASLGPRGPPASDRVPAAGGSVQRMRWTSSINENVMRSYFGATEGGINLTAYRGRMLSLFQVLEPAVNVSVQRLSDQVRVIQRNRMLDDAVLDRLRLESQSSRVSPATTPAAVQRLPTASPRPVQVGDADDDAAISVSTQCNDRLRGALEDAFREYRSTPLRPRLPRLPMHKRNRALVCALDSQLSNCFDSSKDLTDTHSILYCAAVAACRVAHVKFPNCDRATRPAVPAWQCRIEHRIGEARALIGKLICFREGNTRPRVMRFVRRAFSGTDISPRDYLPCVTERIDFLKQKIYAWANRIRRYKRRVERYTRNRTFQSNERWVYRDWERSDQGVTDTRLPDDDAMCSFWRSIWSAPVSHTEGDWIREVERACDLLPEMGAITISPQDVARAVRPLPNWKSPGPDGLHNFWVKWFQRSHARLASQFQSALESGSLPQFLTTGITHLLHKSGSTAEPKNYRPITCLPTVYKVLTSILRAKINSHIETNSIMSASQNGCRNGSRGTKELLLIDIAISQQVRRSRKNLSTCWIDYKKAYDSVPHTWLMRVLELYKVDATLRTFLMSCMGQWRTVLHYPGCRQIQENNEPIRIERGIFQGDSLSPLWFCLALNPLSTLLEGSGLGYRLKRGGQVISHLLYMDDLKLFAPNNLQLVELLKVTETFSSAIRMEFGVDKCAVIHVKRGEIMESVGIQLSDSIHLRSLCSTETYKYLGMSESLGINTDGVKQSLKERFFGRLNKVLNSLLSGGNKVRAFNGWVMPVLMYSFGILKWTQTELDALDRRVRTLLTANRMHHPRSSVMRLYIPRKCGGRGFLNAKTLHNREVCSLREYFLKTDVGMHRDVVAVDKGLTPLSLANENWRKPIVLDTNDRREVWQSKELHGRFYRALHGPDVDLLASVSWLRFGDLFGETEGFVFAIMDEVMMTNNYRKYIVKDGTVDICRACHRPGESIRHIISGCSHLANGDYLHRHNLVARIIHQQLALKYNLVESEVPYYRYVPDPVLDNGNITLYWDRSIITDRTIVANKPDIVVIDRLERRTMIVDIAVPHDENLVKAEKDKQTKYLDLAREVVDMWEVDRAIIVPIVVTANGLIAKSLEQHLRRLSLGSWIKGLIQKAVLLDTARIVRRFLSQEP

SEQ ID NO: 12530 - protein, 1200 aa, Mythimna impura
MLTRSRAREQETHPTSSGSSLSSASQPPGPAPAVSPVIPAAAVASSSSDEYFSPPTTPPPARRRGRGRPPASLRPRGPPASDRVPAAGGSVQRMRWTQSINENVMRSYFGATEGGSNLTAYRGRMLSLFQVLEPTVNVSAQRLSDQVRVIQRNRMLDDAVLDRLRLESQRSRASSATPPAAVQLQPSALPRPDHVGDADDDAAISVSTQCNERLRSALEDAFREYRSTPPGLRPRLPRLPMHKRNRALVCALDSQLSNCFDSSKDLADTHSILYCAAAAACRVAHVKFPNCDRATRPAVPAWQRRIERRIGEARALIGKLICFREGNTRPRVMRFVRRAFLGTDISPQNYLPCVTERIDFLKQKVYAWASRIRRYKRRVERYTQNRTFQSNERWVYRTWERPDQDVTDTRLPDDDAMCSFWRRIWSVPVSHIEGDWIREVERTCDLLPEMGAITISPQDVARAVRPLPNWKSPGPDGLHNFWIKWFQGSHARLASQFQSALESGSLPEFLTTGITHLLHKSGSTADPKNYRPITCLPTVYKVLTSILRAKINTHIETNSIMSASQNGCRNGSRGTKELLLIDMAISQQVRRSRKDLSTCWIDYKKAYDSVPHTWLMRVLELYKVDTTLRTFLMSCMRQWRTVLHYPGCRQIRENSEPIRIERGIFQGDSLSPLWFCLALNPLSTLLEGSGLGYRLKRGGQVISHLLYMDDLKLFAPNNLHLMELLKVTETFSNAIRMEFGVDKCAVMHVKRGEIMESVGTQLSDSIYLRSLCSTETYKYLGMSEALGINAADVKQSLKERFFGRLNRVLKSLLSGGNKVRAFNGWVMPVLMYSFGILKWTQTELDALDRRVRTLLTANRMHHPRSSVMRLYIPRKCGGRGFLNAKTLHNREVCSLREYFLETDVGMHRDVVAVDKGLTPLSLANGNWRKPIILDTNDRREVWQSKELHGRFYRALHGPDVDLLASVSWLRFGDLFGETEGFVCAIMDEVVMTNNYRKYIVKDGTADICRACHRPGESIRHIISGCSHLANGDYLHRHNLVAKIIHQQLALKYNLVESEVPYYKYVPDPVLDNGSITLYWDRSIITDRTIVANKPDIVVIDRLERRTVIVDIAVPHDDNLVKAEKDKQTKYLDLAREVVDMWEVDTAVIVPIVVTANGLISKSLDQHLRRLSLGSWIKGLIQKAVLLDTARIVRRFLSQEP

SEQ ID NO: 12531 - protein, 1200 aa, Mythimna impura
MLTRAAARRARLPPPASSLSSASPPPEPSPTVSAVTPAVAVASSSSDEYFSPPTSPPPARRWRGRRPPSGLGPRGPPASDRVPAPGGSVQRMRWTQSINENVMRAYYGATEGGNNLTAYRVRMLSLFQVLEPAVNVSAQRLSDQVRVIQRNHMLDDTVLDRLRTEMSNHAIAPSSQSVVPVMVPPSYHLSGHVDEEITDMVTHVSTQCNNELRSALECAIREYRNMPLELRPRLPRLPMHNKNKALVAALDLQLSNYFDDCKDLTDTHSIMYCAAVAACRLAHVKFPNCDVATRPKPAVPAWQCRIERRIGGARALIGKLICFREGNTRPRVMRFVRRAFSGTDISPRDYMSRVTERIDFLKQKVYAWANRIRRYKRRVDRYTQNRTFRSNERWVYRAWERPDQGVTDACLPDDDAMSSFWRSIWSVPVSHTEGDWTREVERACDPIPQMGAIDISPQDVARAVRPLPNWKSPGPDGLHNFWIKWFTRSHARLAYQFQSALESGSLPQFLTTGITHLLHKSGSTAEPKNYRPITCLPTVYKVLTSILRSKINSHIDKNLIMSPSQNGCRNGSRGTKELLLIDMTISQQVRRSRKDLSTCWIDYKKAYDSVPHTWLMRVLELYKIDTKLRTFLMSCMRQWSTVLRYPGCRHTQRNSEPVRIERGIFQGDSLSPLWFCLALNPLSTLLENSGLGYRLKRGGQVISHLLYMDDLKLFAPNNLQLMELLKVTETFSSAIRMKFGVDKCAVMHVKRGEVVESVGTQLTDFINLRSLSPTETYKYLGMSEALGINITDMKQSLKERFFGRLKKVFNSLLSGGNKVRAFNGWVMPVLMYSFGVLKWTQTELEALDRKVRTLLTAYRMHHPRSSVMRLYIPRKCGGRGFLNAKTLHNREVCSLREYFLAADVGMHRDVVTVDKGLTPLSLANENWRKPVVLDTNDRREVWQSKELHGRFFRALHGPDVDQLASVAWLRSGDLFGETEGFVCAIMDEVIMTNNYRRFIVKDGTVDICRACHRPGESIRHIISGCSRLANGEYLHRHNLVARIIHQQLALKYSLVESEVPYYRYEPDPVLDNGHITLYWDRSIITDRTIVANKPDIVVVDRSERRAMIVDISVPHDENLVKAEKDKQIKYIDLAREVVDMWDVDSAIIVPIVVSGNGLIAKSLDQHLRRLALGDWIKGLIQKAVLLDTARIVRRFLSLEP

SEQ ID NO: 12532 - protein, 1200 aa, Mythimna impura
MLTRAAARRARHPPPGSPLSSASPPPDLGSPVSPVAAVASSSSDEYFSPPTSPTPVRRPGRGRPPKSLGPGGQPAPSRVPAAGGCVQRMRWTQSMNENVMRAYYGSTEGGTSLTAYRDRMLSLFQDLEPTVNVSAQRLSDQVRFIQRNHRLDDAALDRLRSEVLSNQIVSTSIQTQTAATPTTNAISPRSILNNDDADERVVTVSSQCNDELRSALEDALREYRLTPTELRPRLPRLPMHKKNRALVCTLDSLLKNIFESSENLVDTHSILYCGAVAACRLANIKFPNTDGTIRPKPAVPAWQYRIERRIDGARVLIGKLHSFREGNTRPRVMRFVRRAFLGTSISPQEYMSRVTERIDFLKQKVCAWASRIRRYKRRVDRYSQNRIFQSDERWVYRAWERPEQNVIDGLRPDDFATITFWRNIWSVPVSHTEGGWIREVERVCEAIPEMEKITISPADVAKAVRPLPNWKSPGPDGLQNFWLKWYRNSHAPLASQFQSTLESGSLPEYLTTGVTHLLHKTGNPAEPKNYRPITCLSTVYKLLTSILREKINRHIENNSIMSASQNGCRNGSRGTKELLLIDMAVSQQARRSRKDLSTCWIDYKKAYDSVPHTWLMRVLELYKIDTTLRTFLESCMRQWKTVLRYPGCRPIQGDDEPIRIKRGIFQGDSLSPLWFCLALNPLSTLLEDSGLGYRLRRGGQAISHLLYMDDLKLFAPSNLQLMELLKVTETFSSAIRMEFGVDKCAAMHVKQGEIMESEGIQLPDSIHLKSLSSTETYRYLGMSEALGINNADMKQSLKERFFGRLKKVLNSLLSGGNKVRAFNGWVMPVLMYSFGILKWTQTELDALDRRVRTLLTANRMHHPRSSVMRLYISRKCGGRGFLNAKTLHNREVCSLREYFLKTDVGMHRDVVAVDKGLTPLSMAKEDWRKPVVLTTDDRKEVWKGKELHGRFYRALHEPDVDFLASVAWLRFSDLFGETEGFVCAIMDEVILTNNYRKYIMKDGTVDVCRACHRPGESIRHIISGCSRLANGEYLHRHNQVARIIHQQLALKYNLVDSEVPYYKYVPDPVLENDHVTLYWDRSIITDRTIVANKPDIVVIDRLARRAIIVDVTIPHDENLVKAEKEKQIKYLDLAHEVVGMWNMDSAVIVPIVVTANGLIAKSFDDHLSKLSLRGWIKGLIQKAVLLDTARIVRRFLFLEP

SEQ ID NO: 12533 - protein, 1048 aa, Mythimna impura
MLDDTVLDRLRTEMSNHAIAPSSQSVVPVMVPPSYHLSGHVDEEITDMVTHVSTQCNNELRSALECAIREYRNMPLELRPRLPRLPMHNKNKALVAALDLQLSNYFDDCKDLTDTHSIMYCAAVAACRLAHVKFPNCDVATRPKPAVPAWQCRIERRIGGARALIGKLICFREGNTRPRVMRFVRRAFSGTDISPRDYMSRVTERIDFLKQKVYAWANRIRRYKRRVDRYTQNRTFRSNERWVYRAWERPDQGVTDACLPDDDAMSSFWRSIWSVPVSHTEGDWTREVERACDPIPQMGAIDISPQDVARAVRPLPNWKSPGPDGLHNFWIKWFTRSHARLAYQFQSALESGSLPQFLTTGITHLLHKSGSTAEPKNYRPITCLPTVYKVLTSILRSKINSHIDKNLIMSPSQNGCRNGSRGTKELLLIDMTISQQVRRSRKDLSTCWIDYKKAYDSVPHTWLMRVLELYKIDTTLRTFLMSCMRQWSTVLRYPGCRHTQRNSEPVRIERGIFQGDSLSPLWFCLALNPLSTLLENSGLGYRLKRGGQVISHLLYMDDLKLFAPNNLQLMELLKVTETFSSAIRMEFGVDKCAVMHVKRGEVVESVGTQLTDFINLRSLSPTETYKYLGMSEALGINITDMKQSLKERFFGRLKKVFNSLLSGGNKVRAFNGWVMPVLMYSFGVLKWTQTELDALDRKVRTLLTAYRMHHPRSSVMRLYIPRKCGGRGFLNAKTLHNREVCSLREYFLAADVGMHRDVVTVDKGLTPLSLANENWRKPVVLHTNDRREVWQSKELHGRFFRALHGPDVDQLASVAWLRSGDLFGETEGFVCAIMDEVIMTNNYRRFIVKDGTVDICRACHRPGESIRHIISGSSRLANGEYLHRHNLVARIIHQQLALKYSLVESEVPYYRYEPDPVLDNGHITLYWDRSIITDRTIVANKPDIVVVDRSERRAMIVDISVPHDENLVKAEKDKQIKYIDLAREVVDMWDVDSAIIVPIVVSGNGLIAKSLDQHLRRLALGDWIKGLIQKAVLLDTARIVRRFLSLEP

SEQ ID NO: 12534 - protein, 1200 aa, Mythimna impura
MLTRAAARRARPPPPASSLSSASPPPEPCLTVSAVTPAVAAASSSSDEYYSPPTTPPPTRRRGERRPPACLGSRGPPASDRVPATGGCVSRMRWTQSINEKVMRAYYGATEGGNNLTAYRVRMLSLFQVLEPAVNVSAQRLSDQVRVIQRNHMLDDTVLDRLRTEMGSHAIASSSQTVVPSQVSPPNNLSNHADEESTDMVTHVSTQCSNELRSALECAIRKYRNMPLELRPRLPRLPMCNKNKALVAALDSQLSNYFDDCEDLTDTHSIMYCAAVAACRVAHVKFPNSDVATRPKPAVPAWQCRIERHIGGARALIGKLICFREGNTRPGVMRFVRRAFSGTDISPRDYMSCVTERIDFLKQKVYAWANRIRRYKRRVERYTQNRTFRSNERWVYRAWEQPDQGGADTRLPDDDAMSSFWRNIWSVPVSHTGGGWTREVERACEPIPEMGAITISPQDVARAVRPLPNWKSPGPDGLHNFWIKWLQRSHAHLASQYQTALESGSLPEFLTTGVTHLLHKSGSTAKPKNYRPITCLPTVYKVLTSILRAKINHHVDNNAIMSASQNGCRNGSHGTKELLLIDMAISQQVRRSRKDLSTCWIDYKKAYDSVPHTWLMRVLELYKVDTTLRTFLMSCMRQWRTVLHYPRCRQIRENSEPIRIERGIFQGDSLSPLWFCLALNPLSTLLEGSGLGYRLKRGGQVISHLLYMDDLKLFAPNNLHLMELLKVTETFSNAIRMEFGVDKCAVMHVKRGEIMESVGTQLSDSIYLRSLCSTETYKYLGMSEALGINAADVKQSLRERFFGRLNRVLKSLLSGRNKVRAFNGWVMPVLMYSFGIIKWTQTELDALDRRVCTLLTTNRMHHPRSSVMRLYIPRKCGGRGFLNAKTLHNREVCSLREYFLETDVGMHRDVVAVDKGLTPLSLANGNWRKPIILDTNDRREVWQSKELHGRFYRALHGPDVDLLASVSWLRFGDLFGETEGFVCAIMDEVVMTNNYRKYIVKDGTADICRACHRPGESIRHIISGCSHLANGDYLHRHNLVAKIIHQQLALKYNLVESEVPYYKYVPDPVLDNGSITLYWDRSIITDRTIVANKPDIVVIDRLERRTVIVDIAVPHDDNLVKAEKDKQTKYLDLAREVVDMWEVDTAVIVPIVVTANGLISKSLDQHLRRLSLGSWIKGLIQKAVLLDTARIVRRFLSQEP

SEQ ID NO: 12535 - protein, 1048 aa, Mythimna impura
MLDDTVLDRLRTEMSNHAIAPSSQSVVPVMVPPSYHLSDHADEAITDMVTHVSTQCNNELRSALECAIREYRNMPLELRPRLPRLPMHNKNKALVAALDLQLSNYFDDCKDLTDTHSIMYCAAVAACRVAHVKFPNCDVATRPKPAVPAWQCRIERRIGGARALIGKLICFREGNTRPRVMRFVRRAFSGTDISPRDYMSRVTERIDFLKQKVYAWANRIRRYKRRVERYTQNRTFRSNERWVYRAWERPDQGVTDACLPDDDAMSSFWRSIWSVPVSHTEGDWTREVERACDPIPQMGAIDISPQDVARAVRPLPNWKSPGPDGLHNFWIKWFTRSHARLAYQFQSALESGSLPQFLTTGITHLLHKSGSTAEPKNYRPITCLPTVYKVLTSILRSKINSHIDKNLIMSPSQNGCRNGSRGTKELLLIDMAISQQVRRSRKDLSTCWIDYKKAYDSVPHTWLMRVLELYKIDTTLRTFLMSCMRQWSTVLRYPGCRHTQRNSEPVRIERGIFQGDSLSPLWFCLALNPLSTLLENSGLGYRLKRGGQVISHLLYMDDLKLFAPNNLQLMELLKVTETFSSAIRMEFGVDKCAVMHVKRGEVVESVGTQLTDSINLRSLSPTETYKYLGMSEALGINITDMKQSLKERFFGRLKKVLNSLLSGGNKVRAFNGWVMPVLMYSFGVLKWTQTELDALDRRVRTLLTAYRMHHPRSSVMRLYIPRKCGGRGFLNAKTLHNREVCSLREYFLAADVGMHRDVVAVDKGLTPLSLANENWRKPVVLDTNDRREVWQSKELHGRFFRALHGPDVDQLASVAWLRFGDLFGETEGFVCAIMDEVIMTNNYRRFIVKDGTVDICRACHRPGESIRHIISGCSRLANGEYLHRHNLVARIIHQQLALKYSLVESEVPYYRYEPDPVLDNGHITLYWDRSIITDRTIVANKPDIVMVDRSERRAMIVDISVPHDENLVKAEKDKQIKYIDLAREVVDMWDVDSAIIVPIVVSANGLIAKSLDQHLRRLALGGWIKGLIQKVVLLDTARIVRRFLSLEP

SEQ ID NO: 12536 - protein, 1107 aa, Mythimna impura
MRWTSSINENVMRSYFGATEGGINLTAYRSRMLSLFQVLEPAVNVSVQRLSDQVRVIQRNRMLDDAVLDRLRLESQSSRVSPATTPAAVQRLPTASPRPVQVGDADDDAAISVSTQCNDRLRGALEDAFREYRSTPPGLRPRLPRLPMHKRNRALVCALDSQLSNCFDSSKDLTDTHSILYCAAVAACRVAHVKFPNCDRATRPAVPAWQCRIEHRIGEARALIGKLICFREGNTRPRVMRFVRRAFSGTDISPRDYLPCVTERIDFLKQKIYAWANRIRRYKRRVERYTRNRTFQSNERWVYRDWERSDQGVTDTRLPDDDAMCSFWRSIWSAPVSHTEGDWIREVERACDLLPEMGAIIISPQDVARAVRPLPNWKSPGPDGLHNFWVKWFQRSHARLASQFQSALESGSLPQFLTTGITHLLHKSGSTAEPKNYRPITCLPTVYKVLTSILRAKINSHIETNSIMSASQNGCRNGSRGTKELLLIDIAISQQVRRSRKNLSACWIDYKKAYDSVPHTWLMRVLELYKVDATLRTFLMSCMEQWRTVLHYPGCRQIQENNEPIRIERGIFQGDSLSPLWFCLALNPLSTLLEGSGLGYRLKRGGQVISHLLYMDDLKLFAPNNLQLVELLKVTETFSSAIRMEFGVDKCAVIHVKRGEIMESVGIQLSDSIHLRSLCSTETYKYLGMSESLGINTDDVKQSLKERFFGRLNKVLNSLLSGGNKVRAFNGWVMPVLMYSFGILKWTQTELDALDRRVRTLLTANRMHHPRSSLMRLYIPRKCGGRGFLNAKTLHNREVCSLREYFLKTDVGMHRDVVAVDKGLTPLSLANENWRKPIVLDTNDRREVWQSKELHGRFYRALHGPDVDLLASVSWLRFGDLFGETEGFVFAIMDEVMMTNNYRKYIVKDGTVDICRACHRPGESIRHIISGCSHLANGDYLHRHNLVARIIHQQLALKYNLVESEVPYYRYVPDPVLDNGNITLYWDRSIITDRTIVANNPDIVVIDRLERRTMIVDIAVRHDENLVKAEKDKQTKYLDLAREVVDMWEVDKAIIVPIVVTANGLIAKSFEQHLRRLSLGSWIKGLIQKAVLLDTARIVRRFLSQEP

SEQ ID NO: 12537 - protein, 1200 aa, Phlogophora meticulosa
MLTRSAARRARPPPLASSLSSASPPPESSPIVSTVTPAVAIASSSSDEYFSPPTSPPPARRRRGRRPPDSIGPRGPPASDRVPASGGSVQRMRWTQSINENVMRSYYGATEGGTNLTAYRGRMLSLFQMLEPAVNVSAQRLSDQVRVIQRNHMLDDVVLDRLRLNSRIYHVTPALPPVAVQLQSLPSVSPRPDYVGEEDDDAAISVSSQCNVRLRSALEDAFREYRSTPPELRSRLPRLPMHKKNKALMSALDSLLTKSFDNSKDLTDTHSILYCAAAAACRVANVKFPNTERATRPTVPAWQCRIQRRIDEARALIGKLICFREGNTRPRVMRFVRRAFSGTDISSRDYLTRVTERIDFLKQKICAWANRIRRYKRRVERYTQNRTFRSDERWVYRAWERPDQGVTDTCLPDDEAMCSFWRSIWSVPVSHTEGNWTREIERACEPLPEMGAINISPQDVASAVRPLPNWKSPGPDGLHNFWIKWLQSSHARLACQFQSALESGSLPQFLTTGITHLLHKSGSTAEPRNYRPITCLPTVYKVLTSILRSKINNHIDSNLIMSFSQNGCRNGSRGTKELLLIDTAISQQVRRSRKDLSTCWVDYKKAYDSVPHTWLMRVLELYKVDATLRTFLMSCMGQWRTVLRYPGCQQTRENSEPIRIERGIFQGDSLSPLWFCLALNPLSTLLEGSGLGYRLRTGGQVISHLLYMDDLKLFAPNNLQLMELLKVTETFSSAIRMDFGVDKCAVMHVKRGEIVESVGTQLSDSIYLRSLSSTETYKYLGMSEALGINATDMKQSLKERFFGRLNKVLNSLLSGGNKVRAFNGWVMPVLMYSFGILKWTQTELDALDRRVRTLLTANRMHHPRSSVMRLYIPRKYGGRGFLNAKTLHNREICSLREYFLKADVGMHRDVVAVDKTFTPLSLANKNWRKLIVLDTADRMEIWKSKELHGRFYRVLHGPDVDLVASISWLRFGDLFGETEGFVCAIMDEVIMTNNYRKYIVKDGTVDICRACHRPGESIRHIISGCSRLANGDYLHRHNLVARIIHQQLALKYNLVDLEVPYYKYVPDPVLENGSITLYWDRSIITDRTIVANKPDIVVIDRSERRTMIIDITVPHDENLVKAEKEKQMKYLDLAREVVDMWDVNTAVIVPIVVTANGIIAKSLDQHLKRLSLGSWIKGLIQKAVLLDTARIVRRFHSQEP

SEQ ID NO: 12538 - protein, 1203 aa, Phlogophora meticulosa
MLTRSRARVLNAPTTSSGSSLSSASQLPGPAPDVRPVTPAAAVASSSSDEYYSPPTSPPPVRRCGRGRPPASLGLRGPPASARVPASGGSVQRMRWTQSINENVMRSYYGATEGGINLTAYRGRMLSLFQVLEPAVNVSAQRLSDQVRVIQRNHNNMLDDAVLDRLRLNSRSNRVTPASPPVAVQLQNLPSVSPRPDYVGEEDDAAISVSSQCNVRLRSALEDAFREYRSTPPGLRQRLPRLPMHKKNKALMCTLDSLLSNSFDSSRDLADTHSILYCAAVAACRVANVKFPNSVRSTRPAIPAWQCRIERRIGEARVLTGKLICFRDGNTRPRVMRFVRRAFSGTDISSRDYLTRVTERIDFLKQKICAWANRIRRYKRRVERYTQNRTFRSDERWVYRTWERPDQGVTDTFLPDDEAMCLFWRSIWSVPVSHTEGDWTREVERTCEPLPEMGAINISPQDVACAVRPLPNWKSPGPDGLHNFWIKWLKSSHARLASQFQSALESGSLPQFLTTGITHLLHKSGSTSEPKNYRPITCLPTVYKVLTSILRSKINNHIDSTSIMSVSQNGCKNGSRGTKELLLIDMAISQQVRRSRKDLSTCWIDYKKAYDSVPHTWLMRVLELYKIDATLRTFLKSCMGQWRTVLHYPGCRQFQENSEPIRIERGIFQGDSLSPLWFCLALNPLSTLLEGSGLGYRLRRGGQVISHLLYMDDLKLFAHNNLQLMKLLKVTETFSSAIRMDFGVDKCAVMHVKRGGIVESAGTQLSDSIYLRSLSSTETYKYLGMSEAFGINTADMKQSLKERFFGRLNKVLNSLLSGGNKVRAFNSWVMPVLMYSFGILKWTQTELHALDRRVRTLLTANRMHHPRSSVMRLYISRKCGGRGFLNAKTLHNREVCSLREYFLEADVGMHRDVVAMDKALTPLSLANENWRKPIVLDTTDRMEIWKSKELHGRFYRVLHGPDVDLSASVSWLRFGDLFGETEGFVCAIMDEVIMTNNYRKYIVKDGTVDICRACHRPGESIRHIISGCSRLANGDYLHRHNLVAKIIHQQLALKYNLVESEVPYYKYVPDPVLENGNITLYWDRSIITDRTIVANKPDIVVIDRSDRRTMIVDITVPHDENLVKAEKEKQIKYLDLAREVVDMWDVNTAVIVPIVVTANGIIAKSLDQHLRRLSLGSWIKGLIQKAVLLDTARIVRRFLSQEP

SEQ ID NO: 12539 - protein, 1107 aa, Phlogophora meticulosa
MRWTQSINENVMRSYYGATEGGSNLTAYRVRMLSLFQVLEPAVNVSAQRLSDQVRVIQRNHMLDDVVLDRLRTEMQSSRVITSPSHTVVPPQYNIVLSSFADGEGSDKVTNVSTQYNEELRSALEGAIREYRFMLPALRPRLPRLPMHNKNRALVAALDSQLSNYFDNCDDLTDAHSILYCAAVAACRVAHVKFPYDIATRPKPAVPAWQCRIERRIAGARALIGKLVCYREGNTRPRVMRYVRRAFLGTDISPRDYMSRVTERIDFLKQKVYAWASRIRRYKRRVERYTQNRTFQSNERWVYRAWERPVQGVTDTHLPDDDVMCSFWRNIWSVPVSHTEGDWTREVERACDPIPQMGAITISPQDVARAVRPLPNWKSPGPDGLHNFWIKWLQKSHARLASQFQSALETGSLPQFLTTGITHLLHKSGSTAEPKNYRPITCLPTVYKVLTSILRVKINNHIDSNSIMSASQNGCRNGSRGTKELLLIDTAISQQVRRSRKDLSTCWIDYKKAYDSVPHTWLKRVLELYKVDATLRTFLTSCMGQWRTVLRYPGCRQIQRNSEPIRIERGIFQGDSLSPLWFCLALNPLSTLLEDSGLGYRLKRGGQVVSHLLYMDDLKLFAPSDLQLMELLTVTKTFSSAIRMEFGVDKCAVMHVKRGKIVESVGTQLPDFINFRALSPIETYKYLGMSEALGINAADMKQSLKERFFGRLKKVCNSLLSGGNKVRAFNGWVMPVLMYSFGILKWTQTELDALDRRVRTFLTASRMHHPRSSVMRLYIPRKCGGRGFLNAKTLHNREICSLRDYFLETDVGMHRDVVAVDQGLTPLSLAKENWRKPVVLDTNDRKEVWQSKELHGRFFQALHGPDVDQLASVSWLRFGDLFGETEGFVCAIMDEVIMTNNYRRFIVKDGTVDICRACHRPGESIRHIISGCSRLANEEYLHRHNLVARIIHQQLALKYSLVESEVPYYKYVPDPVLENGSVTLYWDRSIITDRTIVANKPDIVVMDRIERRATIIDVTVPHDGNLVKAEKDKQIKYLDLAREVVDMWDVDSAIVVPIVVSANGLIAKSLDQHLRRLALGSWIKGLIQKAVLLDTARIVRRFLSLEP

SEQ ID NO: 12540 - protein, 1198 aa, Phlogophora meticulosa
MLTRSAARRARPPPPASSLSSASSPPKPSTIVSTVKPAVPVASSSSDEYFSPPTSPPPARRRRGRRPPDGLGPRGPPASDRVPAPGGSVQRMRWTQSINENVMRSYYGATEGGSNLTAYRVRMLSLFQVLEPAVNVSAQRLSDQVRVIQRNHMLDDVVLDRLRTEMQSSRVITSPSHTVVPPQYNIVLSSFADGEGTDKVTNVSTQYNEELRSALEGAIREYRFMLPALRPRLPRLPMHNKNRALVAALDSQLSNYFDNCDDLTDAHSILYCAAVAACRVAHVKFPNDIATRPKPAVPAWQCRIERRIAGARALIGKLVCYREGNTRPRVMRYVRRAFLGTDISPRDYMSRVTERIDFLKQKVYAWASRIRRYKRRVERYTQNRTFQSNERWVYRAWERPVQGVTDTHLPDDDVMCSFWRNIWSMPVSHTEGDWTREVERACDPIPQMGAITISPEDVARAVRPLPNWKSPGPDGLHNFWIKWLQKSHARLASQFQSALETGSLPQFLTTGITHLLHKSGSTAEPKNYRPITCLPTVYKVLTSILRVKINNHIDSNSIMSASQNGCRNGSRGTKELLLIDTAISQQVRRSRKDLSTCWIDYKKAYDSVPHTWLKRVLELYKVDATLRTFLTSCMGQWRTVLRYPGCRQIQRNSEPIRIERGIFQGDSLSPLWFCLALNPLSTLLEDSGLGYRLKRGGQVVSHFLYMDDLKLFAPSDLQLMELLKVTKTFSSAIRMEFGVDKCAVMHVKRGKIVESVGTQLPDFINFRALSPIETYKYLGMSQALGINAADMKQSLKERFFGRLKKVCNSLLSGGNKVRAFNGWVMPVLMYSFGILKWTQTELDALDRRVRTFLTASRMHHPRSSVMRLYIPRKCGGRGFLNAKTLHNREICSLRDYFLETDVGMHRDVVAVDQGLTPLSLAKENWRKPVVLDTNDRKEVWQSKELHGRFFQALHGPDVDQLASVSWLRFGDLFGETEGFVCAIMDEVIMTNNYRRFIVKDGTVDICRACHRPGESIRHIISGCSRLANEEYLHRHNLVARIIHQQLALKYSLVESEVPYYKYVPDPVLENGSVTLYWDRSIITDRTIVANKPDIVVMDRIERRATIIDVTVPHDGNLVKAEKDKQIKYLDLAREVVDMWDVDSAIVVPIVVSANGLIAKSLDQHLRRLALGSWIKGLIQKAVLLDTARIVRRFLSLEP

SEQ ID NO: 12541 - protein, 1198 aa, Phlogophora meticulosa
MLTRSAARRARPPPPASSLSSASSPPKPSTIVSTVKPAVPVASSSSDEYFSPPTSPPPARRRRGRRPPDGLGPRGPPASDRVPAPGGSVQRMRWTQSINENVMSSYYGATEGGSNLTAYRVRMLSLFQVLEPAVNVSAQRLSDQVRVIQRNHMLDDVVLDRLRTEMQSSRVITSPSHTVVPPQYNIVLSSFADGEGSDKVTNVSTQYNEELRSALEGAIREYRFMLPAIRPRLPRLPMHNKNRALMAALDSQLSNYFDNCDDLTDAHSILYCAAVAACRVAHVKFPYDIATRPKPAVPAWQCRIERRIAGARALIGKLVCYREGNTRPRVMRYVRRAFLGTDISPRDYMSRVTERIDFLKQKVYAWASRIRRYKRRVERYTQNRTFQSNERWVYRAWERPVQGVTDTHLPDDDVMCSFWRNIWSVPVSHTEGDWTREVERACDPIPQMGAITISPQDVARAVRPLPNWKSPGPDGLHNFWIKWLQKSHARLASQFQSALETGSLPQFLTTGITHLLHKSGSTAEPKNYRPITCLPTVYKVLTSILRVKINNHIDSNSIMSASQNGCRNGSRGTKELLLIDTAISQQVRRSRKDLSTCWIDYKKAYDSVPHTWLKRVLELYKVDATLRTFLTSCMGQWRTVLRYPGCRQIQRNSEPIRIERGIFQGDSLSPLWFCLALNPLSTLLEDSGLGYRLKRGGQVVSHLLYMDDLKLFAPSDLQLMELLTVTKTFSSAIRMEFGVDKCAVMHVKRGKIVESVGTQLPDFINFRALSPIETYKYLGMSEALGINAADMKQSLKERFFGRLKKVCNSLLSGGNKVRAFNGWVMPVLMYSFGILKWTQTELDALDRRVRTFLTASRMHHPRSSVMRLYIPRKCGGRGFLNAKTLHNREICSLRDYFLETDVGMHRDVVAVDQGLTPLSLAKENWRKPVVLDTNDRKEVWQSKELHGRFFQALHGPDVDQLASVSWLRFGDLFGETEGFVCAIMDEVIMTNNYRRFIVKDGTVDICRACHRPGESIRHIISGCSRLANEEYLHRHNLVARIIHQQLALKYSLVESEVPYYKYVPDPVLENGSVTLYWDRSIITDRTIVANKPDIVVMDRIERRATIIDVTVPHDGNLVKAEKDKQIKYLDLAREVVDMWDVDSAIVVPIVVSANGLIAKSLDQHLRRLALGSWIKGLIQKAVLLDTARIVRRFLSLEP

SEQ ID NO: 12542 - protein, 868 aa, Phlogophora meticulosa
MRFVRRAFSGTDISSRDYLTRVTERIDFLKQKICAWANRIRRYKRRVERYTQNRTFRSDERWVYRAWERPDQGVTDTCLPDDEAMCSFWRSIWSVPVSHTEGNWTREIERACEPLPEMGAINISPQDVASAVRPLPNWKSPGPDGLHNFWIKWLQSSHARLACQFQSALESGSLPQFLTTGITHLLHKSGSTAEPRNYRPITCLPTVYKVLTSILRSKINNHIDSNLIMSFSQNGCRNGSRGTKELLLIDTAISQQVRRSRKDLSTCWVDYKKAYDSVPHTWLMRVLELYKVDATLRTFLMSCMGQWRTVLRYPGCQQTRENSEPIRIERGIFQGDSLSPLWFCLALNPLSTLLEGSGLGYRLRTGGQVISHLLYMDDLKLFAPNNLQLMELLKVTETFSSAIRMDFGVDKCAVMHVKRGEIVESVGTQLSDSIYLRSLSSTETYKYLGMSEALGINATDMKQSLKERFFGRLNKVLNSLLSGGNKVRAFNGWVMPVLMYSFGILKWTQTELDALDRRVRTLLTANRMHHPRSSVMRLYIPRKYGGRGFLNAKTLHNREICSLREYFLKADVGMHRDVVAVDKTFTPLSLANKNWRKPIVLDTADRMEIWKSKELHGRFYRVLHGPDVDLVASISWLRFGDLFGETEGFVCAIMDEVIMTNNYRKYIVKDGTVDICRACHRPGESIRHIISGCSRLANGDYLHRHNLVARIIHQQLALKYNLVDLEVPYYKYVPDPVLENGSITLYWDRSIITDRTIVANKPDIVVIDRSERRTMIIDITVPHDENLVKAEKEKQMKYLDLAREVVDMWDVNTAVIVPIVVTANGIIAKSLDQHLKRLSLGSWIKGLIQKAVLLDTARIVRRFLSQEP

SEQ ID NO: 12543 - protein, 1043 aa, Xestia xanthographa
MTPYLIDYVSRSNLVTPASPLIAVQVQNVSSAPPRSNRDGEEDDSEVISVSTQCNAQLRSALESAFREYRSTPPELRPRLPRLPMHNKNKALVCALDSQLSNCFDSSKDLADTHSILYCGAMAACRVARVKFPNNDRATRPKLTAPAWQCRIKRRIGEARALIGKLICFREGNTRPRVMRFVRRAFSGTDISFRDYLARVAERIDSLKQKICAWASRIRRYKRRVERYTQNRTFQSDERWVYRAWERPDKGVTDTRLPDDSAICSFWRSIWSVPVSHTEGDWIREVEQACDPIPEMGAIVISPQDVARAVRLLPNWKSPGPDGLHNFWIKWFQRSHACLAAQFQSALESGSLPQFLTTGITHLLHKSGSVAEPKNYRPITCLPTVYKVLTSILRAKINQHIESNSIKSASQNGCRNGSRGTKELLLIDMAISQQVRRSRKNLSTCWIDYKKAYDSVPHTWLMRVLELYKVDATLRTFLMSCMGQWRTVLRYPGCRQIQGNSEPIRIERGIFQGDSLSPLWFCLALNPLSTLLERSGLGYLLRRDGQVISHLLYMDDLKLFAPNNLQLMKLLKVTETFSSAIRMEFGVDKCAVMHVKRGEIMESEGTQLSDSILLRSLSSTETYKYLGMSEALGINTADMKQSLRERFFGRLNKVLGSLLSGGNKVRAFNGWVMPVLMYSFGVLKWTQTELDALDRRVRTLLTANRMHHPRSSVMRLYIPRKCGGRGFLNAKTLHNREVCSLREYFLEADGEMHRDVVSVDKGLTPLSLANENWRKPKVLDTNDRKVVWQGKELHGRFYRALHGPDVDFLSSVSWQRFGDLFGETEGFICAIMDEVMMTNNYRKYIAKDGTVDICRACHRPGESIRHIVSGCSSLANGEYLHRHNLVARIIHQQLALKYNLVESEVPYYKYAPDPVLDNGHITLYWDRPITTDRTVVANRPDIVVIDRLERRTMIVDITIPHDENLVKAEKDKQFKYLDLAREVVDMWDVGTAVIVPIVVSANGLIAKSLDQHLRRLSLGNWIKGLIQKAVLLDTARIVRRFLL

SEQ ID NO: 12544 - protein, 1197 aa, Xestia xanthographa
MLTRSAAARRARLPPPDSSLSSASPPPEPSPIVSAVTPAVAVASSSSDEYFSPPTTPPPARRRGGRRPPDGLGPRGPPASDRVPAPGGSVQRMQWTQSINENVMRAYYGATERGNNLTAYRVRMLSLFQVLEPAVNVSAQRLSDQVRVIQRNCMLDDTVLDRLRTEIQSSHVIATPSQAVVPPQSSIIPNCDNDVGNDMVTNVSTQCNVEMSALEGAIREYRFMQPDLRPRIPRLPMHNKNRALVAVLDSQLSNYFDNCEDLTDVHSILYCAAVAACRVAHVKFPSDRATRPKPAVPAWQYRIERRIGGARALIGKLVCFREGNTRPRVMRFVRQAFSGTDISPRDYMSRVTERIDFLKQKVYAWANRIRRYKRRVDRYTQNRTFQKDERWVYRAWERPDQGVADTHLPDDDAMCSFWRSIWSVPVSHAEGEWTRVIERACDPVSEMGAITISPQDVARAVRPLPNWKSPGPDGLHNFWIKWFTRSHARLATLFQSALESGSLPEFLTTGITHLLHKSGSTAEPKNYRPITCLPTVYKVLTSILRTKISKHIDDNSVMSASQNGCRNGSRGTKELLLIDMAISHQVRRSRKDLSTCWIDYKKAYDSVPHTWLMRVLELYKVDATLRTFLMSCMGQWRTVLRYPGCRQIQRNSEPIRIERGIFQGDSLSPLWFCLALNPLSTLLEDSGLGYRLRKDGQVISHLLYMDDLKLFAPNDLQLMELLKVTDTFSSAIRMEFGVDKCAVMHVKRGEIVESVGTQLSDSITLRSLSATETYKYLGMSEALGVNVADIKQSLKERFFGRLKKVFNSLLSGGNKVRAFNGWVMPVLMYSFGILKWTQTELDALDTKVRKLLTAYRMHHPRSSVMRLYIPRKCGGRGFLNAKTLHNREICSLREYFLGTDVGMHRDVGTVDKGLTPLSLAKENWRKPPVLDTNDRREVWQSKELHGRFFLALHGPDVDLPASVAWLRSGDLFGETEGFVCAIMDEVMMTNNYRRFIVKDGAVDICRACHRPGETIRHIISGCSRLANGEYLHRHNLVARIIHQQLALKYNLVESEVPYYRYVPDPVLDNGCITLYWDQSIITDRTIVANKPDIVVVDRSERRAMIVDITVPHDENLVKAEKDKQIKYLDLAREVVDMWEVDSAIIVPIVVSAHGLIAKSLDQYLRRLTLGSWIKGLIQKAVLLDTARIVRRFLSLEP

SEQ ID NO: 12545 - protein, 1205 aa, Cosmia trapezina
MLTRSRAQQLRNTQPTSSGSSLSSASQLPEPAPDVSQVIPAAAVASSSSDEYFSPPTTPPPVRRRGRGRPPASLGPRGPSASDRVPAPGGSVQRMRWTQTVNENVMRAYFGATEGGSNLTAYRGRMLSLFQVLEPAVNVSAQRLSDQVRVIQRNHMLDDVVLDRLRLESRNSRVTSVSPMVAVQLQNLPSASPRPDCVGEDDDSGAISVSSQCNVQLRSALEDAFREYRSAPPGLRPRLPRLPMHKKNKALVGALDSQLSNCFDRSKDLADTHSILYCAAVAACRVAHVKFPNSDRVPRPKPAVPAWQCRIERRIGEARALIGKLICFREGNTRPRVMRFVRRAFSGTDISPRDYFTCVTERIDFLKQKICAWANRIRRYRRRVERYTQNRTFHSDERWVYRAWERPDQDVADTQLPDDDAMCSFWRSIWSVPVSHTEGDWTREVERACDHIPQMGALTISPQDVARAVRPLPNWKSPGPDGLHNFWIKWFQRSHARLASQFQSALQSGSLPQFLTIGITHLLHKSGSTAEPRNYRPITCLPTVYKVLTSILRAKINKHIDTNSIMSASQNGCGNGSRGTKELLLIDMTINQQVRRSRKDLSTCWIDYKKAYDSVPHTWLMRVLELYKIDATLRTFLMSCMGQWRTVLRYPGCRNIQRNSEPIRIERGIFQGDSLSPLWFCLALNPLSTLLEDSGLGYRLRRGGQVISHLLYMDDLKLFAPNNLQLMELLKVTETFSSAIRMEFGVDKCAVMHVKRGEIVESVRTQLSDSIHLRSLSSLETYKYLGMSEALGINAADMKQSLRERFFGRLNKVLNSLLSGGNKVRAFNGWVMPVLMYSFGILKWTQTELDALDRRVRTLLTANRMHHPRSSVMRLYIPRKCGGRGFLNAKTLHNREVCSLREYFLEADVGMHRDVVSVDKGLTPLSLANENWRKPVVLDTNDRREVWQSKELHGRFYRVLHGPDVDFLASVSWLRFGDLFGETEGFVFAIMDEVMMTNNYRKYIVKDGTVDICRACHRPGESIRHIISGCSRLANGDYLHRHNLVARIIHQQLALKYSLVESEVPYYRYVPDPVLENGNITLYWDRSIITDRTIVANKPDIVVIDRLERRTMIVDIAVPHDENLVKAEKDKQIKYLDLAREVVDMWDVDTAIIVPIVVTANGIIAKSLDQHLRRLSLGGWIKGLIQKAVLLDTVRIVRRFLSQQP

SEQ ID NO: 12546 - protein, 1199 aa, Cosmia trapezina
MKMLTRSATRRARLPPPDSSLSSASPPPVPSLTVNAVSTPAAVVASSSSDEYFSPPTTPPPARRRGGRRPPDGLGPRGPPASDRVPAPGGSVQRMRWTRAINENVMRSYYGATEGGNNLTAYRVRMHSLFQVLEPALNVSAQRLSDQVRVIQRNHMLDDTVLDRLRSEMQSSRVIAPLSQTIVAPQCSTSQADEGSDGTAANVSTQCNEELRSALEGAIQEYRFVSPELRPRLPRLPMHNKNRALVAALDSQLSNYFDDCEDLTDTHSILYCAAVAACRVAHVKFANDSRATRPKPAVPAWQCRIERRIGGARALIGKLICFREGNTRPRVMRFVRRAFSGTDVSPQDYISRVTERIDFLRQKVYAWANRIRRYKRRVDRYTQNRTFQSDERWVYRGWERPDQGVADTRLPDDDAMCSFWRSIWSVPVSHTEGDWTREVERACDPIPEMGAITICPQDVARAVRPLPNWKSPGPDGLHNFWIKWFRGSHARLAAQYQSALQSGSLPQFLTTGITHLLHKSGSTAEPKNYRPITCLPTVYKVLTSILRAKINEHIDTNSIMSASQNGSRNGSRGTKELLLIDMAISQQVRRSRKDLSTCWIDYKKAYDSVPHTWLMRVLELYKVDATLRTFLMSCMEQWRTVLRYPGCRNIQRNSEPIRIERGIFQGDSLSPLWFCLALNPLSTLLEDSGLGYRLRRGGQVISHLLYMDDLKLFAPNNLQLMELLKVTETFSSAFRMGFGVDKCAVMHVKRGEIVESVGTQLSDSINLRTLSASETYKYLGMSEALGINVADMKQSLRERFFGRLKKVFNSLLSGGNKVRAFNGWVMPVLMYSFGILKWTQTELDALDRRVRTLLTAYRMHHPRSSVMRLYIPRKCGGRGFLNAKTLHNREICSLREYFLEADVGMHRDVVAVDKGLTPLSLAKENWRKPVVLDTNDRMEVWQSKELHGRFFRALHGPDVDLLASVAWLRSGDLFGETEGFVCAIMDEVIMTNNYRRFIVKDGTVDICRACHRPGESIRHIISGCSRLANEEYLHRHNLVARIIHQQLALKYSLVESEVPYYRYVPDPVLENGNITLYWDRYIITDRTIVANKPDIVVVDRTERRAMVIDITVPHDGNLVKAEKDKQIKYLDLAREVVDMWDVDSAIIVPIVVSANGLIAKSLDQHLRRLSLGSWIKGLIQKAVLLDTARIVRRFLSLEP

SEQ ID NO: 12547 - protein, 1034 aa, Cosmia trapezina
MQSSHVIAPLSQTVVVPPPPQCNTCQADEGNDDRATNVSTQCNEELRSTLESAIQEYRFLSPELRPRLPRLPMHNKNRALVAALDSQLSNYFDDCEDLTDTHSILYCAAVAACRVAHVKFSNDCRATRPKPAVPAWQCRIEHRIGGARVLIGKLICFREGNTRPRVMRFVRRAFSGTDVSPQDYMSRVTERIDFLKQKVYAWANRIRRYRRRVDRYTQNRTFQSDERWVYRSWERPDQGVADTPLPDDDAMCSFWRSIWSVPVNHTEGDWTGRIERACDQIPQMGALTISPQDVARAVRPLPNWKSPGPDGLHNFWIKWFQRSHARLASQFQSALQSGSLPRFLTTGITHLLHKSGSTAEPKNYRPITCLPTVYKVLTSILRAKINEHVDTNSIMSASQNGCRNGSRGTKELLLIDMAISQQVRRSRKDLSTCWIDYKKAYDSVPHTWLMRVLELYKVDATLRTFLMSCMGQWRTVLRYPGCRNIQRNSEPIRIERGIFQGDSLSPLWFCLALNPLSTLLEDSGLGYRLRRGGQVISHLLYMDDLKLFAPNNLQLMELLKVTETFSSAIRMEFGVDKCAVMHVKRGEIMESVGTQLTDSINLRALSASETYKYLGMSEALGINVTDMKQSLKERFFGRLRKVFNSLLSGGNKVRAFNGWVMPVLMYSFGILKWTQTELDALDRRVRTLLTAYRMHHPRSSVMRLYIPRKCGGRGFLNAKTLHNREICSLREYFLEADVGMHRDVVAVDKGLTPLSLAKENWRKPVVLDTNDRREVWQSKELHGRFFRALHEPDVDFLASVAWLRSGDLFGETEGFVCAIMDEVMMTNNYRKYIVKDGTVDICRACHRPGESIRHIISGCSRLANEEYLHRHNLVARIIHQQLALKYSLVESEVQYYRYVPDPVLENGNITLYWDRSIITDRTIVANKPDIVVVDRTERRAVIVDITIPHDGNLVKAEKDKQIKYLDLAREVVDMWDVDSAIIVPIVVSANGLIAKSLDQHLRRLSLGSWIKGLIQRAVLLDTARIVRRFLSLEP

SEQ ID NO: 12548 - protein, 1197 aa, Mamestra brassicae
MLTRSRARHLATHPSPSASSLSSASPPPEPSPTVSAVTPAVAVASSSSDEYFSPPTTPPPARRRRGRRPPDGLGPRGPPASDRVPAPGGSVQRMRWTQSINENVMRSYFGATEGGTNLTAYRGRMLSLFQVLEPAVNVSAQRLSDQVRVIQRNRMLDDSVLDRLRMEMCGHVITPPSQTVAPPQSQISSHADEESNDRVTNVSTQCNEELRSALECAIREYRYVPPELRPRLPRLPMHNKNRALVAALDSQLSNYFDDCEDLTDTHSIMYCAAVAACRVAHVKMTNDRVTRPKPAVPAWQCRIERRIGGARALIGKLICFREGNTRPRVMRFVRRAFSGTDISPRDYMSRVTERIDFLKQKVYAWANRIRRYRRRVERYTQNRTFRSNERWVYRVWEQPDQGVTDTRLPDDDAMCSFWRNIWSVPVSHTEGGWIREVERACDPLPEMGAITISPQDVARAVRPLPNWKSPGPDGLHNFWIKWLQRSHARLASQYQTALESGSLPEFLTTGVTHLLHKSGSTAEPKNYRPITCLPTVYKVLTSILRAKINNHINSNNIMSVSQNGCRNGSRGTKELLLIDMAISQQVRRSRKDLSTCWIDYKKAYDSVPHTWLMRVLELYKIDTMLRTFLMSCMGQWRTVLRYPGCRNIQRNNEPVRIERGIFQGDSLSPLWFCLALNPLSTLLENSGLGYRLKRGGQVISHLLYMDDLKLFAPSNLQLMELLKVTETFSSAIRMEFGVDKCAVMHVKRGEIMESVGTQLSDSINLRSLSSTETYKYLGMSEALGINVTDMKQSLKERFFGRLKKVFNSLLSGGNKVRAFNGWVMPVLMHSFGVLKWTQTELDALDRRVRTLLTAYRMHHPRSSVMRLYIPRKCGGRGFLNAKTLHNREICSLREYFLAVDVGMHRDVVAVDKGLTPLSLANENWRKPAVLDTNDRRAVWQSKELHGRYFRALHGPDVDQLASVAWLRFGDLFGETEGFVCAIMDEVIMTNNYRRFIVKDGTVDICRACHRPGESIRHIVSGCSRLANGEYLHRHNLVARIIHQQLALKYSLVESEVPYYRYAPDPVLDNGNITLYWDRSIITDRTIVANKPDIVVVDRIERRAMIVDITVPHDENLVKAEKDKQIKYIDLAREVVDMWDVDSAIIVPIVVSANGLIATSLDQHLRRLSLGSWIKGLIQKAVLLDTARIVRRFLSLEP

SEQ ID NO: 12549 - protein, 1200 aa, Mamestra brassicae
MLTRSRARAQTAQPTSSGSSLSSASQPPEPAPAVSPEIPVAAVASSSSDEYFSPPTTPPPARRRGRGRPPTSLGPRGPPASDRVPAIGGSVQRMRWTQTINENVMRSYYGATEGGTNLTAYRGRMLSLFQVLEPAVNVSAQRLSDQVRVILRNRMLDDAVLDRLRLESRSGRVSPASPPAAVQIQSSISPRSNNVGEDDDDGAISVSTQCNERLRSALEDAFREYRSTPPELRPRLPRLPMHNKNRALVCALDSQLTNCFDSSEDLADTHSILYCAAAAACRVAHVKFLNSDRATRPAVPAWQCRIERRIGEARALIGKLICFREGNTRRRVMRFVRRAFSGTDTSPRDYLTRVTERIDFLKQKIYAWANRIRRYKRRVERYTQNHTFQSNERWVYRAWERPDQGVTDTRLPDDDVMCSFWRNIWSVPVSHTEGDWIREVERACDPILEMGATTISPQDVARAVRPLPNWKSPGPDGLHNFWIKWFTGSHARLASQFQSALESGSLPQFLTTGITHLLHKSGSTAEPKNYRPITCLPTVYKVLTSILRAKINHHIESNSIMSASQNGCRNGSRGTKELLLMDIAISQQVRRSRKDLSTCWIDYKKAYDSVPHTWLMRVLELYKVDAVLRTFLMSCMGQWRTVLRYPGCRQIQVNGDPIRIERGIFQGDSLSPLWFCLALNPLSTLLEGSGQGYRLRRGGQVISHLLYMDDLKLFAPNNLQLMELLKVTETFSSAISMEFGVDKCAVMHVKRGEIMESVGTQLSDSIHLRSLSSTETYKYLGMSEALGINAICYKQSLKERFFGRLNKVLNSLLSGGNKVRAFNGWVMPVLMYSFGILKWTQTELDALDRRVRSLLTANRMHHPRSSVMRLYIPRKCGGRGFLNAKTLHNREICSLREFFLEADVGMHRDVVAVDKGLTALSLANENWRKPVVLDTNDRREVWQSKELHGRFYRVLHGPDVDFLASVAWLRFGDLFGETEGFVCAIMDEVMMTNNYRKYIVKDGTVDICRACHRPGESIRHIISGCSSLANGDYLHRHNLVARIIHQQLALKYNLVESEVPYYRYVPDPVLENGNCTLYWDRSIITDRTIVANKPDIVVIDRLERRAMIVDIAVPHDENLVKTEKDKQTKYLDLAREVVDMWDVNTAVIVPIVVTANGIIAKSLDQHLKRLSLGSWIKGLIQKAVLLDTARIVRRFLSQGP

SEQ ID NO: 12550 - protein, 1200 aa, Mamestra brassicae
MLTRSRARAQTAQPTSSGSSLSSASQPPGPAPAVSPEIPVAAVASSSSDEYFSPPTTPPPARRRGRGRPPTSLGPRGPPASDRVPAIGGSVQRMRWTQTINENVMRSYYGATEGGTNLTAYRGRMLSLFQVLEPAVNVSAQRLSDQVRVILRNRMLDDAVLDRLRLESRSGRVSPASPPAAVQIQSSISPRSNNVGEDDDDGAISVSTQCNERLRSALEDAFREYRSTPPELRPRLPRLPMHNKNRALVCALDSQLTNCFDSSEDLADTHSILYCAAAAACRVAHVKFPNSDRATRPAVPAWQCRIERRIGEARALIGKLICFREGNTRRRVMRFVRRAFSGTDTSPRDYLTRVTERIDFLKQKIYAWANRIRRYKRRVERYTQNRTFQSNERWVYRAWERPDQGVTDTRLPDDDVMCSFWRNIWSVPVSHTEGDWIREVERACDPILEMGATTISPQDVARAVRPLPNWKSPGPDGLHNFWIKWFTGSHARLASQFQSALESGSLPQFLTTGITHLLHKSGSTAEPKNYRPITCLPTVYKVLTSILRAKINHHIESNSIMSASQNGCRNGSRGTKELLLMDIAISQQVRRSRKDLSTCWIDYKKAYDSVPHTWLMRVLELYRVDAVLRTFLMSCMGQWRTVLRYPGCRQIQVNGDPIRIERGIFQGDSLSPLWFCLALNPLSTLLEGSGQGYRLRRGGQVISHLLYMDDLKLFAPNNLQLMELLKVTETFSSAISMEFGVDKCAVMHVKRGEIMESVGTQLSDSIHLRSLSSTETYKYLGMSEALGINANDMKQSLKERFFGRLNKVLNSLLSGGNKVRAFNGWVMPVLMYSFGILKWTQTELDALDRRVRSLLTANRMHHPRSSVMRLYIPRKCGGRGFLNAKTLHNREICSLREFFLEADVGMHRDVVAVDKGLTALSLANENWRKPVVLDTNDRREVWQSKELHGRFYRVLHGPDVDFLASVAWLRFGDLFGETEGFVCAIMDEVMMTNNYRKYIVKDGTVDICRACHRPGESIRHIISGCSSLANGDYLHRHNLVARIIHQQLALKYNLVESEVPYYRYVPDPVLENGNCTLYWDRSIITDRTIVANKPDIVVIDRLERRAMIVDIAVPHDENLVKTEKDKQTKYLDLAREVVDMWDVNTAVIVPIVVTANGIIAKSLDQHLKRLSLGSWIKGLIQKAVLLDTARIVRRFLSQGP

SEQ ID NO: 12551 - protein, 868 aa, Mamestra brassicae
MRFVRRAFSGTDISPRDYMSRVTERIDFLKQKVYAWANRIRRYRRRVERCTQNRTFRSNERWVYRVWEQPDQGVTDTRLPDDVAMCSFWRNIWSVPVSHTEGGWIREVERACDPLPEMGAITISPQDVARAVRPLPNWKSPGPDGLHNFWIKWLQRSHARLASQYQTALESGSLPEFLTTGVTHLLHKSGSTAEPKNYRPITCLPTVYKVLTSILRAKINNHINSNNIMSVSQNGCRNGSRDTKELLLIDMAISQQVRRSRKDLSTRWIDYKKAYDSVPHTWLMRVLELYKIDTMLRTFLMSCMGQWRTVLRYPGCRNIQRNSEPVRIERGIFQGDSLSPLWFCLALNPLSTLLENSGLGYRLKRGGQVISHLLYMDDLKLFAPSNLQLMELLKVTETFSSAIRMEFGVDKCAVMHVKRGEIMESVGTQLSDSINLSSLSSTETYKYLGMSEALGINVTDMKQSLRERFFGRLKKVFNSLLSGGNKVRAFNGWVMPVLMHSFGVLKWTQTELDALDRRVRTLLTAYRMHHPRSSVMRLYIPRKCGGRGFLNAKTLHNREICSLREYFLAVDVGMHRDVVTVDKGLTPLSLANENWRKPAVLDTNDRRAVWQSKELHGRFFRALHGPDVDQLASVAWLRFGDLFGETEGFVCAIMDEVIMTNNYRRFIVEDGTVDICRACHRPGESIRHIVSGCSRLANGEYLHRHNLVARIIHQQLALQYSLVESEVPYYRYAPDPLLDNGNITLYWDRSIITDRTIVANKPDIVVVDRIERRAMIVDITVPHDENLVKAEKDKQIKYIDLAREVVDMWDVDSAIIVPIVVSANGLIATSLDQHLRRLSLGSWVKGLIQKAVLLDTARIVRRFLSLEP

SEQ ID NO: 12552 - protein, 1197 aa, Noctua fimbriata
MLTRAAAKRARLSPPDPSLSSASPPPESSPVVSAVTPAVAVASSSSDEYFSPPTTPPPVRRRGGRRPPDGLGPRGPPASDRVPAPGGSVQRMRWTQSINENVMRSYYGATEGGNNLTAYRVRMLSLFQVLEPAVNVSAQRLSDQVRVIQRNRMLDDTVLDRLRTETQSSHVITPSAQAVVLPQSSTIPNRDNDVSNDMVTNVSTQCNEELRSALEGAIREYRFMQPDLRPRIPRLPMHNKNRALVAVLDSQLSNYFDNCEDLTDAHSILYCAAVAACRIAHVKFSDDRATRPKPAVPPWQYRIERRIGGARALIGKLICFREGNTRPRVMRFVRRAFSGTDISPRDYMSRITERIDFLKQKVYAWASRIRRYKRRVDRYTQNRTFQRDERWVYRTWERPDQGVADTRIPDDDAMCSFWRSIWSVPVSHTEGEWTREVERACDLVPEMGAITISPQDVVRAVRPLPNWKSPGPDGLHNFWIKWFTRSHARLAILFQSALESGSLPEFLTTGITHLLHKSGSTAEPKNYRPITCLPTVYKVLTSILRAKINKHIDDNSIMSASQNGCRNGSRGTKELLLIDMAISQQVRRSRRDLSTCWIDYKKAYDSVPHTWLMRVLELYKVDATLRTFLMSCMGQWRTVLRYPRCWQIQRNSEPIRIERGIFQGDSLSPLWFCLALNPLSTLLEDSGLGYQLRRGGQVISHLLYMDDLKLFAPNDLQLMELLKVTETFSSAIRMEFGVDKCAVMHVKRGEIVESVGTQLSDSINLRSLSATETYKYLGMSEALGINVADMKQSLKERFFGRLKKVFNSLLSGGNKVRAFNGWVMPVLMYSFGILKWTQTELDALDRRVRTLLTAYRMHHPRSSVMRLYIPRKCGGRGFLNAKTLHNREICSLREYFLETDVGMHRDVVAMDKGLTPLSLAKENWRKPLVLDTNDRMEVWQSKELHGRFFRALHGPDVDLSASVAWLRSGDLFGETEGFVCAIMDEVMMTNNYRRFIVKDGTVDICRACHRPGESIRHIISGCSRLANGEYLHRHNLVARIIHQQLALKYNLVESEVPYYKYVPDAVLENGSITLYWDQSIITDRTIVANKPDIVMVDRSERRTMIVDITVPHDENLVKAEKDKKIKYLDLAREVVDMWDVDSAIIVPIVVSAHGLIAKSLDQYLRRLSLGSWIKGLIQKAVLLDTARIVRRFLSLEP

SEQ ID NO: 12553 - protein, 1198 aa, Noctua fimbriata
MLTRAAAKRARLSPPDPSLSSASPPPESSPVMSAVTPAVAVASSSSDEYFSPPTTPPPVRRRGGRRPPDGLGPRGPPASDRVPAPGGSVQRMRWTQSINENVMRSYYGATEGGNNLTAYRVRMLSLFQVLEPAVNVSAQRLSDQVRVIQRNRMLDDTVLDRLRTEMQSSHVIATPPPQAVVPPQSTIIPNRDNDVSNDIVTNVSTQCNEEMRSALEGAIREYRFMQPDLRPRIPRLPMHNKNRALVAVLDSQLSNYFDNCEDLTDAHSILYCGAVAACRVAHVKFSNDRATRPKPAVPPWQYRIERRIGGARALIGKLICFREGNTRPRVMRFVRRAFSRTDISPRDYMSRITERIDFLKQKVYAWANRIRRYKRRVDRYTQNRTFQRDERWVYRAWERPDQGVADTRLPDDDAMCSFWRSIWSVPVSHTEGEWTQGVERACDLVPEMGAITISPQDVVRAVRPLPNWKSPGPDGLHNFWIKWFTRSHARLAILFQSALESGSLPEFLTTGITHLLHKSGSTAEPKNYRPITCLPTVYKVLTSILRAKINKHIDDNSIMSASQNGCRNGSRGTKELLLIDMAISQQVRRSRRDLSTCWIDYKKAYDSVPHTWLMRVLELYKVDATLRTFLMSCMGQWRTVLRYPGCRQIQRNSEPIRIERGIFQGDSLSPLWFCLALNPLSTLLEDSGLGYRLRRGGQVISHLLYMDDLKLFAPNDLQLMELLKVTETFSSAIRMEFGVDKCAVMHVKRGEIVESVGTQLSDSINLRSLSATETYKYLGMSEALGINVADMKQSLKERFFGRLKKVFNSLLSGGNKVRAFNGWVMPVLMYSFGILKWTQTELDALDRRVRTLLTAYRMHHPRSSIMRLYIPRKCGGRGFLNAKTLHNREICSLREYFLETDVGMHRDVVAVDKGLTPLSLAKENWRKPLVLDTNDRMEVWQSKELHGRFFRALHGPDVDLSASVAWLRSGDLFGETEGFVCAIMDEVMMTNNYRRFIVKDGTVDICRACHRPGESIRHIISGCSRLANGEYLHRHNLVARIIHQQLALKYNLVESEVPYYKYVPDPVLENGSITLYWDQSIITDRTIVANKPDIVVVDRSERRTMIVDITVPHDENLVKAEKDKKIKYLDLAREVVDMWDVDSAIIVPIVVSAHGLIAKSLDQYLRRLSLGSWIKGLIQKAVLLDTARIVRRFLSLEP

SEQ ID NO: 12554 - protein, 868 aa, Noctua fimbriata
MRFVRRAFSGTDISPRDYMSRITERIDFLKQKVYAWASRIRRYKRRVDRYTQNRTFQRDERWVYRTWERPDQGVADTRIPDDDAMCSFWRSIWSVPVSHTEGEWTRKVERACDLVPEMGAITISPQDVVRAVRPLPNWKSPGPDGLHNFWIKWFTRSHARLAILFQSALESGSLPEFLTTGITHLLHKSGSTAEPKNYRPITCLPTVYKVLTSILRTKINKHIDDNSIMSASQNGCRNGSRGTKELLLIDMAISQQVRRSRRDLSTCWIDYKKAYDSVPHTWLMRVLELYKVDATLRTFLMSCMGQWRTVLRYPGCRQIQRNSEPIRIERGIFQGDSLSPLWFCLALNPLSTLLEDSGLGYQLRRGGQVISHLLYMDDLKLFAPNDLQLMELLKVTETFSSAIRMEFGVDKCAVMHVKRGEIVESVGTQLSDSINLRSLSATETYKYLGMSEALGINVADMKQSLKERFFGRLKKVFNSLLSGGNKVRAFNGWVMPVLMYSFGILKWTQTELDALDRRVRTSLTAYRMHHPRSSVMRLYIPRKCGGRGFLNAKTLHNREICSLREYFLETDVGMQRDVVAVDKGLTPLSLAKENWRKPLVLDTNDRMEVWQSKELHGRFFRALHGPDVDLSASVAWLRSGNLFGETEGFVCAIMDEVMMTNNYRRFIVKDGTVDICRACHRPGESIRHIISGCSRLANGEYLHRHNLVARIIHQQLALKYNFVESEVPYYKYVPDPVLENGSITLYWDQSIITDRTIVANKPDIVVVDRSERRTMIVDITVPHDENLVKAEKDKKIKYLDLAREVVDMWDVDSAIIVPIVVSAHGLIAKSLDQYLRRLSLGSWIKGLIQKAVLLDTARIVRRFLSLEP

SEQ ID NO: 12555 - protein, 1200 aa, Noctua fimbriata
MKMLTRAAAKRARLSPPDPSLSSASPPPKSSPVVSAVTPAVAVASSSSDEYFSPPTTPPPVRRRGGRRPPDGLGPRGPPASDRVPAPGGSVQRMRWTQSINANVMRAYYGATEGGNNLTAYRVRMLSLFQVLEPAVNVSAQRLSDQVRVIQRNRMLDDTVLDRLRTEMQSSHVIATPPPQAVVPPQSTIIPNRDNDVSNDIVTNVSTQCNEEMRSALEGAIREYRFMQPDLRPRIPRLPMHNKNRALVAVLDSQLSNYFDNCEDLTAAHSILYCAAVAACRVAHVKFSDDRATRPKPAVPPWQYRIERRIGGARALIGKLICFREGNTRPRVMRFVRRAFSGTDISPRDYMSRTTERIDFLKQKVYAWANRIRRYKRRVDRYTQNRTFQRDERWVYRAWERPDQGVADTRLPDDDAMCSFWRSIWSVPVSHTEGEWTQGVERACDLVPEMGAITISPQDVVRAVRPLPNWKSPGPDGLHNFWIKWFTRSHARLAILFQSALESGSLPEFLTTGITHLLHKSGSTAEPKNYRPITCLPTVYKVLTSILRAKINKHIDDNSIMSASQNGCRNGSRGTKELLLIDMAISQQVRRSRRDLSTCWIDYKKAYDSVPHTWLMRVLELYKVDATLRTFLMSCMGQWRTVLRYPGCRQIQRNSEPIRIERGIFQGDSLSPLWFCLALNPLSTLLEDSGLGYRLRRGGQVISHLLYMDDLKLFAPNDLQLMELLKVTETFSSAIRMEFGVDKCAVMHVKRGEIVESVGTQLSDSINLRSLSATETYKYLGMSEALGINVADMKQSLKERFFGRLKKVFNSLLSGGNKVRAFNGWVMPVLMYSFGILKWTQTELDALDRRVRTLLTAYRMHHPRSSVMRLYIPRKCGGRGFLNAKTLHNREICSLREYFLETDVGMHRDVVAVDKGLTPLSLAKENWRKPLVLDTNDRMEVWQSKELHGRFFRALHGPDVDLSASVAWLRSGDLFGETEGFVCAIMDEVMMTNNYRRFIVKDGTVDICRACHRPGESIRHIISGCSRLANGEYLHRHNLVARIIHQQLALKYNLVESEVPYYKYVPDPVLENGSITLYWDQSIITDRTIVANKPDIVVVDRSERRTMIVDITVPHDENLVKAEKDKKIKYLDLAREVVDMWDVDSAIIVPIVVSAHGLIAKSLDQYLRRLSLGSWIKGLIQKAVLLDTARIVRRFLSLEP

SEQ ID NO: 12556 - protein, 1198 aa, Noctua fimbriata
MLTRSAAARRARLLSPDPSLSSASPPPESSPIVSAVTPAVAVASSSSDEYFSPPTTPPPVRRRGGRRPPDGLGPRGPPASDRVPAPGGSVQRMRWTQSINENVMRSYYGATEGGNNLTAYRVRMLSLFQVLEPAVNVSAQRLSDQVRVIQRNRMLDDTVLDRLRTEMQSSHVITPSAQAVVLPQSSTITNRDNDVSNDMVTNVSTQCNEEMRSALEGAIREYRFMQSDLRPRIPRLPMHNKNRALVAVLDSQLSNYFDNCEDLTDAHSILYCAAVAACRVAHVKFFDDRATRPKPVVPPWQYRIERRIGGARALIGKLICFREGNTRPRVMRFVRRAFSGTDISPRDYMSRITERIDFLKQKVYAWASRIRRYKRRVDRYTQNRTFQRDERWVYRTWERPDQGVADTRIPDDDAMCSFWRSIWSVPVSHTEGEWTRKVERACDLVPEMGAITISPQDVVRAVRPLPNWKSPGPDGLHNFWIKWFTRSHARLAILFQSALESGSLPEFLTTGITHLLHKSGSTAEPKNYRPITCLPTVYKVLTSILRTKINKHIDDNSIMSASQNGCRNGSRGTKELLLIDMAISQQVRRSRRDLSTCWIDYKKAYDSVPHTWLMRVLELYKVDATLRTFLMSCMGQWRTVLRYPGCRQIQRNSEPIRIERGIFQGDSLSPLWFCLALNPLSTLLEDSGLGYQLRRGGQVISHLLYMDDLKLFAPNDLQLMELLKVTETFSSAIRMEFGVDKCAVMHVKRGEIVESVGTQLSDSINLRSLSATETYKYLGMSEALGINVADMKQSLKERFFGRLKKVFNSLLSGGNKVRAFNGWVMPVLMYSFGILKWTQTELDALDRRVRTLLTAYRMHHPRSSVMRLYIPRKCGGRGFLNAKTLHNREICSLREYFLETDVGMHRDVVAMDKGLTPLSLAKENWRKPLVLDTNDRMEVWQSKELHGRFFRALHGPDVDLSASVAWLRSGNLFGETEGFVCAIMDEVMMTNNYRRFIVKDGTVDICRACHRPGESIRHIISGCSRLANGEYLHRHNLVARIIHQQLALKYNFVESEVPYYKYVPDPVLENGSITLYWDQSIITDRTIVANKPDIVVVDRSERRTMIVDITVPHDENLVKAEKDKKIKYLDLAREVVDMWDVDSAIIVPIVVSAHGLIAKSLDQYLRRLSLGSWIKGLIQKAVLLDTARIVRRFLSLEP

SEQ ID NO: 12557 - protein, 1207 aa, Atethmia centrago
MLTRSRARRLRQDTHPTSSVPSLSSASQLPEPAPDVSPVIPAAAVASSSSDEYFSPPTTPPPVRPRGRGRPPASLGLRGPPASDRVPAPGGSVQRMRWTQALNENVMRAYFGATEGGSNLTAYRGRMLSLFQVLEPAVNVSAQRLSDQVRVIQRKHMLDDVVLDRLRIESRNSHVSPASPLVAVQMQNLPGGSPRPDHADKEDDDEAISVSSQCNVRLRSALDDAFREYRSTPPGLRPRLPRLPMHKKNKALVCALDSQLSNYFDSSKDLTDTHSILYCAAVAACRVAQVKFPNSDRAPRPKSAVPAWQSRIERRIGETRALIGKLICFREGNTRPRVMRFVKRAFAGTDIRSSRDYLTRVTERIDFLKQKICAWANRIRRYRRRSERYTQNRTFQNDERWVYRTWERPDQGVADTRLPDDDAICSFWRNIWSVPVNHTEGDWTKRIERACDLIPEMGALTILPQDVAHAVRPLPNWKSPGPDGLHNFWIKWFQRSHARLASQFQSALESGSLPLFLTTGITHLLHKSGSTAEPKNYRPITCLPTVYKVLTSILRAKINKHIETNLIMSASQNGCKNGSRGTKELLLIDIAISQQVRRSRKDLSTCWIDYKKAYDSVPHTWLMRVLELYKVDATLRTFLMSCMRQWRTVLCYPGCRYIQRNSEPIRIKRGIFQGDSLSPLWFCLALNPLSTLLENSGLGYRLRRGGQVISHLLYMDDLKLFAPNNLQLMELLKVTKTFSSAIRMEFGVDKCAVMHVKRGGIVESVGTQLSDSIHLRSLSSTETYKYLGMSEALGINAADMKQSLRERFFGRLNKVLNSLLSGGNKVRAFNGWVMPVLMYSFGILKWTQTELDALDRRVRTLLTANRMHHPRSSVMRLYIPRKCGGRGFLNAKTLHNREICSLREYFLETDVVMHRDVVSVDKGLTPLSLADENWRKPIILDTNDRREVWQSKELHGRFYRVLHGPDVDLLASVSWLRFGDLFGETEGFVFAIMDEVIMTNNYRKYIVKDGTVDICRACHRPGESIRHIISGCSRLANGDYLHRHNLVAKIIHQQLALKYSLVESEVPYYRYAPDPVLENGNITLYWDRSIITDRTIVANKPDIVVIDRLTRRTMIIDIAVPHDENLVKAEKDKQIKYLDLAHEVVDMWDVDTAIIVPIVVTANGIIPKSLDQHLKRLSLGSWIKGLIQRAVLLDTARIVRRFLSQEP

SEQ ID NO: 12558 - protein, 868 aa, Atethmia centrago
MRFVRRAFSGTDIGPQDYMTRVTERIDFLKQKVYAWANRIRRYKRRVERYTQNRNFQSDERWVYRGWERPNQDVTDTPLPDDDVMCSFWRSIWSVPVSHTEGDWARKVERACDPIPEMGAITICPQDVARAVRPLPNWKSPGPDGLHNFWLKWFLRSHARLAAQYQTALESGSLPQFLTTGVTHLLHKSGSTAEPKNYRPITCLPTVYKLLTSILRAKINKHIDTNSIMSASQNGCRNGSRGTKELLLIDMTISQQVRRSRKDLSTCWIDYKKAYDSVPHTWLMRVLELYKVDATLRTFLISCMRQWRTVLRYPGRRNIQRNSEPIRIERGIFQGDSLSPLWFCLALNPLSTLLEDSGLGYRMRRGGQVISHLLYMDDLKLFASNNLQLMELLKITESFSSAIRMEFGVDKCAVMHVKRGKIVESVGTQLSDSINLRTLSASETYKYLGMSEALGINVTDMKQSLKERFFGRLKKVFNSLLSGGNKVRAFNGWVMPVLMYSFGILKWTQTELDALDRRVRTLLTAYRMHHPRSSVMRLYIPRKCGGRGFLNAKTLHNREVCSLREYFLEADVGMHRDVVAVDKGLTPLSLAKENWRKLVVLDTNDRREVWQSKELHGRFFRALHEPDVDFQASVAWLRFGDLFGKTEGFVCAIMDEVIMTKNYRRFIVKDGMVDVCRACHRPGESIRHIISGCSRLANEEYLHRHNLVARIIHQQLALKYSLVESEVPYYRYVPDPVLDNGNITLYWDRSIITDRTIVANKPDIVVVDRTERRAMILDITVPHDGNLVKAEKDKQIKYLDLAREVVDMWDVDSAIIVPIVVSANGLIAKSLDQHLKRLTLDGWIKGLIQKAVLLDTARIVRRFLSLEP

SEQ ID NO: 12559 - protein, 1204 aa, Agrotis ipsilon
MLTRSRTQRLKAHLPSPGSSPSSASQPPARASAESAVSPVAAVASSSSDEFFSPPSTPPPPRRRGRGRPPAGLGSRGQQAPNRVPAAGGNVSRMRWTQSMNENVMRAYYGATEGGSSLTAYRGRMLSLFQVLEPGISVSAQRLSDQVRVIQRNCMLDDTVLDRLRSDSRSNRVIPASPLIAVQQQSSSSMPPQPDRDCEEDHSEVISVSTQCNAQLRSALESAFREFRSVPPELRPRLPRLPMHNKNKALMCALDSELSNCFDSSKDLADAHSILYCAAVAACRVAQVKFPDSDRATRPKPAAPAWQCRIERRIGEARALIGKLHCFREGNTRPRVMRFVRRAFSGIDIDPRDYLARVTERIDFLKQKICAWANRIRRYKRRVERYTLNRTFQSDERWVYRAWERPDQGLADTPLPDDDAMSSFWRSIWSVPVSHTEGDWIRDVERACDHIPEMGAITISPQDVACAVHLLPNWKSPGPDGLHNFWIKWLKKSHARLATLFQSAIESGSLPEFLMTGITHLLHKTGSTAEPKNYRPITCLPTLYKVLTSILRTKISKHIYENSIMSASQNGCKNGSRGTKELLLIDMAISQQVRRSRKDLSTCWIDYKKAYDSVPHTWLMRVLELYKVDATLCTFLMSCMQQWRTVLLYPGCRHIQRTSEPIRIERGIFQGDSLSPLWFCLALNPLSTLLEGSGLGYRLKRGGQVISHLLYMDDLKLFAPNNLQLMKLLKVTETFSSAIRMEFGVDKCAVMHVKRGEIMESEGTQLSDSIHLRSLSSTETYKYLGMSEALGINNADMKQSLRERFFGRLNKVLNSLLSGGNKVRAFNGWVMPVLMYSFGILKWTQTELDALDRRVRSLLTANRMHHPRSSVMRLYIPRKCGGRGFLNAKTLHNREVCSLREYFLETDVGMHRDVVTVDKGLTPLSLANENWRKPRVLDTNDRKEVWQSKELHGRYYRALHGPDVDFLASVSWLRFGDLFGETEGFVCAIMDEVMMTNNYRKYIVKDGTVDICRACHRPGESIRHIISGCSRLANGEYLHRHNLVARIIHQQLALKYNLVESEVPYYRYAPDPVLENGNISLYWDRPIITDRTIVANKPDIVVIDRPERRAIIVDITVPHDENLVKAEKDKQFKYLDLAREVVDMWDVNTAVIVPIVVSANGLIAKSLDQHLRRLSLGGWIKRLIQKAVLMDTARIVRRFLSQGP

SEQ ID NO: 12560 - protein, 1025 aa, Mesoligia furuncula
MLSLFQVLEPAVNVSAQRLSDQVRVIQRNHMLDDTVLDRLRSEMQSSHVIAPQSQTAAILPQPNISHTDEGSNDRAINVSTQCNEELRSALEDAIQEYRFLSPELRPRLPRLPMHNKNRALVAVLDSQLSKYFDTCEDLIDTHSILYCAAVAACRVAHVKFANDSRATRPKQAVPAWQCRIERRIGGARTLIGKLICFREGNTRPRVMRFVRRAFSGTDISPQDYMSCVTERIDFLKQKVYAWANRIRRYRRRVERYTQNRTFQSDERWVYRGWERPDQGVAETCLPDDDAMCSFWRSIWSVPVSHTEGDWAREVERACDPIPEMGAITICPQDVARAVRPLPNWKSPGPNGLQNFWIKWFPRSHARLASQFQTALESGSLPQFLTTGITHLLHKSGSTAEPKNYRPITCLPTVYKVLTSILRTKINKHIDTNSIMSASQNRCRNGSRGTKELLLIDMAISQQVRRFRKDLSTCWIDYKKAYDSVPHTWLMRVLELYKVDTTLRTFLMSCMGQWRTVLRYPGCRNIQRNSEPIRIERGIFQGDSLSPLWFCLALNPLSTLLEDSGLGYRLRRGGQVISHLLYMDDLKLFAPNTLQLMELLKITETFSSAIRMEFGVDKCAVMHVKRGEIVESVGTQLLDSTNLRALSASETYKYLGMSEALGINVTDMKQSVKERFFGRLKKVLNSLLSGGNKVRAFNGWVMPVLMYSFGILKWTQTELDALDRRVRTLLTANRMHHPRSSVMRLYIPRKCGGRGFLNAKTLHNREICSLREYFLETDVGMHRDVVIVDKGLTPLSLAKENWRKPVVLDTNDRMEVWQSKELHGRFLRALRGPDVDLQASVAWLRFGNLFGETEGFVCAIMDEVMMTNNYRRFIVKDGTVDICRACHRPGESIRHIISGCSRLANGEYLHRHNLVARIIHQQLALKYNLVESEVPYYRYVPDPVLENGNITLYWDRSIITDRTVVANKPDIVVVDRSERRAMIVDITVPHDENLVKAEKDKQIKYLDLAREVVDMWDVDTATLCR

SEQ ID NO: 12561 - protein, 1198 aa, Mesoligia furuncula
MLTRLAARRARLPPPDSSLSSASPPPVPSLTVSAVTTPAVAVASSSSDEYFSPPTTPPPARRRGGRRPPDGLGPRGPPASDRVPASGGSVQRMRWTRSINENVMRSYYGATEGGNNLTAYRVRMLSLFQVLEPAVNVSAQRLSDQVRVIQRNHMLDDTVLDRLRNEMQSSHVITPQPQTAVLLPQCNTNHADEGSNDRATNVSTQCNEELRSALEDAIREYRFMSPEHRPRLPRLPMHNKNRALVAALDSQLSNYFDDCEDLTDTHSILYCAAVAVCRVAHVKFANDSRATRPKPAIPAWQCRIERRIGGARALIGKLICFREGNTRPRVMRFVRRAFLGTDISPQDYMSCVTERIDFLKQKVYAWANRIRRYKRRVERYTQNRTFQSDERWVYRSWERPDQSVADTCLPDDEAMCSFWRNIWSVPVSHTEGDWAREVERACDPIPEMGAITICPQDVARAVRPLPNWKSPGPDGLHNFWIKWFLRSHARLASQFQTALESGSLPQFLTTGITHLLHKSGSTTEPKNYRPITCLPTVYKVLTSILRAKIDKHINTNSIMSVSQNGCKNGSRGTKELLLIDMAISQQVRRSRKDLSTCWIDYKKAYDSVPHTWLMRVLELYKIDATLRTFLMSCMGQWRTVLRYPGCRNIQRNSEPIRIERGIFQGDSLSPLWFCLALNPLSTLLEDSGLGYRLRRGGQVISHLLYMDDLKLFAPNNLQLMELLKVTQTFSSAIRMEFGVDKCAVMHVKRGEIVESVGTQLSDSTNLRTLSASETYKYLGMSEALGINVTDMKQSLKERFFGRLKKVLNSLLSGGNKVRAFNGWVMPVLMYSFGILKWTQTELDALDRRVRTLLTANRMHHPRSSVMRLYIPRKCGGRGFLNAKTLHNREICSLREYFLETDVGMHRDVVAVDKGLTPLSLAKENWRKPVVLDTNDRMEVWQSKELHGRFFRALHGPDVDLLASVAWLRFGDLFGETEGFVCAIMDEVMMTNNYRRFIVKDGTVDICRACHRPGESIRHIISGCSRLANGEYLHRHNLVARIIHQQLALKYSLVESEVPYYRYVPDSVLENGNISLYWDRSIITDRTIVANKPDIVVVDRSERRAMIVDITVPHDENLVKAEKDKQIKYLDLAREVVDMWDVDSAIIVPIVVTANGLIAKSLDQHLRRLSLGSWIKGLIQKAVLLDTARIVRRFLSLEP

SEQ ID NO: 12562 - protein, 868 aa, Mesoligia furuncula
MRFVRRAFLGTDISPQDYMSCVTERIDFLKQKVYAWANRIRRYKRRVERYTQNRTFQSDQRWVYRDWERPYQSVTDTCLPDDDAMCSFWRSIWSVPVSHTESDWTREVERACDPIPEMGAITICPQDVARAVRPLPNWKSPGPDGLHNFWIKWFTRSHARLASQFQTALESGSLPQFLTTGITHLLHKSGSTAEPKNYRPITCLPTVYKVLTSILRVKIDKHINTNSIMSASQNGCRNGSRGTKELLLIDMTISQQVRRSRKDLSTCWIDYKKAYDSVPHTWLMRVLGLYKVDTTLHTFLMSCMGQWRTVLRYPGCRNIQRNSEPIRIERGIFQGDSLSPLWFCLALNPLSTLLEDSGLGYRLRRGGQVISHLLYMDDLKLFAPNNLQLMELLKITETFSSAIRMEFGVDKCAVMHVKRGEIVESVGTQLSDSTNLRALSASETYKYLGMSEALGINVTDMKQSLKERFFGRLKKVFNSLLSGGNKVRAFNGWVMPVLMYSFGILKWTQTELDALDRKVRTLLTANRMHHPRSSVMRLYIPRKCGGRGFLNAKTRHNREICSLREYFLETDVGMHRDVVAVDKGLTPLSLGKENWRKPVVLDTNDRMEVWQSKELHGRFFRALHGPDVDLLASVAWLRFGDLFGETEGFVCAIMDEVMMTNNYRRFIVKDGTVDICRACHRPGESIRHIISGCSRLANGEYLHRHNLVARIIHQQLALKYSLVESEVPYYRYVPDPVLENGNITLYWDRSIITDRTIIANKPDIVVVDRSERRAMIVDITVPHDGNLVKAEKDKQIKYLDLAHEVVDMWDVDSAIIVPIVVTANGLIAKSLDQHLKRLSLGSWIKGLIQKAVLLDTARIVRRFLSLEP

SEQ ID NO: 12563 - protein, 1198 aa, Mesoligia furuncula
MLTRLAARRARLPPPDSSLSSASPPPVPSLTVSAVTTPAVAVASSSSDEYFSPPTTPPPARRRGGRRPPDGLGPRGPPASDRVPAPGGSVQRMRWTRSINENVMRSYYGATEGGNNLTAYRVRMLSLFQVLEPAVNVSAQRLSDQVRVIQRNHMLDDTVLDRLRNEMQSSHVIAPQPQTAVLLPQCNTNHADEGSNDRATNVSTQCNEELRSALEDAIREYRFMSPEHRPRLPRLPMHNKNRALVAALDSQLSNYFDDCEDLTDTHSILYCAAVAVCRVAHVKFANDSRATRPKPAIPAWQCRIERRIGGARALIGKLICFREGNTRPRVMRFVRRAFLGTDISPQDYMSCVTERIDFLKQKVYAWANRIRRYKRRVERYTQNRTFQSDERWVYRSWERLDQSVADTCLPDDEAMCSFWRNIWSVPVSHTEGDWAREVERACDPIPEMGAITICPQDVARAVRPLPNWKSPGPDGLHNFWIKWFLRSHARLASQFQTALESGSLPQFLTTGITHLLHKSGSTTEPKNYRPITCLPTVYKVLTSILRAKIDKHINTNSIMSVSQNGCKNGSRGTKELLLIDMAISQQVRRSRKDLSTCWIDYKKAYDSVPHTWLMRVLELYKIDATLRTFLMSCMGQWRTVLRYPGCRNIQRNSEPIRIERGIFQGDSLSPLWFCLALNPLSTLLEDSGLGYRLRRGGQVISHLLYMDDLKLFAPNNLQLMELLKVTQTFSSAIRMEFGVDKCAVMHVKRGEIVESVGTQLSDSTNLRALSASETYKYLGMSEALGINVTDMKQSLKERFFGRLKKVLNSLLSGGNKVRAFNGWVMPVLMYSFGILKWTQTELDALDRRVRTLLTANRMHHPRSSVMRLYIPRKCGGRGFLNAKTLHNREICSLREYFLETDVGMHRDVVAVDKALTPLSLAKENWRKPVVLDTNDRMEVWQSKELHGRFFRALHGPDVDLLASVAWLHFGDLFGETEGFVCAIMDEVMMTNNYRRFIVKDGTVDICRACHRPGESIRHIISGCSRLANGEYLHRHNLVARIIHQQLALKYSLVESEVPYYRYVPDPVLENGNISLYWDRSIITDRTIVANKPDIVVVDRSERRAMIVDITVPHDENLVKAEKDKQIKYLDLAREVVDMWDVDSAIIVPIVVTANGLIAKSLDQHLRRLSLGSWIKGLIQKAVLLDTARIVRRFLSLEP

SEQ ID NO: 12564 - protein, 1198 aa, Mesoligia furuncula
MLTRLAARRARLLPPDSSLSSASPPPVPSPTVSAVMTPAAAVASSSSDEYFSPPTTPPPARRRRGRRPPDGLGLRGPPASDRVPALGGSVQRMRWTQSINENVMRSYYGATEGGNILTAYRVRMLSLFQVLEPAVNVSAQRLSDQVRVIQRNHMLDDTVLDRLRSEMQSSHVIAPQSQTAAILPQPNISHTDEGSNDRAINVSTQCNEELRSALEDAIQEYRFMSPELRPRLPRLPMHNKNRALVAVLDSQLSKYFDTCEDLIDTHSILYCAAVAACRVAHVKFANDSRATRPKQAVPAWQCRIERRIGGARTLIGKLICFREGNTRPRVMRFVRRAFSGTDISPQDYMSCVTERIDFLKQKVYAWANRIRRYRRRVERYTQNRTFQSDERWVYRGWERPDQGVAETCLPDDDAMCSFWRSIWSVPVSHTEGDWAREVERACDPIPEMGAITICPQDVARAVRPLPNWKSPGPDGLQNFWIKWFPRSHARLASQFQTALESGSLPQFLTTGITHLLHKSGSTAEPKNYRPITCLPTVYKVLTSILRTKINKHIDTNSIMSASQNGCRNGSRGTKELLLIDMAISQQVRRFRKDLSTCWIDYKKAYDSVPHTWLMRVLELYKVDTTLRTFLMSCMGQWRTVLRYPGCRNIQRNSEPIRIERGIFQGDSLSPLWFCLALNPLSTLLEDSGLGYRLRRGGQVISHLLYMDDLKLFAPNTLQLMELLKITETFSSAIRMEFGVDKCAVMHVKRGEIVESVGTQLLDSTNLRALSASETYKYLGMSEALGINVTDMKQSVKERFFGRLKKVLNSLLSGGNKVRAFNGWVMPVLMYSFGILKWTQTELDALDRRVRTLLTANRMHHPRSSVMRLYIPRKCGGRGFLNAKTLHNREICSLREYFLETDVGMHRDVVIVDKGLTPLSLAKENWRKPVVLDTNDRMEVWQSKELHGRFLRALRGPDVDLQASVAWLRFGNLFGETEGFVCAIMDEVMMTNNYRRFIVKDGTVDICRACHRPGESIRHIISGCSRLANGEYLHRHNLVARIIHQQLALKYNLVESEVPYYRYVPDPVLENGNITLYWDRSIITDRTIVANKPDIVVVDRSERRAMIVDITVPHDENLVKAEKDKQIKYLDLAREVVDMWDVDTAIIVPIVVTANGLIAKSLDQHLRRLSLGSWIKGLIQRAVLLDTARIVRRFLSLEP

SEQ ID NO: 12565 - protein, 1199 aa, Spilarctia lutea
MLTRARRRAQLSPPDSSLRSALPSPEEAIEVPAGAEASSSSSSDEFFSPPTSPIPARRQGRGRPPTSLGSRGPLTSNRAPAAGGDVRRMKWTHSINENVMRAYFRATELGTNLTAYRVRLVSLFQELEPAVNVSAQRLSDQVRAIQRCHLLDDAALERIRSDIRNSLTVPSSSHVLNVVTNSTPQVPQNDDISELVDSEIISVSTQYNDRIRSTLEDAIREYRYVNLNNRPRLSRLPIHKRNLALVSALDSLLPKYFSNSEDLSDTHSILYCAAIAVCRVASVKFTEYTTTTRQENTLPAWQYRIERRIAEARTLIGKLMSFRSGNTRPRVMRFVKRAFLGTTISPQEYMSCVTERIDFLKQKVYAWANRIRRYRKRVDRYNQNRMFQRNEKWVYRKWENLSPCVSDGQVPDENATNSFWRNMWSVPVTHTEGDWYRDVERSCESLLPMEPISIDEEDVSCAVRSLPNWKAPGPDGLHNFWLKWFRSSHACLASQFQTALDSGSLPQFLTTGITHLLYKSGDAMDPKNFRPITCLPTLYKLLTSILRLKITTHINHNSILSISQNGCRSGTRGTKELLIIDMTISQQVRRNRKSLATCWIDYKKAFDSVPHTWLLKVLELYKIDTTLCTFLRVCMGQWRTALRYPGCRQSAMNDVLIKIERGIFQGDSLSPLWFCLALNPLSTLLEGSGLGYRLQKDDRVISHLFYMDDLKLLAPTKLQLTALLKVTENFSNSIKMEFGVDKCAVMYVKKGEIVESEGIELSDSTKLRSLSATETYKYLGFSQSLGMPESDMKQTLRERFLSRLKKVLKSLLSGGNRVRACNGWVMPVLMYSFGVLRWTQTELDAIDRRVRTLLTAFRMHHPRSSVMRLYIPRRLGGRGLLNIKTLHNREVYNLREYFLQTDVGVHRSVVTVDTGLTPLALAKENWRKPVVLSTNDRREVWKGKVLHGRFYRALNGPDIDFKASTSWLRYSDLFGETEGFVCAIMDEVIMTNNYRKYILKDGTVDICRACHRPGESIRHIISGCSRLANGEYLHRHNQVARIVHQQLALKYNLVISEVPYYRYVPDPVLENGRATLYWDRSIITDRTIVANKPDIMVIDRLERRAMIVDIAVPHDENLVKVEKEKQIKYLDLSHEIVDMWNVDSVIIVPIVVSAHGLIAKSLDQHLKRLTLGGWIKGLIQKAVLLDTARIVRRFLSLEP

SEQ ID NO: 12566 - protein, 1199 aa, Spilarctia lutea
MLTRARRRAQLSPPDSSLCSALPSPEEAIEVPAGAEASSSSSSDEFFSPPTSPIPVRRQGRGRPPTSLGSRGPLTSNRAPAAGGDVRRMKWTHSINENVMRAYFRATELGTNLTAYRVRLVSLFQELEPAVNVSAQRLSDQVRAIQRCHLLDDAALERIRSDIRNSLTVPSSSHVLNVVTNSTPQVPQNDDISELVDSEIISVSTQYNDRIRSTLEDAIREYRYVNLNNRPRLSRLPIHKRNLALVSALDSLLPKYFSNSEDLSDTHSILYCAAIAVCRVAGVKFAEYTTTTRQENTLPAWQYRIERRIAEARTLIGKLMSFRSGNTRPRVMRFVKRAFLGTTISPQEYMSCVTERIDFLKQKVYAWANRIRRYRKRVDRYNQNRMFQRNEKWVYRKWENLSPCMSDGQVPDENATNSFWRNMWSVPVTHTEGDWYRDVERSCESLLPMEPISINEEDVSCAVRSLPNWKAPGPDGLHNFWLKWFRSSHACLASQFQTALDSGSLPQFLTTGITHLLYKSGDAMDPKNFRPITCLPTLYKLLTSILRLKITTHINHNSILSISQNGCRSGTRGTKELLIIDMTISQQVRRNRKSLATCWIDYKKAFDSVPHTWLLKVLELYKIDTTLCTFLKVCMGQWRTALRYPGCRQSAMNDVLIKIERGIFQGDSLSPLWFCLALNPLSTLLEGSGLGYRLQKDDRVISHLFYMDDLKLLAPTKLQLTALLKVTENFSNSIKMAFGVDKCAVMYVKKGEIVESEGIELSDSTKLRSLSATETYKYLGFSQSLGMPESDMKQTLRERFFSRLKKVLKSLLSGGNKVRACNGWVMPVLMYSFGVLRWTQTELDAIDRRVRTLLTAFRMHHPRSSVMRLYIPRRLGGRGLLNIKTLHNREVYNLREYFLQTDVGVHRSVVTVDTGLTPLALAKENWRKPVVLSTNDRREVWKGKELHGRFYRALHGPDIDFKTSTSWLRYGDLFGETEGFVCAIMDEVIMTNNYRKYILRDGTVDICRACHRPGESIRHIISGCSRLANGEYLHRHNQVARIVHQQLALKYHLVNSEVPYYRYVPDPVLENGRATLYWDRSIITDRTIVANKPDIVVMDRLERRAIIIDIAVPHDENLVKVEKEKQIKYLDLSHEIVDMWNVDSVIIVPIVVSAHGLIAKSLDQHLKRLTLEGWIKGLIQKAVLLDTARIVRRFLSLEP

SEQ ID NO: 12567 - protein, 1199 aa, Spilarctia lutea
MLTRARRRAQLSPPDSSLRSALPSPEEAIEVPAGAEASSSSSSDEFFSPPTSPIPVRRQGRGRPPTSLGSRGPLTSNRAPAAGGDVRRMKWTHSINENVMRAYFRATELGTNLTAYRVRLVSLFQELEPAVNVSAQRLSDQVRAIQRCHLLDDAALERIRSDIRSSLTVPSSSHVLNVVTNSTPQVPQNDDISELVDSEIISVSTQYNDRIRSTLEDAIREYRYVNLNNRPRLSRLPIHKRNLALVSALDSLLPKYFSNSEDLSDTHSILYCAAIAVCRVAGVKFAEYTTTTRQENTLPAWQYRIERRIAEARTLIGKLMSFRSGNTRPRVMRFVKRAFLGTTISPQEYMSCVTERIDFLKQKVYAWANRIRRYRKRVDRYNQNRMFQRNEKWVYRKWENLSPCMSDGQVPDENATNSFWRNMWSVPVTHTEGDWYRDVERSCESLLPMEPISIDEEDVSCAVRSLPNWKAPGPDGLHNFWLKWFRSSHACLASQFQTALDSGSLPQFLTTGITHLLYKSGDAMDPKNFRPITCLPTLYKLLTSILRLKITTHINHNSILSISQNGCRSGTRGTKELLIIDMTISQQVRRNRRSLATCWIDYKKAFDSVPHTWLLKVLELYKIDTTLCTFLKVCMGQWRTALRYPGCRQSAMNDVLIKIERGIFQGDSLSPLWFCLALNPLSTLLEGSGLGYRLQKDDRVISHLFYMDDLKLLAPTKLQLTALLKVTENFSNSIKMEFGVDKCAVMYVKKGEIVESEGIELSDSTKLRSLSATETYKYLGFSQSLGMPESGMKQTLRERFFSRLKKVLKSLLSGGNKVRACNGWVMPVLMYSFGVLRWTQTELDAIDRRVRTLLTAFRMHHPRSSVMRLYIPRRLGGRGLLNIKTLHNREVYNLREYFLQTDVGVHRSVVTVDTGLTPLALAKENWRKPVVLSTNDRREVWKGKELHGRFYRALHGPDIDFKTSTSWLRYGDLFGETEGFVCAIMDEVIMTNNYRKYILKDGTVDICRACHRPGESIRHIISGCSRLANGEYLHRHNQVARIVHQQLALKYHLVNSEVPYYRYVPDPVLENGRATLYWDRSIITDRTIVANKPDIVVIDRLERRAIIIDIAVPHDENLVKVEKEKQIKYLDLSHEIVDMWNVDSVIIVPIVVSAHGLIAKSLDQHLKRLTLEGWIKGLIQKAVLLDTARIVRRFLSLEP

SEQ ID NO: 12568 - protein, 1000 aa, Xestia c-nigrum
MITNVATQCSEDMRSALEGAIREYRFVTPELRPRLPRLPMNNKNRMLVAVLDSQLSNYFDDCEDLTDVHSVLYCAAVAACRVARVKFSDDRATRPKPAVLAWQYRIEQRIGGARALIGKLICFREGNTRPRVMRFVRRAFSGTDISPRDYMSRVTERIDFLKQKVYAWASRIRRYKRRVDRYTQNRTFQRDERWVYRAWERPDQGVADTHLPDDDAMCSFWRSIWSVPVSHAEGEWTRVIERACDPVPEMGAITISPQDVACAVRPLPNWKSPGPDGLHNFWIKWFAGSHARLATLFQSALESGSLPEFLTTGLTHLLHKSGSTAEPKNYRPITCLPTVYKVLTSILRTKICKHIDDNSVMSASQNGCRNGSRGTKELLLIDMAISQQVRRSRKDLSTCWIDYKKAYDSVPHTWLMRVLELYKVDATLRTFLMSCMRQWRTVLRYPGCRQIQRNSEPIRIERGIFQGDSLSPLWFCLALNPLSTLLEDSGLGYQLRKDGRVISHLLYMDDLKLFAPNDLQLMELLKVTETFSSAIRMEFGVDKCAVMHVKRGEIVESVGTQLSDSINLRSLSATETYKYLGMSEALGINVADMKQSLKERFFGRLKKVFNSLLSGGNKVRAFNGWVMPVLMYSFGILKWTQTELDALDTKVRKLLTAFRMHHPRSSVMRLYIPRKCGGRGFLNAKTLHNREICSLREYFQEADVEMHRDVVAMDKGLTPLSLAKENWRKPIVLTTDDRRKEWQGKELHGRFYRALHGPDVDFLASVSWLRSGDLFGETEGFVCAIMDEVMMTNNYRRFIVKDGTVDICRACHRPGESIRHIISGCSRLANGEYLHRHNLVARIIHQQLALKYNLVESEVPYYRYVPDPVLVNGNITLYWDQSIITDRTVIANRPDIVVMDRSERRAMIVDITVPHDENLVKAEKDKQIKYLDLAREVVDMWEVDSVIIVPIVVSAHGLIAKSLDQHLRRLSLGSWIKGLIQKAVLLDTARIVRRFFSLEP

SEQ ID NO: 12569 - protein, 1199 aa, Xestia c-nigrum
MLTRAAARRARLSPPDPSLSSASPPPEPSPIVSAVTPAVAVASSSSDEYFSPPTTPPPARRRGGRRPPDGLGPRGPPASDRVPAPGGSVQRMRWTQSNNENVMRAYYGATEGGINLTAYRVRMLSLFQVLEPAVNVSAQRLSDQVRVIQRNRMLDDTVLDRLRTEVQSSRVTATPPSQAVVPPQSTVTTPYCDGDVSSDMVTNVSTQCSEDMRSALEGAIREYRFMKPELRPRLPRLPMHNKNKMLMAVLDSQLSNYFDSCEDLTDIHSILYCAAVAACRVAHVKFSDDRATRPKPAVPAWQYRIEQRIGGARALIGKLICFREGNTRPRVMRFVRRAFSGTDISPRDYMFRVTERIDFLKQKVYAWASRIRRYKRRVDRYTQNRTFQRDERWVYRAWERPDQGVADTRLPDDDAMCSFWRSIWSVPVSHAEGEWTRVVERACDPVPEMGAITISPQDVACAVRPLPNWKSPGPDGLHNFWIKLFTRSHARLATLFQSALESGSLPEFLTTGITHLLHKSGSTAEPKNYRPITCLPTVYKVLTSILRAKITKHIDENSVMSASQNGCRNGSRGTKELLLIDMAISQQVRRSRKDLSTCWIDYKKAYDSVPHTWLRRVLELYKVDATLRTFLMSCMGQWRTVLRYPGCRQIQRNSEPIRIERGIFQGDSLSPLWFCLALNPLSTLLEDSGLGYQLRKDGRVISHLLYMDDLKLFAPNDLQLMELLKVTETFSSAIRMEFGVDKCAVMHVKRGGIVESVGTQLSDSINLRSLSATETYKYLGMSEALGISVADMKQLLKERFFGRLKKVFNSLLSGGNKVRAFNGWVMPVLMYSFGILKWTQTELDALDTKVRKLLTAYRMHHPRSSVMRLYIPRKCGGRGFLNAKTLHNREICSLREYFLAADVGMHRDVVAMDKGLTPLSLAKENWRIPVVFTTDDRRKEWQSKELHGRFYRALHGPDVDFQASVSWLRSGDLFGETEGFVCAIMDEVMMTNNYRRFIVKDGTVDICRACHRPGESIRHIISGCSRLANGEYLHRHNLVARIIHQQLALKYNLVESEVPYYRYVPDPVLNSGSITLYWDQSIITDRTVIANRPDIVVMDRSERRAMIVDITVPHDENLVKAEKDKQIKYIDLAREVVDMWEVDSAIIVPIVVSAHGLIAKSLDQYLRRLSLGSWIKGLIQKAVLLDTARIVRRFLSLEP

SEQ ID NO: 12570 - protein, 1198 aa, Xestia c-nigrum
MLTRAAARRARLPPPDPSLSSASPPPEPSPIVSAVTPAVAVASSSSDEYFSPPTTPPPVRRRGGRRPPDGLGPRGPPASDRVPAPGGSVQRMRWTQSNNENVMRAYYGATEGGNNLTAYRVRMLSLFQVLEPAVNVSAQRLSDQVRVIQRNRMLDDTVLDRLRTEMHSSHVIATPPSQAVVPPQSTTITNRDDDVSSDMITNVGTQYSEDMRSALEGAIREYRFMTPELRPRLPRLPMHNKNRMLVAVLDSQLSNYFDNCEDLTDVHSVLYCAAVAACRVALVKFPDDRATRPKPAVPAWQYRIEQRIGGARALIGKLICFREGNTRPRVMRFVRRAFSGTDINPRDYMSRVTERIDFLKQKVYAWASRIRRYKRRVDRYTQNRTFQRDERWVYRAWERPDQGVADTRLPDDDAMCSFWRSIWSVPVSHAEGEWTRVVERACDPVPEMGAITISPQDVACAVRPLPNWKSPGPDGLHNFWIKWFTRSHARLATLFQSALESGSLPEFLTTGITHLLHKSGSTAEPKNYRPTTCLPTVYKVLTSILRAKITKHIDENSVMSASQNGCRNGSRGTKELLLIDMAISQQVRRSRKDLSTCWIDYKKAYDSVPHTWLMRVLELYKVDATLRTFLMSCMGQWRTVLRYPGCRQIQRNSEPIRIERGIFQGDSLSPLWFCLALNPLSTLLEDSGLGYQLRKDGRVISHLLYMDDLKLFATNDFQLMELLKVTETFSSAIRMEFGVDKCAVMHVKRGEIVESVGTQLSDSINLRSLSATETYKYLGMSEALGINVADMKQSLKERFFGRLKKVFNSLLSGGNKVRAFNGWVMPVLMYSFGILKWTQTELDALDTKVRKLLTAFRMHHPRSSVMRLYIPRKCGGRGFLNAKTLHNREICSLRDYFLEADVGMHRDVVAMDKGLTPLSLAKENWRKPIILTTDDRRKEWQGKELHGRFYRALHGPDVDFLASVSWLRSGDLFGETEGFVCAIMDEVMMTNNYRRFIVKDGTVDICRACHRPGESIRHIISGCSRLANGEYLHRHNLVARIIHQQLALKYNLVESEVPYYRYVPDPVLVNGSITLYWDQSIITDRTVIANRPDIVVMDRSERRAMIVDITVPHDENLVKAEKDKQIKYLDLAREVVDMWEVDSAIIVPIVVSAHGLIAKSLDQHLRRLSLGSWIKGLIQKAVLLDTARIVRRFLSLEP

SEQ ID NO: 12571 - protein, 1198 aa, Xestia c-nigrum
MLTRAAARRARLPPPDPSLSSASPPPEPSPIVSAVTPAVAVASSSSDEYFSPPTTPPPARRRGGRRPPDGLGPRGPPASDRVPAPGGSVQRMRWTQSNNENVMRAYYGATEGGNNLTAYRVRMLSLFQVLEPAVNVSAQRLSDQVRVIQRNRMLDDTVLDRFRTEMHSSHVIATPPSQAVVPPQSTTITYRDDDVSSDMITNVSTQYSEDMRSALEGAIREYRFMTPELRPRLPRLPMHNKNRMLVAVLDSQLSNYFDNCEDLTDVHSILYCAAVAACRVARVKFSDDSATRPKPAVPAWQYRIEQRIGGARALIGKLICFREGNTRPRVMRFVRRAFSGTDINPRDYMSRVTERIDFLKQKVYAWASRIRRYKRRVDRYTQNRTFQRDERWVYRAWERPDQGVADTRLPDDDAMCSFWRSIWSVPVSHAEGEWTRVIERACDPVPEMGAITISPQDVACAVRPLPNWKSPGPDGLHNFWIKWFTRSHARLATLFQSALESGSLPEFLTTGITHLLHKSGSTAEPKNYRPITCLPTVYKVLTSILRTKICKHVDDNSVMSASQNGCRNGSRGTKELLLIDMAISQQVRRSRKDLSTCWIDYKKAYDSVPHTWLMRVLELYKVDATLRTFLMSCMGQWRTVLRYPGCRQIQRNSEPIRIERGIFQGDSLSPLWFCLALNPLSTLLEDSGLGYQLRKDGRVISHLLYMDDLKLFAPNDLQLMELLKVTETFSSAIRMEFGVDKCAVMHVKRGEIVESVGTQLSDSINLRSLSATETYKYLGMSEALGINVADMKQSLKERFFGRLKKVFNSLLSGGNKVRAFNGWVMPVLMYSFGILKWTQTELDALDTKVRKLLTAFRMHHPRSSVMRLYIPRKCGGRGFLNAKTLHNREICSLRDYFLEADVGMHRDVVTMDKGLTPLSLAKENWRKPIILTTDDRRKEWQGKELHGRFYRALHGPDVDFLASVSWLRSGDLFGETEGFVCAIMDEVMMTNNYRRFIVKDGTVDICRACHRPGESIRHIISGCSRLANGEYLHRHNLVARIIHQQLALKYNLVESEVPYYRYVPDPVLVNGSITLYWDQSIITDRTVIANRPDIVVMDRSERRAMIVDITVPHDENLVKAEKDKQIKYLDLAREVVDMWEVDSAIIVPIVVSAHGLIAKSLDQHLRRLSLGSWIKGLIQKAVLLDTARIVRRFLSLEP

SEQ ID NO: 12572 - protein, 1198 aa, Xestia c-nigrum
MLTRAAARRARLPPPDPSLSSASPPPEPSPIVSAVTPAVAVASSSSDEYFSPPTTPPPARRRGGRRPPDGLGPRGPPASDRVPAPGGSVQRMRWTQSNNENVMRAYYGATEGGNNLTAYRVRMLSLFQVLEPAVNVSAQRLSDQVRVIQRNRMLNDTVLDRLRTEMHSSHVIATPPSQAVVLPQSTTITYRDDDVSSDMITNVGTQYSEDMRSALEGAIREYRFMTPELRPRLPRLPMHNKNRMLVAVLDSQLSNYFDNCEDLTDVHSILYCAAVAACRVARVKFSDDRATRPKPAVPAWQYRIEQRIGGARALIGKLICFREGNTRPRVMRFVRRAFSGTDINPRDYMSRVTERIDFLKQKVYAWASRIRRYKRRVDRYTQNRTFQRDERWVYRAWERPDQGVADTRLPDDDAMCSFWRSIWSVPVSHAEGEWTRVIERACDPVPEMGAITISPQDVACAVRPLPNWKSPGPDGLHNFWIKWFTRSHARLATLFQSALESGSLPEFLTTGITHLLHKSGSTAEPKNYRPITCLPTVYKVLTSILRTKICKHVDDNSVMSASQNGCRNGSRGTKELLLIDMAISQQVRRSRKDLSTCWIDYKKAYDSVPHTWLMRVLELYKVDATLRTFLMSCMGQWRTVLRYPGCRQIQRNSEPIRIERGIFQGDSLSPLWFCLALNPLSTLLEDSGLGYQLRKDGRVISHLLYMDDLKLFAPNDLQLMELLKVTETFSSAIRMEFGVDKCAVLHVKRGEIVESVGTQLSDSINLRSLSATETYKYLGMSEALGINVAGMKQSLKERFFGRLKKVFNSLLSGGNKVRAFNGWVMPVLMYSFGILKWTQTELDALDTKVRKLLTAFRMHHPRSSVMRLYIPRKCGGRGFLNAKTLHNREICSLRDYFLEADVGMHRDVVAMDKGLTPLSLAKENWRKPIILTTDDRRKEWQGKELHGRFYRALHGPDVDFLASVSWLRSGDLFGETEGFVCAIMDEVMMTNNYRRFIVKDGTVDICRACHRPGESIRHIISGCSRLANGEYLHRHNLVARIIHQQLALKYNLVESEVPYYRYVPDPVLVNGSITLYWDQSIITDRTVIANRPDIVVMDRSERRAMIVDITVPHDENLVKAEKDKQIKYLDLAREVVDMWEVDSAIIVPIVVSAHGLIAKSLDQHLRRLSLGSWIKGLIQKAVLLDTARIVRRFLSLEP

SEQ ID NO: 12573 - protein, 1198 aa, Xestia c-nigrum
MLTRSAARRALLPPPDPSLSSASPPPEPSPIVSAVTPAVAVASSSSDEYFSPPTTPPPARRRGGRRPPDGLGPRGPPASDRVPVPGGSVQRMRWMQSNNENVMRAYYGATEGGNNLTAYRVRMLSLFQVLEPAVNVSAQRLSDQVRVIQRNRMLDDTVLDRLRTEVQSSHVTATPPSQAVVPPQSTVITDRDDDVCSDMITNVATQCSEDMRSALEGAIREYRFVTPELRPRLPRLPMNNKNRMLVAVLDSQLSNYFDDCEDLTDVHSVLYCAAVAACRVARVKFSDDRATRPKPAVPAWQYRIEQRIGGARALIGKLICFREGNTRPRVMRFVRRAFSGTDISPRDYMSRVTERIDFLKQKVYAWASRIRRYKRRVDRYTQNRTFQRDERWVYRAWERPDQGVADTHLPDDDAMCSFWRSIWSVPVSHAEGEWTRVIERACDPVPEMGAITISPQDAACAVRPLPNWKSPGPDGLHNFWIKWFTGSHARLATLFQSALESGSLPEFLTTGLTHLLHKSGSTAEPKNYRPITCLPTVYKVLTSILRTKICKHIDDNSVMSASQNGCRNGSRGTKELLLIDMAISQQVRRSRKDLSTCWIDYKKAYDSVPHTWLMRVLELYKVDATLRTFLMSCMRQWRTVLRYPGCRQIQRNSEPIRIERGIFQGDSLSPLWFCLALNPLSTLLEDSGLGYQLRKDGRVISHLLYMDDLKLFAPNDLQLMELLKVTETFSSAIRMEFGVDKCAVMHVKRGEIVESVGTQLSDSINLRSLSATETYKYLGMSEALGINVADMKQSLKERFFGRLKKVFNSLLSGGNKVRAFNGWVMPVLMYSFGILEWTQTELDALDTKVRKLLTAFRMHHPRSSVMRLYIPWKCGGRVFLNAKTLHNREICSLREYFQEADVEMHRDVVAMDKGLTPLSLAKENWRKPIVLTTDDRRKEWQGKELHGRFYRALHGPDVDFLAFVSWLRSGDLFGETEGFVCAIMDEVMMTNNYRRFIVKDGTVDICRACHRPGESIRHIISGCSRLANGEYLHRHNLVARIIHQQLALKYNLVESEVPYYRYVPDPVLVNGNITLYWDQSIITDRTVIANRPDIVVMDRSERRAMIVDITVPHDENLVKAEKDKQIKYLDLAREVVVMWEVDSAIIVPIVVSAHGLIAKSLDQHLRRLSLGSWIKGLIQKAVLLDTARIVRRFFSLEP

SEQ ID NO: 12574 - protein, 1197 aa, Griposia aprilina
MLTRSAALRARLPTPDSSLSSASPPPVSSPIVSAVTTPAAVVASSSSDEYFSPPTTPPPARRRGGHRPPDGLGPRGPPASDRVPAPGGSVQRMRWTQSINENVMRSYYGATEGGNNLTAYRVRMLSLFQVLEPAVNVSAQRLSDQVRVIQRNHMLDDTVLDRLRSEMQSSHVITPPSQTVVVLPQPITSHDEGSDDRATNVSTQCNEELRSALEDAIREYRFISPELRPPLPRLPMHNKNRVLVAALDAQLSNYFDDCVDLTDTHSILYCAAVATCRVAHVKFANDSRATRPKPAVPAWQCRIERRIGGARALIGKLICFREGNTRPRVMRFVRRAFTGTNISPQDYMSCVTERIDFLKQKVYAWANRIRRYKRRVERYTQNRTFQRDERWVYRDWERPDQGVADTYLPDDDAMCSFWHNIWSVPVSHTEGDWTREVERACEPIPEMGAITICPQDVARAVRPLPNWKSPGPDGLHNFWIKWFLRSHARLAAQFQAALESGSLPQFLTTGVTHLLHKSASIAEPKNYRPITCLPTVYKVLTSILRAKINKHIDTNSIMSASQNGCRNGSRGTKELLLIDMAISQQVRRSRKDLSTCWIDYKKAYDSVPHTWLMRVLELYKVDATLRTFLKSCMGQWRTVLRYPTCRNTQRNSEPIRIERGIFQGDSLSPLWFCLALNPLSTLLEDSGLGYRLRRGGRVISHLLYMDDLKLFAPNNLQLIELLKVTETFSSAIRMEFGLDKCAVMHVKRGEIVESVGIQLSDSMNLRALSASETYKYLGMSEALGVNNTDMKQSLKERFFARLKKVFNSLLSGGNKVRAFNGWVMPVLMYSFGILKWTQTELDTLDRRVRTLLTANRMHHPRSSVMRLYIPRKCGGRGFLNAKTLHNREICSLREYFLEADVGMHRDVVAVDKGLTPLSLAKENWRKPVVLDTNDRMEVWQSKELHGRFFRALHGPDVDVQASVAWLRFGDLFGETEGFVCAIMDEVMMTNNYRRFIVKDGTVDICRACHRPGESIRHIISGCSRLANEEYLHRHNLVARIIHQQLALKYSFVESEVPYYRYVPDPVLENGTITLYWDRSIITDRTIIANKPDIVLVDRRERRAMIVDITIPHDGNLVKAEKDKQIKYLDLAREVVDMWDVDSAIIVPIVVTANGLIAKSLDQHLRRLSLGSWIKGLIQKAVLLDTARIVRRFLSLEP

SEQ ID NO: 12575 - protein, 1198 aa, Griposia aprilina
MLTRSAARRARPPPPDSSLSSASLPPVSSPTVSAVTTPAAVVASSSSDEYFSPPTTPPPVRRRGGHRPPDGLGPRGPPASDRVPAPGGSVQRMRWTRSINENVMRSYYGATEGGNNLTAYRVRMLSLFQVLEPAVNVSAQRLSDQVRVIQRNHMLDDTVLDRLRNEMQSSHVIAPPSQTVVVLPQSNTSQADEESDDRATNVSTQCNDELRSALEDAIREYRFISPELRPRLPRLPMHNKNRVLVAALDAQLSNYFDDCVDLTDTHSILYCAAVAACRVAHVKFANDSRATRPKPAVPAWQCRIERRIGEARALIGKLICFREGNTRPRVMRFVRRAFAGTNISPQDYMSCVTERIDFLKQKVYAWANRIRRYKRRVERHTQNRTFQRDERWVYRGWERPDQGVADTCLPDDDAMCSFWRNIWSVPVSHTEGDWTREVERACDPIPEMGAITICPQDVTRAVRPLPNWKSPGPDGLHNFWIKWFGRSHARLAAQYQVALESGSLPQFLTTGVTHLLHKSGSTAEPKNYRPIACLPTVYKVLTSILRDKINKHIDTNYIMSPSQNGCRNGSRGTKELLLIDMAISQQVRRSRKDLSTCWIDYKKAYDSVPHTWLMRVLELYKVEATLRTFLMSCMGQWRTVLHYPACRNTQRNSEPIRIERGIFQGDSLSPLWFCLALNPLSTLLEDSGLGYRLRRGGQVISHLLYMDDLKLFAPNNSQLMDLLKVTETFSSAIRMEFGVDKCAVMHVKRGEIVESVGTQLSDSINLRALSASETYKYLGMSEALGINGTDMKQSLKDRFFGRLKKVFNSLLSGGNKVRAFNGWVMPVLMYSFGILKWTQTELDALDRKVRTLLTANRMHHPRSSVMRLYIPRKCGGRGFLNAKTLHNREICSLREYFLEADVGMHRDVVTVDKGLTPLSLAKENWRKPVVLDTNDRMEVWQSKELHGRFFRALHGPDVDQLASVAWLRFGDLFGETEGFVCAIMDEVMMTNNYRRFIVKDGTVDICRACHSPGESIRHIISGCSRLANEEYLHRHNLVARIIHQQLALKYSLVESEVPYYRYVPDPVLENGHITLYWDRSIITDRTIVANKPDIVMVDRLERRAMIVDITVPHDGNLVKAEKDKQIKYLDLAREVVDMWDVDSAIIVPIVVTANGLIAKSLDQHLRRLSLGSWIKGLIQKAVLLDTARIVRRFLSLEP

SEQ ID NO: 12576 - protein, 1199 aa, Griposia aprilina
MMLTRSAKRRAHPPPPDSSLSSASPPPVSSPTVSAVTTPAAVVASSSSDEYFSPPTTPPPVRRRGGHRPPDGLGPRGPPASDRVPAPGGSVQRMRWTRSINENVMRSYYGATEGGNNLTAYRVRMLSLFQVLEPAVNVSVQRLSDQVRVIQRNHMFDDTVLDRLRNEMQSSHVIAPPSQTVVVLPQSNTSQADEESDDRATNVSTQCNDELRSALEDAIREYRFISPELRPRLPRLPMHNKNRVLVAALDAQLSNYFDDCVDLTDTHSILYCAAVAACRVAHIKFADDSRPTRPKPAVPAWQCRIERRIGGARALIGKLICFREGNTRPRVMRFVRRAFAGTNISPQDYMSCPTERIDFLKQKVYAWANRIRRYKRRVERYTQNRTFQRDERWVYRGWERPDQGVADTCLPDDDAMCSFWRNIWSVPVSHTEGDWSREVERACDPIPEMGAISICPQDVTRAVRPLPNWKSPGPDGLQNFWIKWFGRSHARLAAQYQVAIESGSLPQFLTTGVTHLLHKSGSTAEPKNYRPITCLPTVYKVLTSILRAKINKHIDTNSIMSPSQNGCRNGSRGTKELLLIDMAISQQVRRSRKDLSTCWIDYKKAYDSVPHTWLVRVLELYKVDATLRTFLKSCMGQWRTILHYPGCRNIQRDNEPIRIERGIFQGDSLSPLWFCLALNPLSTLLEDSGLGYRLRRGGQVISHLLYMDDLKLFAPNNLQLMELLKVTETFSSAIRMEFGVDKCAVMHVKRGEIVESVGTQLSYSINLRALSASDTYKYLGMSEALGINGTDMKQSLKERFFGRLKKVFNSLLSGGNKVRAFNGWVMPVLMYSFGILKWTQTELDALDRKVRTLLTANRMHHPRSSVMRLYIPRKCGGRGFLNAKTLHNREICSLREYFLEADVGMHTDVVKVDKGLTPLSLAKENWRKPVVLDTNDRMEVWQSKELHGRFFRALHGPDVDQLASVAWLRFGDLFGETEGFVCAIMDEVILTNNYRRHIMKDGTVDVCRACHRPGESIRHIISGCSRLANEEYLHRHNLVARIIHQQLALKYSLVESEVPYYRYVPDPVLENGHITLYWDRSIITDRTIVANKPDIVVVDRLERRAMIVDITVPHDGNLVKAEKDKQIKYLDLAREVVDMWDVDSAIIVPIVVTANGLIAKSLDQHLRRLSLGSWIKGLIQKAVLLDTARIVRRFLSLEP

SEQ ID NO: 12577 - protein, 1019 aa, Griposia aprilina
MLDDTVLDRLRNEMQSSHVIAPPSQTVVVLPQSKTSQADEESDDRATNVSTQCNDELRSALEDAIREYRFISPELKPRLPRLPMHNKNRALVVALDAQLSNYFDDCVDLTDTHSILYCAAVAACRIAHVKFANDSRATRPKPNVPAWQCRIERRIGGARALIGKLICFREGNTRPRVMRFVRRAFAGTDISPQDYMSCVTERIDFLKQKVYAWANRIRRYKRRVERYTQNRTFQRDERWVYRGWERPDQGVADTCLPDDDAMCSFWRNIWSVPVSHTEGDWTREVERACDPIPEMGAITICPQDVTRAVRPLPNWKSPGPDGLHNFWIKWFGRSHARLAAQYQVALECGSLPQFLTTGVTHLLHKSGSTAEPKNYRPIACLPTVYKVLTSILRDKINKHIYTNYIMSPSQNGCRNGSRGTKELLLIHMAISQQVRRSRKDLSTCWIDYKKAYDSVPHTWLMRVLELYKVEATLRTFLMSCMGQWRTVLRYPACRNTQRNSEPKRIERGIFQGDSLSPLWFCLALNPLSTLLEDSGLGYRLRRGGQVISHLLYMDDLKLFAPNNSQLMDLLKVTGTFSSAIRMEFGVDKCAVMHVKRGEIVESVGTQLSDSINLRALSASETYKYLGMSEALGINGTDMKQSLKDRFFGRLKKVFNSLLSGGNKVRAFNGWVMPVLMYSFGILKWTQTELDALDRKVRTLLTANRMHHPRSSVMRLYIPRKCGGRGFLNAKTLHNRKICSLREYFLEADVGMHRDVVTVDKGLTPLSLAKENWRKPVVLDTNDRMEVWQSKELHGRFFRALHGPDVDQVASVAWLRFGDLFGETEGFVCAIMDEVMMTNNYRRFIVKDGTVDICRACHRPGESIRHIISGCSRLANEDYLHRHNLVARIIHQQLALKYSLVESEVPYYRYVPDPVLENGHITLYWDRSIITDRTIVANKPGIVMVDRLERRAMIVDITVPHDGNLVKAEKDKQIKYLDLAREVVDMCDVDSAIIVPIVVTANGLIAKSLDQHLRRLSLGS

SEQ ID NO: 12578 - protein, 1199 aa, Griposia aprilina
MMLTRSAKRRAHPPPPDSSLSSASPPPVSSPTVSAVTTPAAVVASSSSDEYFSPPTTPPPVRRRGGHRPPDGLGPRGPPASDRVPAPGGSVQRMRWTRSINENVMHSYYGATEGGNNLTAYRVRMLSLFQVLEPAVNVSAQRLSDQVRVIQRNHMLDDTVLDRLRNEMQSSHVIAPPSQTVVVLPQSNTSQADEESDDRATNVSTQCNDELRNALEDAIREYRFISPELRPRLPRLPMHNKNRVLVAALDAQLSNYFDDCVDLTDTHSILYCAAVAACRVAHIKFANDSRPTRPKPAVPAWQCRIERRIGGARALIGKLICFREGNTRPRVMRFVRRAFAGTNISPQDYMSCVTERIDFLKQKVYAWANRIRRYKRRVERYTQNRTFQRDERWVYRGWERPDQGVADTCLPDDDAMCSFWRNIWSVPVSHTEGDWGREVERACDPIPEMGAISICPQDVTRAVRPLPNWKSPGPDGLQNFWIKWFGRSHARLAAQYQVAIESGSLPQFLTTGVTHLLHKSGSTAEPKNYRPITCLPTVYKVLTSILRAKINKHIDTNSIMSPSQNGCRNGSRGTKELLLIDMAISQQVRRSRKDLSTCWIDYKKAYDSVPHTWLVRVLELYKVDATLRTFLKSCMGQWRTILHYPGCRNIQRDNEPIRIERGIFQGDSLSPLWFCLALNPLSTLLEDSGLGYRLRRGGQVISHLLYMDDLKLFAPNNLQLMELLKVTETFSSAIRMEFGVDKCAVMHVKRGEIVESVGTQLSYSINLRALSASDTYKYLGMSEALGINGTDMKQSLKERFFGRLKKVFNSLLSGGNKVRAFNGWVMPVLMYSFGILKWTQTELDALDRKVRTLLTANRMHHPRSSVMRLYIPRKCGGRGFLNAKTLHNREICSLREYFLEADVGMHTDVVKVDKGLTPLSLAKENWRKPVVLDTNDRMEVWQSKELHGRFFRALHEPDVDQLASVAWLRFGDLFGETEGFVCAIMDEVILTNNYRRHIMKDGTVDVCRACHRPGESIRHIISGCSRLANEEYLHRHNLVARIIHQQLALKYSLVESEVPYYRYVPDPVLENGHITLYWDRSIITDRTIVANKPDIVVVDRLERRAMIVDITVPHDGNLVKAEKDKQIKYLDLAREVVDMWDVDSAIIVPIVVTANGLIAKSLDQHLRRLSLGSWIKGLIQKAVLLDTARIVRRFLSLEP

SEQ ID NO: 12579 - protein, 1138 aa, Omphaloscelis lunosa
MLTRSAARRARLPPPDSPLSSASSPPVLSPTVNAVMTPAAAVASSSSDEYFSPPTTPPPARRRGRRRPPDGLGPRGPPASDRVPAPGGSVQRMRWTRSINENVMRSYYGATEGGNNLTAYRVRMLSLFQVLEPAVNVSAQRLSDQVRVIQRNHMLDDTVLDRLRSEMQSSHVIAPPVRSVIVPSQIITSQADERIDDRATNVSTQCNEELRSALEGAIHEYRFMSPELRPRLPRLPMHNKNKALVAALDSQLSNYFDDCEDLTDTHSILYCAAVAVCRVAHVKFSNDSRATRPKPAVPAWQCRIERRIGGARTLIGKLICFREGNTRPRVMRFVRRAFLGTDISPQDYMTRVTERIDFLKQKVYAWANRIRRYKRRVERYTQNRTFQSDERWVYRAWERPNQGVTDTHLPDEDAMCSFWRSIWSVPVSHTEGDWTREVERACDSIPEMGAITICPQDVARAVRPLPNWKSPGPDGLHNFWIKWFVRSHARLAAQYQTALESGSLPQFLTTGVTHLLHKSGSTAEPKNYRPITCLPTVYKVLTSVLRAKINKHIDTNSIMSASQNGCRNGSRGTKELLLIDMAISQQVRRSRKDLSTCWIDYKKAYDSVPHTWLMRVLELYKVDITLRTFLMSCMGQWRTVLRYPGCRNIQRNSEPIRIERGIFQGDSLSPLWFCLALNPLSTLLEDSGLGYRLRRGGQVISHLLYMDDLKLFAPNNLQLMELLKVTETFSSAIRMEFGVDKCAVMHVKRGKIMESVGTQLSDSINLRALSASETYKYLGMSEALGINVTDMKQSLKERFFGRLKKVLNSLLSGGNKVRAFNGWVMPVLMYSFGILKWSQTELDALDRRVRTLLTAYRMHHPRSSVMRLYIPRKCGGRGFLNAKTLHNREICSLREYFLEADVGMHRDVVVVDKGLTPLSLAKENWRKPVVLDTKNRMEIWQSKELHGRYFRALHGPDVDLPASVAWLRCGDLFGETEGFVCAIMDEVMMTNNYRRFIVKDDTVDICRACHRPGESIRHIISGCSCLANEEYLHRHNLVARIIHQQLALKYSLVESEVPYYRYVPDPVLENGNITLYWDRSIITDRTIVANKPDIVVVDRGERSAMIIDITVPHDENLVKAEKDKQIKYLDLAREVVDM

SEQ ID NO: 12580 - protein, 1201 aa, Omphaloscelis lunosa
MLTRLAARRARLPPPDSPLSSASSPPVRSPTVNAVRTPAAAVASSSSDEYFSPPTTPPPACRRGRRRPPDGLGPRGPPASDRVPAPGGSVQRMRWTRSINENVMRSYYGATEGGNNLTAYRVRMLSLFQVLEPAVNVSAQRLSDQVRVIQRNHMLDDTVLDRLRSEMQSSHVIAPPLRSVIIPSQMSSVITSQADERIDDRATNVSTQCNEDLRSALEGAIQEYRFMSPELRPRLPRLPMHNKNKALVAVLDSQLSNYFDDCEDLTDTHSILYCAAVAVCRVAHLKFSNDSRATRPKPAAPAWQCRIERRIGGARTLIGKLICFREGNTRPRVMRFVRRAFLGTDISPQDYMTRATERIDFLKQKVYAWANRIRRYKRRVERYTQNRTFQSDERWVYRAWERPDQGVADTHLPDDDAMCSFWRSIWSVPVSHTEGGWTREVERACDPIPEMGAITICPQDVARAVRPLPNWKSPGPDGLHNFWIKWFVRSHARLAAQYQTALESGSLPQFLTTGVTHLLHKSGSTAEPKNYRPITCLPTVYKVLTSILRAKINKHIDTNSIMSASQNGCKNGSRGTKELLLIDMAISQQVRRSRKDLSTCWIDYKKAYDSVPHTWLMRVLELYKVHTTLRTFLMSCMRQWRTVLRYPGCRNIQRNSEPIRIERGIFQGDSLSPLWFCLALNPLSTLLEDSGLGYRLRRGGQVISHLLYMDDLKLFAPNNLQLMKLLKVTETFSSAIRMEFGVDKCAVMHVKRGEIMESVGTQLSDSINLRALSASETYKYLGMSEALGINVTDMKQSLKERFFGRLKKVLNSLLSGGNKVRAFNGWVMPVLMYSFGILKWTQTELDALDRRVRTLLTAYRMHHPRSSVMRLYIPRKCGGRGFLNAKTLHNREICSLREYFLGVDVGMHRDVVVVDKGLTPLSLAKENWRKPVVLDTKDRMEIWQSKELHGRYFRALHGPDVDLPASVTWLRFGDLFGETEGFVCAIMDEVMMTNNYRRFIVKDGTVDICRACHRPGESIRHIISGCSRLANEEYLHRHNLVARIIHQQLALKYSLVESEVPYYRYVPDPVLENGNITLYWDRSIITDRTIAANKPDIVVVDRGERRTMIIDITVPHDENLVKAEKDKQIKYLDLAREVVDMWDVDSAIIVPIVVTANGLIAKSLDQHLRRLSLGSWIKGLIQRAVLLDTARIVRRFLSLEP

SEQ ID NO: 12581 - protein, 1095 aa, Omphaloscelis lunosa
MRSYYGATEGGINLTAYRVRMLSLFQVLEPAVNVSAQRLSDQVRVIQRNHMLDDTVLDRLRSEMQSSHVIAPPVRSVIIPSQIITSQADERIDDRATNVSTQCNEELRSALEGAIQEYRFMSPELRPRLPRLPMHNKNKALVAVLDSQLSNYFDDCEDLTDTHSILYCAAVAACRVAHVKFANDSRATRPKPAAPAWQCRIERRIGGARTLIGKLICFREGNTRPRVMRFVRRAFLGTDISPQDYLTRVTERIDFLKQKVYAWANRIRRYKRRVERYTQNRTFQSDERWVYRAWERPDQGVADTHRPDDDAMCSFWRSIWSVPVNHTEGDWTREVERACDPIPEMGAITICPQDVARAVRPLPNWKSPGPDGLHNFWIKWFLRSQARLAAQYQTALESGSLPQFLTTGVTHLLHKSGSTAEPKNYRPITCLPTVYKVLTSILRAKINKHIDTNSIMSASQNGCRNGSRGTKELLLIDMAINQQVRRSRKDLSTCWIDYKKAYDSVPHTWLMRVLELYKVDTTLRTFLMSCMGQWRTVLRYPGCRNIQRNSEPIRIERGIFQGDSLSPLWFCLALNPLSTLLEASGLGYRLRRGGQVISHLLYMDDLKLFAPNNLQLMELLKVTETFSNAIRMEFGVDKCAVMHVKRGEIVEPVGTQLSDSINLRALSASETYKYLGMSEALGINVTDMKQSLKERFFGRLKKVLNSLLSGGHKVRAFNGWVMPVLIYSFGILKWTQTELDALDRRVRTLLTAYRMHHPRSSVMRLYIPRKCGGRGFLNAKTLHNREICSLREYFLGVDVGMHRDVVVVDKGLTPLSLAKENWRKPVVLDTKDRMEIWQSKELHGRYFRALHGPDVDLPASETWLCFGDLFGETEGFVCAIMDEVMMTNNYRRFIVKDGTVDICRACHRPGESIRHIISGCSRLANEEYLHRHNLVARIIHQQLALKYSLVESEVPYYRYVPDPVLENGNITLYWDRSIITDRTIVANKPDIVVVDRGERRTMIIDITVPHDENLVKAEKDKQIKYLDLAREVVDMWDVDSAIIVPIVVTANGLIAKSLDQHLRRLSLGSWIKGLIQRAVLLDTARIVRRFLSLEP

SEQ ID NO: 12582 - protein, 1197 aa, Sesamia nonagrioides
MLTKSAARRARPPSPDSLPSSASPPPASSTTVSAVTTPAATVASSSSDEYFSPPTTPPPVRRRGGRRPPDCLGPRGPSASDRVPAPGGSVQRMRWTQSINENVMRSYYGATEGGNNLTAYRVRMLSLFQVLEPAVNVSAQRLSDQVRVIQRNHMLDDTVLDRLRNEMQSSRTITHQSQSAEIPPQSTNYADEGSNDRATNVSTQCNEELRNALEAVIREYRFMSAELRPRLPRLPMHNRNRALMAALDAQLSNYFDTCENLTDTHSILYCAAVAACRVSHVKFSSDSRATRPKPVVPAWQHRIERRIGGARALIGKLICFRKGNTRPRVMRFVRRAFAGKNISPQNYMARVTERIDFLKQKVYAWANRIRRYKRRVERYTQNRTFQSNERWVYRDWERPEQGVADTCLPDDDAMCSFWRSIWSVPVSHTEGNWARDVERACDPIPEMGAITICPQDVARAVRPLPNWKSPGPDGLHNFWIKWFPRSHASLASQFQSALVSGSLPQFLTTGITHLLHKSGSTAEPKNYRPITCLPTVYKVLTSILKAKINNHIDSNSIMSVSQNGCRSGSRGTKELHLIDMAISQQVRRSRKDLSTCWIDYKKAYDSVPHTWLMRVLELYKVDTTLRTFLMTCMGQWRTVLRYPGCRNIQRNSEPIRIERGIFQGDSLSPLWFCIALNPLSTLLEDSGLGYRLRRGGQVISHLLYMDDLKLFAPNNLQLKELLKITETFSSAIRMEFGVDKCAVMHIKRGEIVESVGTQLTSSINLRALSASETYKYLGMSEALGINVTDMKQSLKERFFGRLKKVLNSLLSGSNKVRAFNSWVMPVLMYSFGILKWTQTELDALDQRVRTLLTANRLHHPRSSVMRLYIPRKCEGRGFLNAKTLHNREICSLREYFLETDVGMHRDVVAVDKGLTPFSLAKENWRKPVVLDTNDRMEVWKSKELHGRFFRALHGPDVDLQASVAWLRFGDLFGETEGFVCAIMDEVMMTNNYRRFIVKDGTVDICRACHRPGESIRHIISGCSRLANGEYLHRHNLVARIIHQQLALKYKLVESEVPYYRYKPDPVLENGHITLYWDRSIITDRTIVANKPDIVMVDRSERRAMIVDITIPHDENLVKAEKDKQIKYLDLAHEVVDMWEVDSAIIVPIVVTANGLIAKSLDQHLRRLSLGSWIKGLIQKAVLLDTARIVRKFLSLEP

SEQ ID NO: 12583 - protein, 1201 aa, Sesamia nonagrioides
MLTRSAARKCARPPSPDSLLSSASPPPVSSPTVSAVTTPAAAVASSSSDEYFSPPTTPPPVRRRGGRRPPDRLGPRGPSASDRVPAPGGSVQRMRWTQSINENVMRSYYGATEGGNNLTAYRVRMLSLFQVLEPAVNVSAQRLSDQVRVIQRNHMLDDVVLDRLRLESRNSHVTPASSLVAVQLNSVSPRPNRVDEEDDDRAISVSPQCIEKLRSALEDAFCEYRSTPPELRPRLPRLPMHKKNKALVCALDSQLSYYLKDSKDLTDTHSILYCGAVAICRVAHVKFPDSDRATRPKSAVPAWQCRIERRIGETRALIGKLTSFREGNTRPRVMRFVRRAFSGTDTSTRDYLFRVTERIDFFKQKIYAWANRIRRYKRRVERYSQNRNFQSDERRVYRAWERSDQGVTDTCLPDDDAMCSFWRNIWSVPVSHTEGSWTRVVERACDPVPEMGAITICPQDVARAVRPLPNWKSPGPDGLHNFWIKWFSGSHARLASQFQTALESGSLPQFLTTGVTHLLHKSGSTAEPKNYRPITCLPTVYKVLTSILKSKINTHIDSNSIMSASQNGCRSGSRGTKELLLIDMAISQQVRRSRKDLSTCWIDYKKAYDSVPHTWLMRVLELYKVDATLRTFLMTCMRTWRTVLRYPGCRNIQRNSEPIRIERGIFQGDSLSPLWFCLALNPLSTLLEDSGLGYRLRRGGQVISHLLYMDDLKLFAHTDSQLKELLKITETFSSSIRMEFGVDKCAVMHVKRGEIMESVGTQLTSSINLRALSASETYKYLGMSEALGINVTDMKQSLKERFFGRLKKVLNSLLSGGNKVRAFNGWVMPVLMYSFGILKWTQTELDALDQRVRTLLTANRLHHPRSSVMRLYIPRKCGGRGFLNAKTLHNREVCSLREYFLETDVGMHRDVVAADKGLTPLSLAKENWRKPVVLDTNDRLEVWKSKELHGRFFRALHGPDVDFRASVAWLRFGDLFGETEGFVFAIMDEVMMTNNYRRFIVKDGTVDICRACHRPGESIRHIISGCSRLANGEYLHRHNLVARIIHQQLALKYNLVESEVPYYRYMPDPVLENGHITLYWDRSIITDRTIVANKPDIVLVDRSERRAMIVDITIPHDENLVKAEKDKQIKYLDLAHEVVDMWEVDSAIIVPIVVTANGLIAKSLDQHLRRLSLGSWIKGLIQKAVLLDTARIVRKFLSLEP

SEQ ID NO: 12584 - protein, 983 aa, Sesamia nonagrioides
MLSVSTALLRLNLDHVYLDCPCIKKNKALVCALDSQLSNYLKDSKDLADTHSILYCGAVAICRVAHVKFPDSDRATRPKPAVPAWQCRIERRIGETRALIGKLISFREGNTRPRVMRFVRRAFSGTDVSTRDYLLRVTERIDFLIQKIYAWANRIRRYRRRVERYSQNRNFQSDERWVYRAWERSDQGVTDTCLPDDDATRSFWRNIWSVPVSHTEGGWTRDVERACDPVPEMGAITICPQDVARAVRPLPNWKSPGSDGLHNFWIKWLSGSHACLASQFQTALESGSLPQFLTTGITHLLHKSGSTAETKNYRPITCLPTVYKVLTSILKAKINTHIDSNSIMSASQNGCRNGSRGTKELLLIDMAISQQVRRSRKDLSTCWIDYKKAYDSVPHTWLMRVLELYKVDATLRTFLMTCMSQWRTVLRYPGCRNIQRNSEPIRIERGLFQGDSLSPLWFCLALNPLSTLLEDSGLGYRLRRGGQVISHLLYMDDLKLFAHTNSQLKELLKITETFSSAIRMEFGVDKCAVMHVKRGEIVESVGTQLTGSINLRSLSASETYKYLGMSEALGINVTDMKQSLKERFFGRLKKVLNSLLSGGNKVRAFNGWVMPVLMYSFGILKWTQTELDALDQRVRTLLTANRLHHPRSSVMRLYIPRKCGGRGFLNAKTLHNREVCSLREYFLKTDVGMHRDVVAVDKGLTPLSLAKENWRKPVVLETNDRMEVWQSKELHGRFFRALRGPDVDFQASVAWLRYGDLFGETEGFVCAIMDEVMMTNNYRKFIVKDGTVDICRACHRPGESIRHIISGCSRLANGEYLHRHNLVARIIHQQLALKYNLVESEVPYYRYMPDPVLENGHITLYWDRSIITDRTIFANKPDIVMVDRSERRAMIVDITIPHDENLVKAEKDKQIKYLDLAHEVVDMWEVDSAIIVPIVVTANGLIAKNLDQHLRRLSLGGWIKGLIQKAVLLDTARIVRKFFSLEP

SEQ ID NO: 12585 - protein, 1147 aa, Sesamia nonagrioides
MLTRSAARRARPPSPDSLLSSASPPPASSATVSAVTTPAAAVASSSSDEYFSPPTTPPPARRRGGRRPPDRLGPRGPSASDRVPAPGGSVQRMRWTQSINENVMRSYYGATEGGNNLTAYRVRMLSLFQVLEPAVNVSAQRLSDQVRVIQRNHMLDDTVLDRLRNEMQSSRIIAHQSQTAEIPPQPTNYADEGSNDRATNVSTQCNEELINALEAAIREYRFTPAELRPRLPRLPMHNRNRALMAALDAQLSDYFDTCEDLTDTHSILYCAAVAACRVAHVKFPSDSRATRPKPVVPAWQHRIERRIGGARALIGKLICFREGNTRPRVMRFVRRAFAGTNISPQNYMARVTERIDFLKQKVYAWANRIRRYKRRVERYTQNRTFQSNERWVYRDWERPEQGVTDTCLPDDDAMCSFWRSIWSVPVSHTEGDWARDVERACDPIPEMGAITICPQDVACAVRPLPNWKSPGPDGLHNFWIKWFPRSHARLASQFQTALVSGSLPQFLTTGITHLLHKSGSTAEPKNYRPITCLPTVYKVLTSILKTKINKHIDSNSIMSASQNGCKSGSRGTKELLLIDMAISQQVRRSRKDLSTCWIDYRKAYDSVPHTWLMRVLELYKVDATLRTFLMSCMKTWRTVLRYPGCRNIQRNSEPIRIERGIFQGDSLSPLWFCLALNPLSTLLEDSGLGYRLRRGGQVISHLLYMDDLKLFAPNNSQLRELLKITETFSSSIRMEFGVDKCAVMHVKRGEIMESVGTQLTDSINLRALSASETYKYLGMSEALGINVTDMKQSLKERFFGRLKKVLNSLLSGGNKVRAFNGWVMPVLMYSFGILKWTQTELDALDQRVRTLLTANRLHHPRSSVMRLYIPRKCGGRGFLNAKTLHNREVCSLRDYFLVNDVGMHRDVVAADKGLTPLSLAKENWRKPVVLDTNDRMEVWKSKELHGRFFRALHGPDVDLQASVAWLRFGDLFGETEGFVFAIMDEVMMTNNYRRFIVKDGTVDICRACHRPGESIRHIISGCSRLANGEYLHRHNLVARIIHQQLALKYNLVESEVPYYRYTPDPVLENGYITLYWDRSIITDRTIVANKPDIVMVDRSERRAMIVDITIPHDENLVKAEKDKQIKYLDLAHEVVDMWEVIQQSLYR

SEQ ID NO: 12586 - protein, 1200 aa, Sesamia nonagrioides
MLTRSAARRARSPPPDSSPSSASPPPVSSPTVNAVMTPAAAVALSSSDEYFSPPTTPPPVRRRGGRRPPDCLGPRGPPASDRAPATGGNVQRMKWTQSINENVMRAYFGATEGGSNLTAYRGRMLSLFQVLEPAVNVSAQRLSDQVRVIQRNHMLDDVVLDRLRLESRNSHVTPASSLVAVQLNSVPSRPNLVDEEDDDEAISVTPQCNEKVRSALEDAFREYRSTPPEFRPRLPRLPMHKKNKALVCALDSQLSNYLKDSKDLADTHSILYCGAVAICRLAHVKFPDSDRATRPKPAVPAWQCRIERRIGETRALIGKLISFREGNTRPRVMRFVRRAFSGTDVSTRDYLLRVTERIDFLKQKIYAWANRIRRYRRRVERYSQNRNFQSDERWVYRAWERSDQGVTDTCLPDDDATRSFWRNIWSVPVSHTEGGWTRDVERACDPVPEMGAITICPQDVARAVRPLPNWKSPGPDGLHNFWIKWFSGSHACLASQFQTALESGSLPQFLTTGITHLLHKSGSTAEPKNYRPITCLPTVYKVLTSILKAKINTHIDSNSIMSASQNGCRNGSRGTKELLLIDMAISQQVRRSRKDLSTCWIDYKKAYDSVPHTWLMRVLELYKVDATLRTFLMTCMSQWRTVLRYPGCRNIQRNSEPIRIERGIFQGDSLSPLWFCLALNPLSTLLEDSGLGYRLRRGGQVISHLLYMDDLKLFAHTNSQLKELLKITETFSSAIRMEFGVDKCAVMHVQRGEIVESVGTQLTGSINLRSLSASETYKYLGMSEALGINVTDMKQSLKERFFGRLKKVLNSLLSGGNKVRAFNGWVMPVLMYSFGILKWTQTELDALDQRVRTLLTANRLHHPRSSVMRLYIPRKCGGRGFLNAKTLHNREVCSLREYFLKTDVGMHRDVVAVDKGLTPLSLAKENWRKPVVLETNDRMEVWQSKELHGRFFRALRGPDVDFQASVAWLRYGDLFGETEGFVFAIMDEVMMTNNYRKFIVKDGTVDICRACHRPGESIRHIISGCSRLANGEYLHRHNLVARIIHQQLALKYNLVESEVPYYRYMPDPVLENGHITLYWDRSIITDRTIVANKPDIVMVDRSERRAMIVDITIPHDENLVKAEKDKQIKYLDLAHEVVDMWEVDSAIIVPIVVTANGLIAKSLDQHLRRLSLGGWIKGLIQKAVLLDTARIVRKFLSLEP

SEQ ID NO: 12587 - protein, 1197 aa, Sesamia nonagrioides
MLTRSAARRARPPSPDSLLSSASPPPASSTTVSAVTTPAAAVALSSSDEYFSPPTTPPPARRRGGRRPPDRLGPRGPSASDRVPAPGGSVQRMRWTQSINENVMRSYYGATEGGNNLTAYRVRMLSLFQVLEPAVNVSAQRLSDQVRVIQRNHMLDDTVLDRLRNEMQSSRIIAHQSQTAEIPPQPTNYADEGSNDRATNVSTQCNEELINALEAAIREYRFTPAEQRPRLPRLPMHNRNRALMAALDAQLSDYFDTCEDLTDTHSILYCAAVAACRVAHVKFPSDSRATRPKPVVPAWQRRIERRIGGARALIGKLICFREGNTRPRVMRFVRRAFAGTNISPQNYMARVTERIDFLKQKVYAWANRIRRYKRRVERYTQNRTFQSNERWVYRDWERPEQGVTDTCLPDDDAMCSFWRSIWSVPVSHTEGDWARDVERACDPIPEMGAITICPQDVACAVRPLPNWKSPGPDGLHNFWIKWFPRSHARLASQFQTALVSGSLPQFLTTGITHLLHKSGSTAEPKNYRPITCLPTVYKVLTSILKTKINKHIDSNSIMSASQNGCKSGSRGTKELLLIDMAISQQVRRSRKDLSTCWIDYRKAYDSVPHTWLMRVLELYKVDATLRTFLMSCMKTWRTVLRYPGCRNIQRNSEPIRIERGIFQGDSLSPLWFCLALNPLSTLLEDSGLGYRLRRGGQVISHLLYMDDLKLFAPNNSQLRELLKITETFSSSIRMEFGVDKCAVMHVKRGEIMESVGTQLTDSINLRALSASETYKYLGMSEALGINVTDMKQSLKERFFGRLKKVLNSLLSGGNKVRAFNGWVMPVLMYSFGILKWTQTELDALDQRVRTLLTANRLHHPRSSVMRLYIPRKCGGRGFLNAKTLHNREVCSLRDYFLVTDVGMHRDVVAADKGLTPLSLAKENWRKPVVLDTNDRMEVWKSKELHGRFFRALHGPDVDFQASVAWLRFGDLFGETEGFVFAIMDEVMMTNNYRRFIVKDGTVDICRACHRPGESIRHIISGCSRLANGEYLHRHNLVARIIHQQLALKYNLVESEVPYYRYTPDPVLENGYITLYWDRSIITDRTIVANKPDIVMVDRSERRAMIVDITIPHDENLVKAEKDKQIKYLDLAHEVVDMWEVDSAIIVPIVVTANGLIAKSLDQHLRRLSLGSWIKGLIQKAVLLDTARIVRKFLSLEP

SEQ ID NO: 12588 - protein, 1044 aa, Sesamia nonagrioides
MLDDTALDRLRNEMQSSRVITHQSQSAEIPPQPTNYADEGSNDRATNVSTQCNEELRSALEAAIREYRFMSAELRPRLPRLPMHNRNRALMAALDAQLSNYFDTCENLTDTHSILYCAAVAACRVAHVKFPSDSRATRLKPVVPAWQHRIERRIGGARALIGKQICFREGNTRPRVMRFVRRAFSGTNTSPQNYMARITERIDFLKQKVYAWANRIRRYKRRVERFTQNRTFQSNQRWVYRDWDRPEQGVADTCLPDDDAMCSFWRSIWSVPVSHTEGDWARDVERACDPIPEMGAITICPQDVARAVRPLPNWKSPGPDGLHNFWIKWFPRSHASLASQFQTALVSGSLPQFLTTGITHLLHKSGSTAEPKNYRPITCLPTVYKVLTSILKAKINNHIDSNSIMSVSQNGCRSGSRGTKELLLIDMAISQQVRRSRKDLSTFWIDYKKAYDSVPHTWLMRVLELYKVDTTLRTFLMTCMGQWRTVLRYPGCRNIQRNSEPIRIERGIFQGDSLSPLWFCLALNPLSTLLEDSGLGYRLRRGGQVISHLLYMDDLKLFAPNNLQLKELLKITETFSSAIRMEFGVDKCAVMHIKRGEIVESVGSQLTSSINLRALSASETYKYLGMSEALGINVTDMKQSLKERFFGRLKKVLNSLLSGGNKVRAFNGWVMPVLMYSFGILKWTQTELDALDQRVRTLLTANRLHHPRSSVMRLYIPRKCGGRGFLNAKTLHNREICSLREYFLETDVGMHRDVVAVDKGLTPLPLAKENWRKPVVLDTNDRMEVWKSKELHGRFFRALHGPDVDLQASVAWLRFGDLFGETEGFVCAIMDEVMMTNNYRRFIVKDDTVDICRACHQPGESIRHIISGCSRLANGEYLHRHNLVARIIHQQLALKYNLVESEVPYYSYMPDPVLENGHITLYWNRSIITDRTIVANKPDIVMVDRSERRAMIVDITIPHDENLVKAEKDKQIKYLDLAHEVVDMWEVDSAIIVPIVVTANGLIAKSLDQHLRRLSLGSWIKGLIQKAVLLDTARIVRKFLSLEP

SEQ ID NO: 12589 - protein, 1203 aa, Sesamia nonagrioides
MLTRSAARRARPPSPDSSLSSASPPPVSSPTVNAVMTPAAVVASSSSDEYFSPPTTPPPARRRGGRRPRDRLGPRGPSASDRVPAPGGSVQRMRWTQSINENVMRSYYGATEGGNNLTAYRVRMLSLFQVLEPAVNVSAQRLSDQVRVIQRNHMLGDVVLDRLRLESRNSHVTPASSLVAVQLNSVSPRPNHIDEEDDDRAISVSPQCNEKLRSALEDAFREYRSIPPELRPRLPRLPMHKKNKALVCALDSQLSNYLKDSKDLNDTHSILYCGAVAICRVAHVKFPDNDRATRPKSAVPAWQCRIERRIGETRALIGKLVSFREGNTRPRVMRFVRRAFSGTDTSTRDYLFRVTERIDFFKQKIYAWANRIRRYRRRVERYSQNRNFQSDERRVYRAWERSDQGVTDTCLPDDDATCSFWRNIWSVPVSHTEGSWTRVVERACDPVPEMGAITICPQDVARAVRPLPNWKSPGPDGLHNFWIKWFSGSHARLASQFQTALESGSLPQFLTTGVTHLLHKSGSTAEPRNYRPITCLPTVYKVLTSILKSKINTHIDSNSIMSASQNGCRSGSRGTKELLLIDMAISQQVRRSRKDLSTCWIDYKKAYDSVPHTWLMRVLELYKVDATLRTFLMTCMRTWRTVLRYPGCRNIQRNSEPIRIERGIFQGDSLSPLWFCLALNPLSTLLEDSGLGYRLRRGGQVISHLLYMDDLKLFAHTDSQLKELLKITETFSSSIRMEFGVDKCAVMHVKRGEIMESVGTQLTSSINLRALSASETYKYLGMSEALGINVTDMKQSLKERFFGRLKKVLNSLLSGGNKVRAFNGWVMPVLMYSFGILKWTQTELDALDRRVRTLLTANRLHHPRSSVMRLYIPRKCGGRGFLNAKTLHNREICSLREYFLTTDVGMHRDVVAVDKGLTPLSLAKENWRKPVVLDTNDRMEVWKSKELHGRFFKALHGPDVDLQASVAWLRFGDLFGETEGFVCAITDEVMMTNNYRRFIVKDGTVDICRACHRPGESIRHIISGCSRLANGEYLHRHNLVARIIHQQLALKYNLVESEVPYYRYTPDPVLENDHITLYWDRSIITDRTIIANKPDIVLVDRSERRAMIVDITIPHDENLVKAEKDKQIKYLDLAHEVVDMWEVDSAIIVPIVVTANGLIAKSLDQHLRRLSLGSWIKGLIQKAVLWTRLASSGSSSLWSPDRR

SEQ ID NO: 12590 - protein, 1108 aa, Sesamia nonagrioides
MRWTQSINENVMRSYYGATEGGNNLTAYRVRMLSLFQVLEPAVNVSAQRLSDQVRVIQRNHMLDDVVLDRLRLESRNSHVTPASSLVAVQLNSVSPRPNHVDEEDDDRAISVSPQCNEKLRTALEDAFREYRSIPPEFRPRLPRLPMHKKNKALVCALDSQLSNYLKDSNDLNDTHSILYCGAVAICRVAHVKFPDSDRATRPKSAVPAWQCRIERRIGETRALIGKLISFREGNTRPRVMRFVRRAFTGTDTSTRDYLFRVTERIDFFKQKIYAWANRIRRYRRRVERYSQNRNFQSDERRVYRAWERSDQGVTDTCLPDDDATCSFWRNIWSVPVSHTEGSWTRVVERACDPVPEMGAITICPQDVARAVRPLPNWKSPGPDGLHNFWIKWFSGSHARLASQFQTALESGSLPQFLTTGVTHLLHKSGSTAEPKNYRPITCLPTVYKVLTSILKSKINTHIDSNSIMSASQNGCRSGSRGTKELLLIDMAISQQVRRSRKDLSTCWIDYKKAYDSVPHTWLMRVLELYKVDATVRTFLMTCMRTWRTVLRYPGCRNIQRNSEPIRIERGIFQGDSLSPLWFCLALNPLSTLLEDSGLGYRLRRGGQVISHLLYMDDLKLFAHTDSQLKELLKITETFSSSIRMEFGVDKCAVMHVKRGEIMESVGTQLTSSINLRALSVSETYKYLGMSEALGINVTDMKQSLKERFFGRLKKVLNSLLSGGNKVRAFNGWVMPVLMYSFGILKWTQTELDALDRRVRTLLTANRLHHPRSSVMRLYIPRKCGGRGFLNAKTLHNREICSLRQYFLTTDVGMHRDVVAVDKGLTPLSLAKENWRKPVVLDTNDRMEVWKSKELHGRFFKALHGPDVDLQASVAWLRFGDLFGETEGFVCAITDEVMMTNNYRRFIVKDGTVDICRACHRPGESIRHIISGCSRLANGEYLHRHNLVARIIHQQLALKYNLVESEVPYYRYTPDPVLENDHITLYWDRSIITDRTIIANKPDIVLVDRSERRAMIVDITIPHDENLVKAEKDKQIKYLDLAHEVVDMWEVDSAIIVPIVVTANGLIAKSLDQHLRRLSLGSWIKGLIQKAVLLDTARIVRKFLSLEP

SEQ ID NO: 12591 - protein, 1075 aa, Apamea monoglypha
MLSLFQVLEPAVNVTAQRLSDQVRVIQRNHMLDDIVLDRLRNEMQSSHVIAPQSQTAAVLPQSNTSHADEGSNDRATNVSIQCNEELRNALEGAIREYRFMSPELRPRLPRLPMHNKNRALVAVLDAQLSSYFDVCEDLTDTHSILYCAAVAACRVAHVKFASDSRATRPKPAIPAWQCRIERRIGGARALIGKLICFREGNTRPRVMRFVRRAFSGTDISSQDYLSRVTERIDFLKQKVYAWANRIRRYKRRVERYTQNRTFQSDERWVYRGWERPDQGVADTGLPDDDAMCSFWRSIWSAPVSHTEGDWAREVERACDPIPEMEAITICPQDVARAVRPLPNWKSPGPDGLHNFWIKWFLRSHARLASQFQTALESGSLPQFLTTGVTHLLHKSGSTAEPKNYRPITCLPTVYKVLTSILRAKINKHIDTNSIMSASQNGCKNGSRGTKELLLIDMAISQQVRRSRKDLSTCWIDYKKAYDSVPHTWLMRVLDLYKVDATLRTFLMSCMRQWRTVLRYPGCRNIQRNSEPIRIERGIFQGDSLSPLWFCLALNPLSTLLKDSGLGYRLRRGGQVISHPLYMDDLKLFAPNNLQLIELLKVTETFSSAIRMEFGVDKCAVMHVKRGKIVESVGTQLSDSTNLRALSASETYKYLCISEALGINVTDMKQSLKERFFGRLKKVLNSLLSGGNKVRAFNSWVMPVLMYSFGILKWTQTELDALDRRVRTLLTANRMHHPRSSVMRLYIPRKCGGRGFLNAKTLHNREICSLREYFLDTDVGMHRDVVAVDKGLTPLSLAKENWRKPVVLDTNDRLEVWQSKELHGRFYRALHGPDVDLLASVAWLRFGDLFGETEGFVCAIMDEVMMTNNYRRFIVKDGTVDICRACHRPGESIRHIISGCSRLANGEYLHRHNLVARIIHQQLALKYSLVESEVPYYRYVPDPVLENGNITLYWDRSIITDRTIVANKPDIVVVDRSERRAMIVDITVPHDENLVKAEKDKQIKYLDLAREVVDMWDVDSAIIVPIVVTANGLIAKSLDQHLRRLSLGSWIKGLIQKAVLLDTARIVRRFLSLEP

SEQ ID NO: 12592 - protein, 1198 aa, Apamea monoglypha
MLTRSAARRARLPSPDSSLSSASPPPVPSPTVSAVTTPAVVVASSSSDEYFSPPTTPPPARRRGGRRPPDGLGPRGPLASDRVPAPGGSVQRMRWTRSINENVMRSYYGATEGGNNLTAYRVRMLSLFQVLEPAVNVSAQRLSDQVRVIQRNHMLDDTVLDRLRSEMQSSHVIAPQSQTAAVLPQSNTSHADEGSNDRATNVSIQCNEELRNALEGAIREYRFMSPELRPRLPRLPMHNKNRALVAVLDAQLSSHFDACEDLTDTHSILYCAAVAACRVAHVKFDSDSRATRPKPAIPAWQCRIERRIGGARALIGKLICFREGNTRPRVMRFVRRAFLGTDISSQDYLSRVTERIDFLKQKVYAWANRIRRYKRRVERYTQNRTFQSDERWVYRGWERPDQDVADTCLPDDDAMCSFWRSIWSAPVSHTEGDWAREVERACDPIPEMEAITICPQDVARAVRPLPNWKSPGPDGLHNFWVKWFTRSHARLASQFQTALESGSLPQFLTTGVTHLLHKSGSTAEPKNYRPITCLPTVYKVLTSILRAKINKHIDTNSIMSASQNGCKNGSRGTKELLLIDMAISQQVRRSRKDLSTCWIDYKKAYDSVPHTWLMRVLDLYKVDATLRTFLMSCMGQWRTVLRYPGCRNIQRNSEPIRIERGIFQGDSLSPLWFCLALNPLSTLLVDSGLGYRLRRGGQVISHLLYMDDLKLFAPNNLQLMELLKVTETFSNDIRMEFGVDKCAVMHVKRGEIVESVGTQLSDSTNLRALSVSETYKYLGMSEALGINVTDMKQSLKERFFGRLKKVLNSLLSGGNKVRAFNSWVMPVLMYSFGILKWTQTELDALDRRVRTLLTANRLHHPRSSVMRLYIPRKCGGRGFLNAKTLHNREICSLREYFLETDVGMHRDVVAMDKGLTPLSLAKENWRKPVVLDTNDRMEVWQSKELHGRFYRALHGPDVDLLASVAWLRFGDLFGETEGFVCAIMDEVMMTNNYRRFIVKDGTVDICRACHRPGESISNIISGCSRLANGEYLHRHNLVARIIHQQLALKYNLVESEVPYYRYVPDPVLENGNITLYWDRSIITDRTIVANKPDIVVVDRSERRAMIVDITVPHDENLVKAEKDKQIKYLDLAREVVDMWDVDSTVIVPIVVTANGLIAKSLDQHLRRLSLGSWIKGLIQKAVLLDTARIVRRFLSLEP

SEQ ID NO: 12593 - protein, 975 aa, Apamea monoglypha
MSPELRPRLPRLPMHNKNRALVAVLDAQLSSHFDACEDLTDTHSILYCAAVAACRVAHVKFDSDSRATRPKPAIPAWQCRIERRIGGARALIGKLICFREGNTRPRVMRFVRRAFLGTDISSQDYLSRVTERIDFLKQKVYAWANRIRRYKRRVERYTQNRTFQSDERWVYRGWERPDQSVADTCLPDDDAMCSFWRSIWSAPVSHTEGDWTGKIERACELIPEMGAITICPQDVARAVRPLPNWKSPGPDGLHNFWIKWFQRSHAPLAAQFQSALESGLLPQFITTGITHLLHKSGSTADPKNYRPITCLPTIYKVLTSILRAKINKHIDSNSIMSVSQNGCRNGSRGTKELLLIDMAISQQVRRSRKDLSTCWIDYKKAYDSVPHTWLMRVLELYKVDTTLRTFLMTCMGQWRTVLRYPGCRNIQRNSEPIRIERGIFQGDSLSPLWFCLALNPLSTLLDDSGLGYRLRRGGQVISHLLYMDDLKLFAPNNLQLMKLLKITETFSSAIRMEFGVDKCAVMHVKRGEIVESVGTQLSDFTNLRALSAAETYKYLGMSEALGINVTDMKQSLKERFFGRLKKVFNSLLSGGNKVRAFNSWVMPVLMYSFGILKWTQTELEALDRRVRTLLTANRMHHPRSSVMRLYIPRKCGGRGFLNAKTLHNREICSLREYFLETDVGMHRDVVAVDKGLTPLSLAKENWRKPVVLDTNDRMEVWQSKELHGRFYRALHGPDVDLLASVAWLRFGDLFGETEGFVCAIMDEVMMTNNYRRYIVKDGTVDICRACHRPGESIRHIISGCSRLANGEYLHRHNLVARIIHQQLALKYSLVESEVPYYRYVPDPVLENGNITLYWDRSIITDRTIVANKPDIVVVDRSERRAMIVDITIPHDENLVKAEKDKQIKYLDLAREVVDMWDVDSAIIVPIVVSANGLIAKSLDQHLRRLSLGSWIKGLIQKAVLLDTARIVRRFLSLEP

SEQ ID NO: 12594 - protein, 1032 aa, Apamea monoglypha
MQSSHVIAPQSQTAAVLSQSNTSHADEGSNDRATNVSIQCNEELRNALEGAIREYRFMSPELRPRLPRLPMHNKNRALVAVLDAQLSSHFDACEDLTDTHSILYCAAVAACRVAHVKFDSDSRATRPKPAIPAWQCRIERRIGGARALIGKLICFREGNTRPRVMRFVRRAFLGTDISSQDYLSRVTERIDFLKQKVYAWANRIRRYKRRVERYTQNRTFQSDERWVYRGWERPDQSVADTCLPDDDAMCSFWRSIWSAPVSHTEGDWTGKIERACELIPEMGAITICPQDVARAVRPLPNWKSPGPDGLHNFWIKWFQRSHAPLAAQFQSALESGLLPQFITTGITHLLHKSGSTADPKNYRPITCLPTIYKVLTSILRAKINKHIDSNSIMSVSQNGCRNGSRGTKELLLIDMAISQQVRRSRKDLSTCWIDYKKAYDSVPHTWLMRVLELYKVDTTLRTFLMTCMGQWRTVLRYPGCRNIQRNSEPIRIERGIFQGDSLSPLWFCLALNPLSTLLDDSGLGYRLRRGGQVISHLLYMDDLKLFAPNNLQLMKLLKITETFSSAIRMEFGVDKCAVMHVKRGEIVESVGTQLSDFTNLRALSAAETYKYLGMSEALGINVTDMKQSLKERFFGRLKKVFNSLLSGGNKVRAFNSWVMPVLMYSFGILKWTQTELEALDRRVRTLLTANRMHHPRSSVMRLYIPRKCGGRGFLNAKTLHNREICSLREYFLETDVGMHRDVVAVDKGLTPLSLAKENWRKPVVLDTNDRMEVWQSKELHGRFYRALHGPDVDLLASVAWLRFGDLFGETEGFVCAIMDEVMMTNNYRRYIVKDGTVDICRACHRPGESIRHIISGCSRLANGEYLHRHNLVARIIHQQLALKYSLVESEVPYYRYVPDPVLENGNITLYWDRSIITDRTIVANKPDIVVVDRSERRAMIVDITVPHDENLVKAEKDKQIKYLDLAREVVDMWDVDSAIIVPIVVSANGLIAKSLDQHLRRLSLGSWIKGLIQKAVLLDTARIVRRFLSLEP

SEQ ID NO: 12595 - protein, 1045 aa, Apamea monoglypha
MLDDTVLDRLRSEMQSSHVIAPQSQTAAVLPQSNTSHADEGSNDRATNVSIQCNEELRNALEGAIREYRFMSPELRPRLPRLPMHNKNRALVAVLDAQLSSHFDACEDLTDTHSILYCAAVAACRVAHVKFDSDSRATRPKPAIPAWQCRIERRIGGARALIGKLICFREGNTRPRVMRFVRRAFLGTDISSQDYLSRVTERIDFLKQKVYAWANRIRRYKRRVERYTQNRTFQSDERWVYRGWERPDQSVADTCLPDDDAMCSFWRSIWSAPVSHTEGDWTGKIERACELIPEMGAITICPQDVARAVRPLPNWKSPGPDGLHNFWIKWFQRSHAPLAAQFQSALESRLLPQFITTGITHLLHKSGSTADPKNYRPITCLPTIYKVLTSILRAKINKHIDSNSIMSVSQNGCRNGSRGTKELLLIDMAISQQVRRSRKDLSTCWIDYKKAYDSVPHTWLMRVLELYKVDTTLRTFLMTCMGQWRTVLRYPGCRNIQRNSEPIRIERGIFQGDSLSPLWFCLALNPLSTLLDDSGLGYRLRRGGQVISHLLYMDDLKLFAPNNLQLMKLLKITETFSSAIRMEFGVDKCAVMHVKRGEIVESVGTQLSDFTNLRALSAAETYKYLGMSEALGINVTDMKQSLKERFFGRLKKVFNSLLSGGNKVRAFNSWVMPVLMYSFGILKWTQTELEALDRRVRTLLTANRMHHPRSSVMRLYIPRKCGGRGFLNAKTLHNREICSLREYFLETDVGMHRDVVAVDKGLTPLSLAKENWRKPVVLDTNDRMEVWQSKELHGRFYRALHGPDVDLLASVAWLRFGDLFGETEGFVCAIMDEVMMTNNYRRYIVKDGTVDICRACHRPGESIRHIISGCSRLANGEYLHRHNLVARIIHQQLALKYSLVESEVPYYRYVPDPVLENGNITLYWDRSIITDRTIVANKPDIVVVDRSERRAMIVDITVPHDENLVKAEKDKQIKYLDLAREVVDMWDVDSAIIVPIVVSANGLIAKSLDQHLRRLSLGSWIKGLIQKAVLLDTARIVRRFLSLEP

SEQ ID NO: 12596 - protein, 1202 aa, Spodoptera exigua
MLTRAAARRARPPPPASSLSSASPPPESSPTVSDVTPAVAAASSSSDEYYSPPTTPPPTRRRGGRRPPARLGPRGPPASDRVPAVGGSVQRMRWTQSINENVMRAYYGATEGGNNLTAYRVRMLSLFQVLEPAVNVSAQRLSDQVRVIQRNRMLDDTVLDRLQTEMGSRASASSSRTVVPATLPLTSHGIVSAVADEESTDTVAHVSTQCIDELRSALEYAIREYRYISPELRPRLPRLPMHNKNKALVAALDSQLSNYLDDCEDLGDTHSIMYCAAVAACRVAHVKFPTNDVTTRPKPAVPAWQRRIECRIAGARALIGKLICFREGNTRPRVMRSVRRAFSGTDISPRDYMSRVTERIDFLKQKVYAWANRIRRYRRRVERYTQNRTFRSNERWVYRTWERPDHGVTDRRLPDDDAMCSFWRSIWSVPVSHTEGDWIRDVERACDPIPQMGTINISPQDVARAVRPLPNWKSPGPDGLHNFWIKWFTRAHARLASQFQSAVELGSLPKFLTTGVTHLLHKSGSTAEPKNYRPITCLPTVYKVLTSILRSKINSHIDKNKIMSTAQNGCKNGSRGTKELLLIDMAINQQVRRARKDLSTCWIDYKKAYDSIPHTWLMRVLELYKIDTILRTFLMSCMRQWSTVLRYPGCRHTQRNSEPVRIERGIFQGDSLSPLWFCLALNPLSTLLENSGLGYRLKRGGQVISHLLYMDDLKLFAPNKLQLMELLKLTETFSSAIRMEFGVDKCAIMHVKRGEVVESVGTQLTDSINLRSLSPTETYKYLGMSEALGINVTDMKQSLKERFFGRLKKVFNSFLSGGNKVRAFNGWVMPVLMYSFGVLKWSQTELDALDRQVRTMLTAYRMHHPRSSVMRLYIPRKCGGRGFLNAKTLHNREVCSLREYFLAADVDMHRDVVAVDKGLTPLSLAIENWRKPVVLDTNARREVWQSKELHGRFFRALHGPDVDQVASVAWLRFGDLFGETEGFVCAIMDEVIMTNNYRRFIVKDGTVDICRACHRPGESIRHIISGCSRLANGEYLHRHNLVARIIHQQLALKYSLVESEVPYYRYEPDPVLDNGHITLYWDRSIITDRTIVANKPDIVVVDRKERRAMIVDIAVPHDENLVKAEKDKLIKYIDLAREVVDMWEVDSAIIVPIVVSANGLIAKSLDQHLRRLSLGGWIKGLIQKVVLLDTARIVRRFLSLEP

SEQ ID NO: 12597 - protein, 1202 aa, Spodoptera exigua
MLTRAAARRARPPPPASSLSSASPLPGSSPTGSDVTPAVAAASSSSDEYFSPPTTPPPTRRRGERRPPARLGPRGPPASDRVPATGGSVQRMRWTQSINENVMRACYGATEGGNNLTAYRVRMLSLFQVLEPAINVSAQRLSDQVRVIQRNRMLDDTVLDRLRTEMGSCAGASSSRTVAPPMMPPSNRGTVSTAADEESTDTVTHVSTQCNDELRSALECAIREYRYISPEIRPRLPRLPMHNKNRVLVAALDSQLSNHFDNCEDLSDTHSMMYCAAVAACRVAHVKFPTSDVATRLKPAVPAWQRRIERRIAGARALIGKLICFREGNTRPRVMRFVRRAFSGTDISPQDYMSRVTERIDFLKQKVYAWANRIRRYKRQVERYTQNRTFRSNERWVYRAWERPDQGVTDTRLPDDDAMCSFWRSIWSVPVSHTEGDWIREVERACDPIPQMGAINISPQDVARAVRPLPNWKSPGPDGLHNFWIKWFTRSHARLASQFQSALESGSLPQFLTTGVTHLVHKSGSTTEPKNYRPITCLPTVYKVLTSILRSKINSHIDKNNIMSTDQNGCKSGSRGTKELLLIDMTISQQVRRSRKDLSTCWIDYKKAYDSVPHTWLMRVLELYKIDTKLRTFLMSCMRQWSTVLRYPGCRHIRTNSETVRIERGIFQGDRLSPLWFCLALNPLSTLLENSGLGYRLKRGGQVISHLLHMDDLKLFAPNKLQLMELLKLTEIFSSAIRMEFGVDKCAVMHVKRGEIVESVGTQLTDSINLRSLSPTETYKYLGMSEALGINVTDMKQSLRERFFGRLKKVFNSFLSGGNKVRAFNGWVMPVLMYSFGVLKWSQTELDALDRRVRTMLTAYRMHHPRSSVMRLYIPRKCGGRGFLNAKTLHNLEVCSLREYFLAADVGMHRDVVAVDKGLTPLSLAKENWRKSVVLDTNARREVWQSKELHGRFFRALHGPDVDQLASVAWLRFGDLFGETEGFVCAIMDEVIMTNNYRRFIVKDGTADICRACHRPGESIRHIISGCSRLANGEYLHRHNLVARIIHQQLALKYSLVESEVPYYRYEPDPVLDNGHITLYWDRSIITDRTIVANKPDIVVVDRKERRAMIVDIAVPHDENLVKAEKDKLIKYIDLAREVVDMWEVDSAIIVPIVVSANGLIAKSLDQHLRRLSLGGWIKGLIQKVVLLDTARIVRRFLSLEP

SEQ ID NO: 12598 - protein, 868 aa, Mamestra configurata
MRFVRRAFSGTDTSPRDYLTRVTERIDFLKQKIYAWANRIRRYKRRVERYTQNRTFQSNERWVYRAWERPDQGVTDTRLPDDDVMCSFWRNIWSVPVSHTEGDWTREVERACDPIPEMGAITISPQDVARAVRPLPNWKSPGPDGLHNFWIKWFKRSHARLASQFQSALESGSLPQFLTTGITHLLHKSGSTAEPKNYRPITCLPTVYKVLTSILRAKINQHIETNSIMSASQNGCRNRSRGTKELLLIDVAISQQVRRSRRDLSTCWIDYKKAYDSVPHTWLMRVLELYKVDAVLRTFLMSCMGQWRTVLRYPGCRQIQANSDPIRIERGIFQGDSLSPLWFCLALNPLSTLLEGSGQGYRLRRGGQVISHLLYMDDLKLFAPNNLQLMKLLKVTETFSSAISMEFGVDKCAVMHVKRGEIMESVGTQLSDSIHLRSLSSTETYKYLGMSEALGINANDVKQSLKERFFGRLNKVLNSLLSGGNKVRAFNGWVMPVLMYSFGILKWTQTELDALDRRVRSLLTANRMHHPRSSVMRLYIPRKCGGRGFLNAKTLHNREICSLREFFLEADVGMHRDVVAVDKGLTALSLANENWRKPVVLDTNDRREVWQSKELHGRFYRVLHGPDVDFLASVAWLRFGDLFGETEGFVCAIMDEVMMTNNYRKYIVKDGTVDICRACHRPGESIRHIISGCSSLANGDYLHRHNLVARIIHQQLALKYNLVESEVPYYRYVPDPVLENGNCTLYWDRSIITDRTIIANKPDIVVIDRLERRAMIVDIAVPHDVNLVKTEKDKQTKYLDLAREVVDMWDVNTAVIVPIVVTANGIIAKSLDQHLKRLSLGSWIKGLIQKAVLLDTARIVRRFLSQGP

SEQ ID NO: 12599 - protein, 1104 aa, Mamestra configurata
MRWTQSINENVMRSYFGATEGGTNLTAYRGRMLSLFQVLEPAVNVSAQRLSDQVRVIQRNRMLDDSVLDRLRMEMCGHVITPPSQTVAPPQSQISSHADEESNDRVTNVSTQCNEELRSALECAIREYRYVPPELRPRLPRLPMHNKNRALVAALDSQLSNYFDDCEDLTDTHSIMYCAAVAACRVAHVKITNDRVTRPKPAVPAWQCRIERRIGGARALIGKLICFREGNTRPRVMRFVRRAFSGTDISPRDYMSRVTERIDFLKQKVYAWANRIRRYRRRVERYTQNRTFRSNERWVYRVWEQPDQGVTDTRLPDDDAMCSFWRNIWSVPVSHTEGDWIREVERACDPLPEMGAITISPQDVARAVRPLPNWKSPGPDGLHNFWIKWLQRSHARLASQYQTALESGSLPEFLTTGVTHLLHKSGSTAEPKNYRPITCLPTVYKVLTSILRAKINNHINSNNIMSVSQNGCRNGSRGTKELLLIDMAISQQVRRSRKDLSTCWIDYKKAYDSVPHTWLMRVLELYKIDTMLRTFLMSCMGQWRTVLRYPGCRNIQRNSEPVRIERGIFQGDSLSPLWFCLALNPLSTLLENSGLGYRLKRGGQVISHLLYMDDLKLFAPSNLQLMELLKVTETFSSAIRMEFGVDKCAVMHVKRGEIMESVGTQLSDSINLRSLSSTETYKYLGMSEALGINVTDMKQSLKERFFGRLKKVFNSLLSGGNKVRAFNGWVMPVLMHSFGVLKWTQTELDALDRRVRTLLTAYRMHHPRSSVMRLYIPRKCGGRGFLNAKTLHNREICSLREYFLAVDVGMHRDVVAVDKGLTPLSLANENWRKPAVLDTNDRRAVWQSKELHGRYFRALHGPDVDQLASVAWLRFGDLFGETEGFVCAIMDEVIMTNNYRRFIVKDGTVDICRACHRPGESIRHIVSGCSRLANGEYLHRHNLVARIIHQQLALKYSLVESEVPYYRYAPDPVLDNGNITLYWDRSIITDRTIVANKPDIVVVDRIERRAMIVDITVPHDENLVKAEKDKQIKYIDLAREVVDMWDVDSAIIVPIVVSANGLIATSLDQHLRRLSLGSWIKGLIQKAVLLDTARIVRRFLSLEP

SEQ ID NO: 12600 - protein, 1109 aa, Amphipyra berbera
MKWTQSINENVMRAYYGSTEGGTNLTAYRVRMLTLFQELEPAINVSAQRLSDQVRVIQRNHRLDDAALDRLRLEVQNSRAIPVPSQTAVHQLINVAPPRSDRVDGDEDDGAVTVSSQYNDRLRSALEDAIRECRANPESRPRLPRLPMHNKNRALVCALDSLLASYFESSEDLGDTHSILYCAAVAACRVANVKFNNSERATRPKLAVPAWQCRIERRIDETRALIGKLICFREGNTRPRVMRFVRRAFSGTGISPREYTSRATERIDFLKQKVCAWASRIRRYKRRVERYTQNRMFQCDQRWVYRAWERPDQSVSGGRLPDDDAMSSFWRSIWSVPVIHTEGDWMRDIERTCESIEEMGEIVISPQDVAGAVRPLPNWKSPGPDGLHNFWIKWLRSSHARLASQFQSSLESGSLPQFLTTGVTHLLHKSGSTAEPKNYRPITCLPTVYKLLTSILRSKINTHIGNNSVLSSSQNGCRNGSRGTKELLLIDTAISQQVRRSQKSLSTCWIDYKKAYDSVPHTWLMRVLELYKINTTLRTFLRSCMGQWRTVLRYPGCQPIRGSGEPIRIERGIFQGDSLSPLWFCLALNPLSTLLEGSGLGYPLRRGGQVVSHLLYMDDLKLFAPTKLQLVDLLKVTETFSNSIRMEFGVDKCAVMHVRRGRIMESEGLQLSDSIHLSPLSANDTYKYLGMSEGLGISEADMKQSLRERFFGRLKKVLKSLLSGGNKVRAFNGWVMPVLMYSFGILKWTQTELDALDRRVRTLLTANRMHHPRSSVMRLYIPRKCGGRGLLNAKTLHNREVCSLREFFLHADAGMHRDVVAVDKGLTPLSLARENWRKPVVLSTNDRREIWQSKELHGRFYQALHGPDVDFLASVSWLRFGDLFGETEGFVCAIMDEVIMTNNYRKYIVKDGTVDICRACHCPGESLRHIISGCSRLANGEYLHRHNQVARIIHQQLALKYNLVESEVPYYRYVPDPVLENGRITLYWDRSIITDRTIVANKPDIVVIDRSERRTMIVDVTIPHDGNLVKAEKDKQIKYLDLAHEVVNMWDVESATIVPIVVTANGLMAKSLDKHLMRLSLGGWIKGLIQKAVLLDTARIVRRFLSLEP

SEQ ID NO: 12601 - protein, 1207 aa, Amphipyra berbera
MLTRSRAKAIAQNTRPRPSASSLSSASQPPDSSIVSDVTPAAAVASSSSDEYFSPPSTPPPPPPRRRGRGRPPASLGPRGPPASDRVPAPGGSVQRMRWTQSMNENCMRAYFGATEGGTNLTAYRGRMLSLFQVLEPAVNVSAQRLSDQVRVIQRDHRLTDDALDRLRSEVQSNCIISLQSQTAAQPQVPPMVPPQPIRADEESDDRVTIVSAQCNEQLRSALELAIREYRFTPPNRRPRIPRLPMNRQNRALMCALDSLLSNYFDNSEGLEDTHSILYCAAVAACRVAHVKFDNNDRATRPKPAVPAWQCRIERRINEARALIGKLICFREGNTRPRVMRFVRRAFSGTDINPREYMSRVTERIDFLKQKVYAWANRIRRYKRRVERYTQNRMFHSDERWVYRTWERPDHDVSDTHLPDNDVMNTFWRNIWSMPVTHTEGDWMQEVQRACEPIEEMGDIIIVPQDVTSAVRPMANWKSPGPDGLHNFWLKWLRSSHARLASQFQSSLESGSLPPFLTTGITHLLHKSGSTAEPKNYRPITCLPTIYKLLTSILRAKINTHFINNSIMSASQNGCKNGSRGTKELLLFDMAISQQVRRSRKDLSTCWIDYKKAYDSVPHTWLMRVLELYKVNTTLCAFLTSCMGQWRTVLHYPGCRQIQGRGEPIRIERGIFQGDSLSPLWFCLALNPLSTLLEGSGLGYRLRRGGQVISHLLYMDDLKLFAPNNLQLMKLLKVTETFSNSIRMEFGVDKCAVMHVKRGGIMESVGTQLLDSIHLRSLSSTETYKYLGMSEALGINETDMKQSLRERFFGRLKKVLKSLLSGGNKVRAFNGWVMPVLMYSFGILKWTQTELDALDRRFRTLLTAYRMHHPRSSVMRLYIPRKCGGRGFLNAKTLHNREVCSLREYFLQADVGMHRDVVAVDKGFTPLSLAKENWRKPVVLDTNGRREVWQSKELHGRFYRALHGPDVDFLASVAWLRFGDLFGETEGFVCAIMDEVMMTNNYRKYIVKDGTVDICRACHCPGESIRHIISGCSRLANGEYLHRHNLVARIIHQQLALKYNLVDAEVPYYKYVPDPVLENGHITLYWDRSIITDRTIVANKPDIVVIDRTERLTMIVDITVPHDENLVKAEKDKEIKYQDLAHEVVDMWEVDSAVIVPIVVTANGLIAKSLDQHLTRLSLGSWVKGLIQKAVLLDTARIVRKFLSLRP

SEQ ID NO: 12602 - protein, 1207 aa, Amphipyra berbera
MLTRSRAKVIAQNTRPRPSASSLSSASQPPDSSIVSDVTPAAAVASSSSDEYFSPPSTPPPPPPRRRGRGRPPASLGPRGPPASDRVPAPGGSVQRMRWTQSMNENCMRAYFGATEGGTNLTAYRGRMLSLFQVLEPAVNVSAQRLSDQVRVIQRDHRLTDDALDRLRSEVQSNCIISLQSQTAAQPQVPPMVPPQPIRADEESDDRVTIVSAQCNEQLRSALELAIREYRFTPPNLRPRIPRLPMNRQNRALMCALDSLLSNYFDNSEGLEDTHSILYCAAVAACRVAHVKFDNNDRATRPKPAVPAWQCRIERRINEARALIGKLICFREGNTRPRVMRFVRRAFSGTDINPREYMSRVTERIDFLKQKVYAWANRIRRYKRRVERYTQNRMFHSDERWVYRTWERPEHDVSDTHLPDNDVMNTFWRNIWSMPVTHTEGDWMQEVQRACEPIEEMGNIIIVPQDVTSAVRPMANWKSPGPDGLHNFWLKWLRSSHARLASQFQSSLESGSLPPFLTAGITHLLHKSGSTAEPKNYRPITCLPTIYKLLTSILRAKTNTHIINNSIMSASQNGCKNGSRGTKELLFIDMAISQQVPRSRKDLSTCWIDYKKAYDSVPHTWLMRVLELYKVNTTLCAFLTSCMGQWRTVLHYPGCRQIQGRGEPIKIERGIFQGDSLSPLWFCLALNPLSTLLEGSGLGYRLRRGGQVISHLLYMDDLKLFAPNNLQLMKLLKVTETFSNSIRMEFGVDKCAVMHVKRGGIMESVGTQLSDSIHLRSLSSTETYKYLGMSEALGINETDMKQSLRERFFGRLKKVLKSLLSGGNKVRAFNGWVMPVLMYSFGILKWTQTELDALDRRVRTLLTAYRMHHPRSSVMRLYIPRKCGGRGFLNAKTLHNREVCSLREYFLQADVGMHRDVVAVDKGFTPLSLAKENWRKPVVLDTNGRREVWQSKELHGRFYRALHGPDVDFLASVAWLRFGDLFGETEGFVCAIMDEIMMTNNYRKYIVKDGTVDICRACHCPGESIRHIISGCSRLANGEYLHRHNLVARIIHQQLALKYNLVDAEVPYYKYMPDPVLENGHITLYWDRSIITDRTIVANKPDIVVIDRTERLTMIVDITVPHDENLVKAEKDKEIKYQDLAHEVVDMWEVDSAVIVPIVVTANGLIAKSLDQHLTRLSLGSWVKGLIQKAVLLDTARIVRKVLSLRP

SEQ ID NO: 12603 - protein, 1205 aa, Amphipyra berbera
MLTRSRSKLQDPKTRPRPSASSLSSASQPPDSSIVSDVTPAAAVASSSSDEYFSPPSSPPPPRRRGRGRPPACMGPRGPPASDRVPAPGGSVQRMRWTQSMNENCMRAYFGATEGGTNLTAYRGRMLSLFQVLEPAVNVSAQRLSDQVRVIQRDHRLTDAALDRLRSEVQSNRIISPQSQTAAQPQAPTVVLPPPIHADEESDDRVTNVSTQCNERLRSALELAIQEYRFAPPNLRPRIPRLPMNKKNRALMCALDSLLSSYFDNSESLEDTHSILYCAAVAACRVAHAKFDNNDRATRPKPAVPAWQCRIERRISEARALIGKLICFREGNTRPRVMRFMRRAFSGTDINPRDYLSRVTERIDFLKQKVYAWANRIRRYKRRVERYTQNRMFHSDERWVYRTWERPDHNVSDTHLPDNDVMNTFWRNIWSMPVTHTEGDWMQEVQRACEPIEEMGDITIVPQDVTSAVRPMANWKSPGPDGLHNFWLKWLRSSHARLASQFQSSLESGSLPEFLTTGVTHLLHKSGSTAEPKNYRPITCLPTVYKLLTSILRAKINSHIINNSIMSVSQNGCKNGSRGTKELLLIDMAISQQVHRSRKDLSTCWIDYKKAYDSVPHTWLMRVLELYKVNTTLCAFLTSCMGQWRTVLHYPGCRQIQGRGEPIRIERGIFQGDSLSPLWFCLALNPLSTLLEGSGLGYRLRRGGQVISHLLYMDDLKLFAPNNLQLMNLLKVTETFSNSIRMEFGVDKCAVMHVKRGGIMESVGTQLSDSIHLRSLSSTETYKYLGMSEALGINETDMKQSLRERFYGRLKKVLKSLLSGGNKVRAFNGWVMPVLMYSFGILKWTQTELDALDRRVRTLLTAHRMHHPRSSVMRLYIPRKCGGRGFLNAKTLHNREVCSLREYFLQADVGMHRDVVAVDKGFTPLSLAKENWRKPVVLDTNGRREVWQSKELHGRFYRALHGPDVDFLASVAWLRFGDLFGETEGFVCAIMDEVMMTNNYRKYIVKDGTVDICRACHCPGESIRHIISGCSRLANGEYLHRHNLVARIIHQQLALKYNLVDAEVPYYKYVPDPVLENGHITLYWDRSIITDRTIVANKPDIVVIDRRERLTMIVDITVPHDENLVKAEKDKEIKYQDLAHEVVDMWEVDSAVIVPIVVTANGLIAKSLDHHLTRLSLGSWVKGLIQKAVLLDTARIVRKFLSLRP

SEQ ID NO: 12604 - protein, 1211 aa, Amphipyra berbera
MLTRSRTKTQDTRTRPRPSASSLSSASQPPDSSIVSDVTPAAAVASSSSDEFYSPPTSPPPPPPPPRRGRRGRGRPPACMGPRGPPASDRVPAPGGSVQRMRWTLTMNENCMRAYFGATEGGTNLTAYRGRMLSLFQVLEPTVNVSAQRLSDQVRVIQRDHRLTDAALDRLRSEVQSNRIISLQSQTAAQPQTPTVVPPLPIHADEESDDRVTNVSTQCNEQLRSALELAIREYRFTPPNIRPRIPRLPMHRKNRALMCALDSLLSSYFDNSENLEDTHSILYCAAVAACRVAHAKFDNNDRATRPKPAVPAWQCRIERRINEARALIGKLICFREGNTRPRVMRFVRRAFSGTDINPRDYLSRVTERIDFLKQKVYAWANRIRRYKRRVERYTQNRMFHSDERWVYRTWERPDHDVSDTHLPDNDVMNTFWRNIWSMPVTHAEGDWMQEVQRACEPIEEMGDITIVPQDVTSAVRPMANWKSPGPDGLHNFWLKWLRSSHARLASQFQSSLESGSLPEFLTTGVTHLLHKSGSTAEPKNYRPITCLPTVYKLLTSILRAKINSHIINNSIMSVSQNGCKNGSRGTKELLLIDMAISQQVRRSRKDLSTCWIDYKKAYDSVPHTWLMRVLELYKVNTTLCAFLTSCMGQWRTVLHYPGCRQIQGRGEPIRIERGIFQGDSLSPLWFCLALNPLSTLLEGSGLGYRLRRGGQVISHLLYMDDLKLFAPNNLQLMKLLKVTETFSNSIRMEFGVDKCAVMHVKRGGIMESVGTQLSDSIHLRPLSSTETYKYLGMSEALGINETDMKQSLRERFYGRLKKVLKSLLSGGNKVRAFNGWVMPVLMYSFGILKWTQTELDALDRRVRTLLTAYRMHHPRSSVMRLYIPRKCGGRGFLNAKTLHNREVCSLREYFLQADVGMHRDVVAVDKGFTPLSLAKENWRKPVVLDTNGRREVWQSKELHGRFYRALYGTDVDFLASVAWLRFGDLFGETEGFVCAIMDEVMMTNNYRKYIVKDGTVDICRACHCPGESIRHIISGCSRLANGEYLHRHNLVARIIHQQLALKYNLVDAEVPYYKYVPDPVLENGHITLYWDRSIITDRTIVANKPDIVVIDRSERLTMIVDITVPHDENLVKAEKDKEIKYQDLAHEVVDMWEVDSAVIVPIVVTANGLIAKSLDQHLTRLALGSWVKGLIQKAVLLDTARIVRKFLSLRP

SEQ ID NO: 12605 - protein, 1203 aa, Amphipyra berbera
MLTRARARKQTAHPRSPDSSLSSASQPPESSPPVSAVTPAAAVASSSSDEYYSPPSSPPPVRRRGGDRPPACLGPRGQPATNRVPAAGGNVSRMRWTQSINENVMRAYYGATEGGINLTAYRERMLFLFQVLEPAINVSAQRLSDQVRVVQRNRRLDDTVLERLRSEARNSQTVTFPVQAAVQMQPIAVPPRPIHVDGEGDGEAINVSNQCSEELRSALDDAILEFRTTPPEIRPRLPRLPMHGKNRALMCALDSLLSNYFDGSEDLADTHSILYCAAIAACRVAHVKFTENERATRPKPAVPAWQSRIERRIGGARVLIGKLICFREGNNRPRVMRFVRRAFSGTDISPRDYMSRVTECIDFLKQKVYAWANRIRRYKRRVERYTQNRIFQSDQRRVYRAWERPDPGGGDVRLPDDDALSSFWRSIWSVPIAHTEDGWMRDIEQVCEPIAEMEPITITPQDVADAARPLPNWKSPGPDGLHNFWLKWLRSSHARLASQFQSSLESGSLPQFLTTGVTHLLYKSGSTAEPKNYRPITCLPTVYKLLTSILRVKITTHIDNNCIMSASQNGCRKGSRGTKELLLIDMAISQQVRRSQKDLSTCWIDYKKAYDSVPHSWLMRVLELYKINTTLRTFLMSCMRHWRTVLRYPGCRRIRGSGEQIRIERGIFQGDSLSPLWFCLALNPLSTLLEGTGLGYQLRRGGQVISHLLYMDDLKLFAPTDLQLMELLKVTENFSNSIRMEFGVDKCAVMHVKRGRIAESEGIQLPNSVQLRSLSPTETYKYLGMSEALGISETDMRQSLRERFFGRLNKLLKSLLSGGNKVRAFNGWVMPVLMYSFGTLKWTQADLDALDRRVRALLTAHRMHHPRSSVMRLYIPRKCGGRGFLNAKTLHNREVYSLREYFLQAEGVMHRDVVAVDKGFTPLALARENWRKPAVLSTNDREVVWQSKELHGRYYRALHGPDVDFSASVSWLRSGNLFGETEGFVCAIMDEVMVTNNYRKYIVKDGTVDICRACHRPGESIRHIVSGCSRLANGEYLHRHNLVARIIHQQLALKYNLVESEVPYYRYVPDPVLENGHATLYWDRSIITDRTIVANKPDIVVIDRSERRTMIVDITVPHDENLVKAEKDKQIKYLDLAHEVVGMWDVDSAVIVPIVVTANGIIAKSLDIHLMRLSLGGWIKGLIQRAVLLDTARIVRRFLSLEP

SEQ ID NO: 12606 - protein, 941 aa, Noctua janthe
MHCENLTDAHSVLYCAAVAACRVAHVKFSDDRATRPKPAVPSWQYRIERRIGEARALIGKLICFREGNTRPRVMRFVRRAFSGTDISARDYMSRVTERIDFLKQKVYAWANRIRRYKRRVDRYTQNRTFQRDERWVYRAWERPDQGVADTHLPDDDAMCSFWRSIWSVPVSHTEGEWTREVERACDLVPEMGAITISPQDVVRAVRPLPNWKSPGPDGLHNFWIKWFTRSHARLAILFQSALESGSLPEFLTTGITHLLHKSGSTAEPKNYRPIACLPTVYKVLTSILRAKINKHIDDNSVMSASQNGCRNGSRGTKELLLIDMAISQQVRRSRRDLSTCWIDYKKAYDSVPHTWLMRVLELYKVDSTLRIFLMSCMGQWRTVLRYPGCRQIQRNSEPIRIERGIFQGDSLSPLWFCLALNPLSTLLEDSGLGYRLRRGGQVISHLLYMDDLKLFAPNDLQLMELLKVTETFSSAIRMEFGVDKCAVMHVKRGEIVESVGTQLSDSINLRSLSATETYKYLGMSEALGINVADMKQSLKERFFGRLKKVFNSLLSGGNKVRAFNGWVMPVLMYSFGILKWTQTELDALDRRVRTLLTTYRMHHPRSSVMRLYIPRRCGGRGFLNAKTLHNREIYSLREYFLETDVGMHRDVVAVDKGLTPLSLAKENWRKPVVLDTNDRMEVWQSKELHGRFFRALHGPDVDLPASVAWLRSGDLFGETEGFVCAIMDEVMMTNNYRRFIVKDGTVDICRACHRPGESIRHIISGCSRLANGEYLHRHNLVARIIHQQLALKYNLVESEVPYYKYVPDPVLENGNITLYWDRSIVTDRTIVANKPDIVVVDRSERRAMIVDITVPHDGNLVKAEKDKQIKYLDLAHEVVDMWDVDSAIIVPIVVSAHGLIAKSLDQYLRRLSLGSWIKGLIQKAVLLDTARIVRRFLSLEP

SEQ ID NO: 12607 - protein, 1197 aa, Noctua janthe
MLTRSATRRARLSPPDPSLSSASPPPESSPIVSAVTPAVAVASSSSDEYFSPPTTPPPVRRRGGRRPPDGLGPRGPPASDRVPAPGGSVPRMRWTQSINANVMRAYYGATEGGNNLTAYRVRMLSLFQVLEPAVNVSAQRLSDQVRVIQRNGMLDDTVLDRLRTEMQSSHVIATPPQTVVPPQSTIIPTHDNNVSNDMVTNVSTQCNEEMRCALEGAIREYRFMQPDLRPRVPRLPMHNKNKVLVAVLDSQLSNYFDNCENLTDAHSVLYCAAVAACRVAHVKFSDDRATRPKPAVPSWQYRIERRIGEARALIGKLICFREGNTRPRVMRFVRRAFSGTDISARDYMSRVTERIDFLKQKVYAWANRIRRYKRRVDRYTQNRTFQRDERWVYRAWERPDQGVADTHLPDDDAMCSFWRSIWSVPVSHTEGEWTREVERACDLVPEMGAITISPQDVVRAVRPLPNWKSAGPDGLHNFWIKWFTRSHARLAILFQSALESGSLPEFLTTGITHLLHKSGSTAEPKNYRPIACLPTVYKVLTSILRAKINKHIDDNSVMSASQNGCRNGSRGTKELLLIDMAISQQVRRSRRDLSTCWIDYKKAYDSVPHTWLMRVLELYKVDSTLRIFLMSCMGQWRTVLRYPGCRQIQRNSEPIRIERGIFQGDSLSPLWFCLALNPLSTLLEDSGLGYRLRRGGQVISHLLYMDDLKLFAPNDLQLMELLKVTETFSSAIRMEFGVDKCAVMHVKRGEIVESVGTQLSDSINLRSLSATETYKYLGISEALGINVADMKQSLKVRFFGRLKKVFNSLLSGGNKVRAFNGWVMPVLMYSFGILKWTQTELDALDRRVRTLLTTYRMHHPRSSVMRLYIPRRCGGRGFLNAKTLHNREICSLREYFLETDVGMHQDVVAVDKGLTPLSLAKENWRKPVVLDTNDRMEVWQSKELHGRFFRALHGPDVDLPASVAWLRSGDLFGETEGFVCAIMDEVMMTNNYRRFIVKDGTVDICRACHRPGESIRHIISGCSRLANGEYLHRHNLVARIIHQQLALKYNLVESEVPYYKYVPDPVLENGNITLYWDRSIVTDRTIVANKPDIVVVDRSERRAMIVDITVPHDGNLVKAEKDKQIKYLDLAHEVVDMWDVDSAIIVPIVVSAHGLIAKSLDQYLRRLSLGSWIKGLIQKAVLLDTARIVRRFLSLEP

SEQ ID NO: 12608 - protein, 1197 aa, Noctua janthe
MLTRSATRRARLSPPDPSLSSASPPPESSPIVSAVTPAVAVASSSSDEYFSPPTTPPPVRRRGGRRPPDGLGPRGPPASDRVPAPGGSVPRMRWTQSINANVMRAYYGATEGGNNLTAYRVRMLSLFQVLEPAVNVSAQRLSDQVRVIQRNGMLDDTVLDRLRTEMQSSHVIATPPQTVVPPQSTIIPTHDNNVSNDMVTNVSTQCNEEMRCALEGAIREYRFMQPDLRPRVPRLPMHNKNKVLVAVLDSQLSNYFDNCENLTDAHSVLYCAAVAACRVAHVKFSDDRATRPKPAVPSWQYRIERRIGEARALIGKLICFREGNTRPRVMRFVRRAFSGTDISARDYMSRVTERIDFLKQKVYAWANRIRRYKRRVDRYTQNRTFQRDERWVYRAWERPDQGVADTRLPDDDAMCSFWRSIWSVPVSHTEGEWTREVERACDLVPEMGAITISPQDVVRAVRPLPNWKSPGPDGLHNFWIKWFTRSHARLAILFQSALESGSLPEFLTTGITHLLHKSGSTAEPKNYRPIACLPTVYKVLTSILRAKINKHIDDNSVMSASQNGCRNGSRGTKELLLIDMAISQQVRRSRRDLSTCWIDYKKAYDSVPHTWLMRVLELYKVDSTLRIFLMSCMGQWRTVLRYPGCRQIQRNSEPIRIERGIFQGDSLSPLWFCLALNPLSTLLEDSGLGYRLRRGGQVISHLLYMDDLKLFAPNDLQLMELLKVTETFSSAIRMEFGVDKCAVMHVKRGEIVESVGTQLSDSINLRSLSATETYKYLGMSEALGINVADMKQSLKERFFGRLKKVFNSLLSGGNKVRAFNGWVMPVLMYSFGILKWTQTELDALDRRVRTLLTTYRMHHPRSSVMRLYIPRRCGGRGFLNAKTLHNREICSLREYFLETDVGMHRDVVAVDKGLTPLSLAKENWRKPVVLDTNDRMEVWQSKELHGRFFRALHGPDVDLPASVAWLRSGDLFGETEGFVCAIMDEVMMTNNYRRFIVKDGTVDICRACHRPGESIRHIISGCSRLANGEYLHRHNLVARIIHQQLALKYNLVESEVPYYKYVPDPVLENGNITLYWDRSIVTDRTIVANKPDIVVVDRSERRAMIVDITVPHDGNLVKAEKDKQIKYLDLAHEVVDMWDVDSAIIVPIVVSAHGLIAKSLDQYLRRLSLGSWIKGLIQKAVLLDTARIVRRFLSLEP

SEQ ID NO: 12609 - protein, 973 aa, Noctua janthe
MQPDLRPRVPRLPMHNKNRVLVAVLDSQLSNYFDNCEDLTDAHSVLYCAAVAACRVAHVKFSDDRATRPKPAVPSWQYRIERRIGEARALIGKLICFREGNTRPRVMRFVRRAFSGTDISARDYMSRVTERIDFLKQKVYAWANRIRRYKRVDRYTQNRTFQRDERWVYRAWERPDQGVADTRLPDDDAMCSFWRSIWSVPVSHTEGEWTREVERACDLVPEMGAITISPQDVVRAVRPLPNWKSPGPDGLHNFWIKWFTRSHARLATLFQSALESGSLPEFLTTGITPLLHKSGSTAEPKNYRPITCLPTVYKVLTSILRAKINKHIDDNSVMSASQNGCRNGSRGTKELLLIDMAISQQVRRSRRDLSTCWIDYKKAYDSVPHTWLMRVLELYKVDSTLRIFLMSCMGQWRTVLRYPGCRQIQRNSEPIRIERGIFQGDSLSPLWFCLALNPLSTLLEDSGLGYRLRRGGQVISHLLYMDDLKLFAPNDFQLMELLKVTETFSSAIRMEFGVDKCAVMHVKRGEIVESVGTQLSDSINLRSLSATETYKYLGMSEALGINVADMKQSLKERFFGRLKKVFNSLLSGGNKVRAFNGWVMPVLMYSFGILKWTQTELDALDRRVRTLLTAYRMHHPRSSVMRLYIPRRCGGRGFLNAKTLHNREICSLREYFLETDVGMHRDVVAVDKGLTPLSLAKENWRKPVVLDTNDRMEVWQSKELHGRFFRALHGPDVDLPASVAWLRSGDLFGETEGFVCAIMDEVMMTNNYRRFIVKDGTVDICRACHRPGVSIRHIISGCSRLANGEYLHRHNLVARIIHQQLALKYNLVESEVPHYKYVPDPVLENGSITLYWDRSIVTDRTIVANKPDIVVVDRSERRAMIVDITVPYDGNLVKAEKDKQIKYLDLAHEVVDMWDVDSAIIVPIVVSAHGLIAKSLDQYLRRLSLGSWIKGLIQKAVLLDTARIVRRFLSLEP

SEQ ID NO: 12610 - protein, 1197 aa, Noctua janthe
MLTRSATRRARLSPPDPSLSSASPPPESSPIVSAVTPAVAVASSSSDEYFSPPTTPPPVRRRGGRRPPDGLGPRGPPASDRVPAPGGSVPRMRWTQSINANVMRAYYGATEGGNNLTAYRVRMLSLFQVLEPAVNVSAQRLSDQVRVIQRNGMLDDTVLDRLRTEMQSSHVIATPPQTVVPPQSTIIPTHDNNVSNDMVTNVSTQCNEEMRCALEGAIREYRFMQPDLRPRVPRLPMHNKNKVLVAVLDSQLSNYFDNCENLTDAHSVLYCAAVAACRVAHVKFSDDRATRPKPAVPSWQYRIERRIGEARALIGKLICFREGNTRPRVMRFVRRAFSRTDISARDYMSRVTERIDFLKQKVYAWANRIRRYKRRVDRYTQNRTFQRDERWVYRAWERPDQGVADTHLPDDDAMCSFWRSIWSVPVSHTEGEWTREVERACDLVPEMGAITISPQDVVRAVRPLPNWKSPGPDGLHNFWIKWFTRSHARLAILFQSALESGSLPEFLTTGITHLLHKSGSTAEPKNYRPIACLPTVYKVLTSILRAKINKHIDDNSVMSASQNGCRNGSRGTKELLLIDMAISQQVRRSRRDLSTCWIDYKKAYDSVPHTWLMRVLELYKVDSTLRIFLMSCMGQWRTVLRYPGCRQIQRNSEPIRIERGIFQGDSLSPLWFCLALNPLSTLLEDSGLGYRLRRGGQVISHLLYMDDLKLFAPNDLQLMELLKVTETFSSAIRMEFGVDKCAVMHVKRGEIVESVGTQLSDSINLKSLSATETYKYLGMSEVLGINVADMKQSLKERFFGRLKKVFNSLLSGGNKVRAFNGWVMPVLMYSFGILKWTQTELDALDRRVRTLLTAYRMHHPRSSVMRLYIPRRCGGRGFLNAKTLHNREIYSLREYFLETDVGMHRDVVAVDKGLTPLSLAKENWRKPVVLDTNDRMEVWQSKELHGRFFRALHGPDVDLPASVAWLRSGDLFGETEGFVCAIMDEVMMTNNYRRFIVKDGTVDICRACHRPGESIRHIISGCSRLANGEYLHRHNLVARIIHQQLALKYNLVESEVPYYKYVPDPVLENGNITLYWDRSIVTDRTIVANKPDIVVVDRSERRAMIVDITVPHDGNLVKAEKDKQIKYLDLAHEVVDMWDVDSAIIVPIVVSAHGLIAKSLDQYLRRLSLGSWIKGLIQKAVLLDTARIVRRFLSLEP

SEQ ID NO: 12611 - protein, 1205 aa, Noctua janthe
MLTRRRAKLHETHPPSPGSSLSSASHSPGRATSVSAASPVAAVASSSSDEFFSPPSTPPPPRRRGRGRPPAGLGPRGQQATNRVPAAGGNVSRIRWTQSMNENVMRAYYGATEGGINLTAYRCRMLSLFQTLEPAVNVSAQRLSDQVRVILNNHRLDDATLDRLRSEMQISPASNPLPSQNVTHVPAVLPLRANHHAEEEDDRTISADNLCNVELRSALEGAIREYRFMSPDLRPRLPRLPMNKKNRALVCALDALLPNFIESSANLCDTHSILYCTAVAACRVANVKFPNTDSPTRPKSAVPAWQCRIERRINEARALIGKLICFREGNTRPRVMRFVRRAFSGTDISPREYMSRVTERIDFLKQKVYAWANRIRRYRRRVDRYTQNRMFQSDKRWVYRTWERPVTIQGVTDAHLPDNDAMNAFWRSIWSVPVGHTEGDWMRVVERACDSIPEMEAISISPLDVACAVRPLPNWKSPGPDGLHSFWIKWLQRSHACLASQFQSSLETGSLPPFFTTGVTHLLYKSGSTVEPKNYRPITCLPTVYKVLTSILRAKIVRHIDSNSIMSVSQNGCKNGSRGTKELLLIDMAISQQVRRSRRDLSTCWIDYKKAYDSVPHTWLMRVLELYKIDATLRTFLMSCMGQWRTVLLYPGCRQVLGNDEPIRIERGIFQGDSLSPLWFCLVLNPLSTLLEDSGLGYRLRRGGKVISHLLYMDDLKIFAPSNLQLMELLKVTETFSSAIRMEFGLDKCAVMHVKRGEIMESVGTQLSDSIFLRSLSSTETYKYLGMSEALGINAADMKQSLKERFFGRLNKVLNSLLSGGNKVRAFNGWVMPVLMYSYGILKWTQTELDALDRKVRTLLTANRMHHPRSSVMRLYIPRKCGGRGFLNAKTLHNREVCSLREYFLETDVGMHRDVVSVDKSFTPLSLANQNWRKPVVLDTNNRREVWQSKELHGRFFRALHGPDVDFLASVSWLRFGDLFGETEGFVCAIMDEVIMTNKYRKYIIKDGTVDICRACHRPGESIRHIVSGCSRLANGEYLHRHNLVAKIIHQQLALQYNLVSSEVPYYKYVPDPVLENGHATLYWDRSIITDRTILANKPDIVVIDRRERRAMIVDITVPHDENLVKAENDKKIKYLDLAHEVVDMWDVDSAIIVPIVVTVNGLIAESLDQHLRRLSLRGCVRSLIQKAVLLDTARIVRRFLSLEP

SEQ ID NO: 12612 - protein, 974 aa, Noctua janthe
MQPDLRPRVPRLPMHNKNRVLVAVLDSQLSNYFDNCEDLTDAHSFLYCAAVAACRVAHVKFSDDRATRPKPAVPSWQYRIERRIGEARALIGKLICFREGNTRPRVMRFVRRAFSGTDISARDYMSRVTERIDFLKQKVYAWANRIRRYKRRVDRYTQNRTFQRDERWVYRAWERPDQGVADTRLPDDDAMCSFWRSIWSVPVSHTEGEWTREVERACDLVPEMGAITISPQDVVRAVRPLPNWKSPGPDGLHNFWIKWFTRSHARLAILFQSALESGSLPEFLTTGITHLLHKSGSTAEPKNYRPITCLPTVYKVLTSILRAKINKHIDDNSVMSASQNGCRNGSRGTKELLLIDMAISQQVRRSRKDLSTCWIDYKKAYDSVPHTWLMRVLELYKIDATLRTFLMSCMGQWRTVLRYPGCRQIQRNSEPIRIERGIFQGDSLSPLWFCLALNPLSTLLEDSGLGYRLRRGGQVISHLLYMDDLKLFAPNDLQLMELLKVTETFSSAIRMEFGVDKCAVMHVKRGEIVESVGTQLSDSINLRSLSATETYKYLGMSEALGINVADMKQSLKERFFGRLKKVFNSLLSGGNKVRAFNGWVMPVLMYSFGILKWTQTELDALDRRVRTLLTAYRMHHPRSSVMRLYIPRRCGGRGFLNAKTLHNREICSLREYFLETDVGMHRDVVAVDKGLTPLSLAKENWRKPVVLDTNDRMEVWQSKELHGRFFRALHGPDVDLSASVAWLRSGDLYGETEGFVCAIMDEVMMTNNYRRFIVKDGTVDICRACHRPGESIRHIISGCSRLANGEYLHRHNLVARIIHQQLALKYNLVESEVPYYKYVPDPVLENGSITLYWDRSIITDRTIVANKPDIVVVDRSERRAMIVDITVPHDENLVKAEKDKQIKYLDLAREVVDMWDVDSAIIVPIVVSVHCLIAKSLDQYLRRLSLGSWIKGLIQKAVLLDTARIVRRFLSLEP

SEQ ID NO: 12613 - protein, 1200 aa, Mythimna ferrago
MLTRAAARRARPPPPASSLSSASPPPDPSPTVSAVTPAVAAASSSSDEYYSPPTTPPPARRRGGRRPPACFGPQGPPASDRVPATGGSVPRMRWTQSTNENVMRAYYGATEGGNNLTAYRVRMLSLFQVLEPAVNVSAQRLSDQVRVIQRNHMLDALTLDRLRTEMSNHVIAPSSQPVVPVMVPPSNHVANPADVESTDMVIQVSTQCTNELRSALECAIREYRNMPSVLRPRLPRLPMHNKNKALVAALDMQLSNYFDNCKDLTDAHSIMYCAAVAACRVAHVKFPNSDVATRPKPAVPAWQCRIERRIGGARALIGKLICFREGNTRPRVMRFVRRAFSGTDICPRDYMLRVTERIDFLKQKVYAWANRIRRYKRRVERYTQNRAFQSNERWVYRAWERPDQGVTDTRLPDDDAMCSFWRNIWSVPVSHTEGGWTREVEQACEPITEMGAITISPQDVARAVRPLPNWKSPGPDGLHNFWIKWLQRSHACLASQYQAALESSSLPEFLTTGVTHLLHKSGSTAEPKNYRPITCLPTVYKVLTSILRDKINNHIDNNSIMSASQNGCRKGSRGTKELLLIDMAISQQVRRSRKDLSTCWIDYKKAYDSVPHTWLMRVLELYKIDATLRTFLMSCMRQWRTVLRYPGCRNIQRSSEPVRIERGIFQGDSLSPLWFCLALNPLSTLLENSGLGYQLKRGGQVTSHLVYMDDLKLFAPNKLQLMELLKVTETFSSAIRMEFGVDKCAVMHVKRGEIVESVSTQLSDSISLRSLSATETYKYLGMSEALGINATDMKQSLRERFFGRLKKVFNSLLSGGNKVRAFNGWVMPVLMYSFGVLKWTQTELDALDRRVRSLLTANRMHHPRSSVMRLYIPRKCGGRGFLNAKTLHNREVCSLREYFLAADVGMHRDVVAVDKGLTPLSLANENWRKPVVLDTNDRKEVWQSKELHGRFFRALHGPDVDQLASVAWLRVGDLFGETEGFVCAIMDEVIMTKNYRRFIVKDGTVDICRACHRPGESIRHIISGCSRLANGEYLHRHNLVARIIHQQLALKYSLVESEVPYYRYVPDPVLDNGDITIYWDRSIITDRTIVANKPDIVVVDRSERRAMTVDISVPHDENLVKAEKDKQIKYIDLAREVVDMWNVDSAIIVPIVVSGNGLIAKSLDQHLRRLALGSWIKGLIQRAVLLDTARIVRRFLSLEP

SEQ ID NO: 12614 - protein, 956 aa, Mythimna ferrago
MPLELRPRLPRLPMHNKNKALVAALDSQLSNYFDDCEDLTDTHSIMYCAAVAACRVAHVKFPNSDVATRPKLAVPAWQCRIEHRIGGARALIGKLICFREGNTRPRVMRFVRRAFSGTDISPRDYMSRVTERIDFLKQKVYAWANRIRKYKRRVERYIQNSTFRSNERWVYRAWERPDQGVTDTRPPDDDAMYSFWRNIWSVPVSHTEGGWTREVERACESITEMGAFTISPQDVARAVRPLPNWKSPGPDGLHNFWIKWLQRSHARLASQYQAALESGSLPEFLTTGVTHLLHKSGSTAEPKNYRPITCLPTVYKVLTSILRAKINHHVDNNAIMSASQNGCRNGSRGTKELLLIDMAISQQVRRSRKDLSTCWIDYKKAYDSVPHTWLMRVLELYKVDATLRTFLMSCMRQWRTVLRYPGCRNIQRNSEPVRIERGIFQGDSLSPLWFCLALNPLSTLLENSGLGYRLKRGGQVISHLLYMDDLKLFAPNNLQLMELLKVTETFSSAIRMEFGVDKCAVMHIKRGEIVESVGIQLSDSIHLRSFSPTETYKYLGMSEALGINATDMKQSLRERFFGRLKKVLNSLLSGGNKVRAFNGWVMPVLMYAFGVLKWTQTELDALDRRVRTLLTAYRMHHPRSSVMRLYIPRKCGGRGFLNAKSLHNREVCSLREYFLAADGGMHRDVVAVDKGLTPLSLANENWRKPVVLDTNVRREVWQSKELHGRFFRALHGPDVDQLASVAWLRVGDLFGETEGFVCAIMDEVIMTNNYRRFIVKDGTVDICRACHRPGESIRHIISGCSRLANGEYLHRHNLVARIIHQQLALKYSLVESEVPYYRYEPDPVLDSGDITLYWDRSIITDRTIVANKPDIVVVDRSERRAMIVDISVPHDENLAKAEKDKQIKYIDLAREVVDMWEVDSAIIVPIVVSANGLIAKSLDQHLRRLSLGDWIWTRPV

SEQ ID NO: 12615 - protein, 1200 aa, Mythimna ferrago
MLTRAAARRARPPPPASSLSSASPPSEPSLTESAVTPAVAAASSSSDEYYSPPTTPPPTRRRGGRRPPACLGPRGPPASDRVPAAGGSVPRMRWTQSTNENVMRAYYGATEGGNNLTAYRVRMLSLFRVLEPAVNVSAQRLSDQVRVIQRNHMLDDTVLDRLRTEMSDRVITAPSQPVVPVVAPPPSHISFHTDEVSTDTVTNVSTQCNNELRSALECAIREYRNMPLEFRPRLPRLPMRNKNKALVAALDSQLSNYFDDCEDLTDTHSIMYCAAVAACRVAHVKFPNSDVATRPKPAVPAWQCRIERRIGGARALIGKLICFREGNTRPRVMRFVRRAFSGTDINPRDYMSRVTERIDFLKQKVYAWANRIRRYKRRVERYTQNSTFRSNERWVYRAWERPDQGVTDTRLPDDDAMCLFWRNIWSVPVSHTEGGWTREVERACESITEMGAITISPQDVARAVRPLPNWKSPGPDGLHNFWIKWLQRSHARLASQYQAALESGSLPEFLTTGVTHLLHKSGSTAEPKNYRPITCLPTVYKVLTSILRAKINHHVDNNAIMSASQNGCRNGSRGTKELLLIDMAISQQVRRSRKDLSTCWIDYKKAYDSVPHTWLMRVLELYKVDATLRTFLMSCMRQWRTVLRYPGCRNIQRNSEPVRIERGIFQGDSLSPLWFCLALNPLSTLLENSGLGYRLKRGGQAISHLLYMDDLKLFAPNNLQLMELLKVTETFSSAIRMEFGVDKCAVMHIKRGEIVESVGIQLSDSIHLRSLSPTETYKYLGMSEALGINATDMKQSLKERFFGRLKKVLNSLLSGGNKVRAFNGWVMPVLMYAFGVLKWTQTELDALDRRVRTLLTAYRMHHPRSSVMRLYIPRKCGGRGFLNAKTLHNREVCSLREYFLAADGGMHRAVVAVDKGLTPLSLANENWRKPVVLDTNVRKEVWQSKELHGRFFRALHGPDVDQLASVAWLRVGDLFGETEGFVCAIMDEVIMTNNYRRFIVKDGTVDICRACHRPGESIRHIISGCSRLANGEYLHRHNLVARIIHQQLALKYSLVESEVPYYRYVPDPVLDSGDITLYWDRSIITDRTIVANKPDIVVVDRRERRAMIVDISVPHDENLVKAEKDKQIKYIDLAREVVDMWNVDSAIIVPIVVSANGLIAKSLDQHLRRLSLSGWIKGLIQKAVLMDTARIVRRFLSLEP

SEQ ID NO: 12616 - protein, 960 aa, Mythimna ferrago
MHRKNRALVCALDSQLSNCFDSSEDLSDTHSILYCAAAAACRVAHVKIPNNDRATQPAKPAWQCRIERRIGETRALIGKLICFREGNTRPRVMRFVRRAFSGTDISPRDYLPRITERIDFLKQKVYAWANRIRRYKRRVERYTQNHTFQSNERWVYRAWERPNQSVIDTRLPDDDAMYSFWRSIWSVPVNHTEGDWTREIERECELIPEMGAINISPQDVACAVRPLPNWKSPGPDGLHNFWLKWFQSSHARLASQFQSALESGSLPQFLTTGITHLLHKSGSTAEPKNYRPITCLPTVYKVLTSILRAKINNHIETNSIMSASQNGCRNGSRGTKELLLIDVAISQQVRRSRRDLSTCWIDYKKAYDSVPHTWLMRVLELYKVDATLRAFLMSCMGQWRTVLHYPGCRRVSENSEPLRIERGIFQGDSLSPLWFCLALNPLSTLLEGSGLGYRLRREGQVISHLLYMDDLKLFASNNLQLMELLKVTETFSSAIRMEFGLDKCAVMHVKRGEIMESVGTQLSDSIHLRSLCSTETYKYLGMSEALGINAADVKQSLRERFFGRLNKVLNSLLSGGNKVRAFNGWVMPVLMYSFGILKWTQTELDALDRRVRTLLTANRMHHPRSSVMRLYIPRKCGGRGFLNAKTLHNREVCSLREYFLETDVGMHRDVVAVDKGLTPLSLASENWRKPIVMDTNERKEVWKGKELHGRFYRALHGPDVDLLASVSWLRFGNLFGETEGFVFAIMDEVIMTNNYRKYIVKDGTVDICRACHRPGESIRHIISGCSHLANGDYLHRHNLVARIIHQQLALKYNLVESEVPYYKYVPDPVLENGSVTLYWDRSIITDRTIVANKPDIVVIDRLERRTMIVDIAVPHDENLVKAEKDKQTKYLDLAREVVDMWEVDRAIIVPIVVTANGLIAKSLDQHLRRLSLGSWIKGLIQKAVLLDTARIVRRFLSQEP

SEQ ID NO: 12617 - protein, 930 aa, Mythimna ferrago
MYCAAVAACRVAHVKFPNSDVATRPKPAVPAWQCRIERRIGGARALIGKLICFREGNTRPRVMRFVRRAFSGTDISPRDYMSRVTERIDFLKQKVYAWANRIRRYKRRVERYTQNSTFRSNERWVYRAWERPDQGVTDTRLPDDDAMTSFWRNIWSVPVSHTEGGWTREVERACESITEMGAITISPQDVARAVRPLPNWKSPGPDGLHNFWIKWLQRSHARLASQYQAALESGSLPEFLTTGVTHLLHKSGSTAEPKNYRPITCLPTVYKVLTSILRAKINHHVDSNAIMSASQNGCRNGSRGTKELLLIDMAISQQVRRSRKDLSTCWIDYKKAYDSVPHTWLMRVLELYKVDATLRTFLMSCMRQWRTVLRYPGCRNIHRNSEPVRIERGIFQGDSLSPLWFCLALNPLSTLLENSGLGYRLKRGGQVISHLLYMDDLKLFAPNNLQLMELLKVTETFSSAIRMEFGVDKCAVMHIKRGEIVESVGIQLSDSIHLRSLSPTETYKYLGMSEALGINASDMKQSLRERFFGRLKKVLNSLLSGGNKVRAFNGWVMPVLMYAFGVLKWTQTELDALDRRVRTLLTAYRMHHPRSSVMRLYIPRKCGGRGFLNAKTLHNREVCSLREYFLAADGGMHRDVVAVDKGLTPLSLANENWRKPVVLDTNVRKEVWQSKELHGRFFRVLHGPDVDQLASVAWLRSGDLFGETEGFVCAIMDEVIMTNNYRRFIVKDGTVDICRACHRPGESIRHIISGCSRLANGEYLHRHNLVARIIHQQLALKYSLVESEVPYYRYVPDPVLDSGDITLYWDRSIITDRTIVANKPDIVVVDRRERRAMIVDISVPHDENLVKAEKDKQIKYIDLAREVVDMWDVDSAIIVPIVVSANGLIAKSLDQHLRRLSLSGWIKGLIQKAVLLDTARIVRRFLSLEP

SEQ ID NO: 12618 - protein, 1199 aa, Acronicta aceris
MLTRARARYIERHTRLTTPDSSPSSALQQPQHGRTSPDAAATASSSSDEYYSPPTSPPPVRRRGGRRPPDRLGPRGPLASGGIPASGGSVQRMRWTQSLNENVMRAYYGATEGGTNLTAYRGRMLSLFQALEPTIDVSTQRLSDQVRVIQRNHMLDDSVLDQLRSEVQSSRAIAHPSQSVAPSAMLPQTNLAEVGSDDRVTNVSTQYNEKLRSALEGAFREYRSSPPELRPRLPRLPMNNKNLALVCALDSLLSDYFDSSEDLADTHSILYCAAVAACRVAHVKFPESDRATRPKPMIPAWQSRIEQRIGEARALIGKLICFREGNTRPRVMRFVRRAFSGTNIDPRDYASCVTERIDFLKQKVYAWANRIRRYKRRAERYSLNRAFQGDQRWVYRTWDRPDNGVSDVCRPNDDAMSLFWRNIWSVPVNHTEDDWICDVERACESLPAMEEINISPQDVACAVHSVPNWKAPGPDGLHNFWIKWLRSSHARLASQFQSSLESGTLPQFLTTGITHLLHKSGDTADPKNYRPITCLPTVYKLLTSILRAKICYHIDESSIMSASQNGCRNGSRGTKELLLIDMTISQQVRRLRKNLSTCWIDYKKAYDSVPHTWLMRVLELYKVDVSLRTFLRSCMGQWRTVLHYPGCRQIQRISEPIRIERGIFQGDSLSPLWFCLALNPLSTLLEESRLGYRLRRGGQVISHLLYMDDLKLFASSDLHLMELLKITENFSNSIRMEFGVEKCAVMHVKRGGIVESVGIQLSDSTQLRSLASTETYKYLGMAEALGINVADMKQSLQVRFFGRLTKVLKSLLSGGNKVRAFNGWVMPVLMYSFGVLKWTQTELETLDRKVRTLLTAYRMHHPRSSVMRLYIPRKCGGRGFLNAKNLHNREVCSLREHFLKTEMGMHRDVVAVDNGLTPLSMAKENWRKPVVLSTNDRRNVWQGKELHGRYYRALHEPGVDTLASVSWLRFGDLFGETEGFVCAIMDEVMMTNNYRKFIVKDGTVDICRACHRPGESIRHIISGCSRLANGEYLHRHNLVARIIHQQLALKYNLVESEVPYYKYVPDPVLENGHATLYWDRSIITDRTIIANKPDIVVIDRLERRAMIVDITVPHDENLFKAEKEKEIKYLDLAHEVVDMWGVDAAIIVPIVVSANGLIAKSLDRHLKRLSLGGWIKGLIQKAVLLDTARIVRRFLSLGP

SEQ ID NO: 12619 - protein, 1199 aa, Acronicta aceris
MLTRARARYIERHTRLTTPDSSPSSALQQPQHGRTSPDAAATASSSSDEYYSPPTSPPPVRRRGGRRPPDRLGPRGPLASGGIPASGGSVQRMRWTQSLNENVMRAYYGATEGGTNLTAYRGRMLSLFRALEPTIDVSTQRLSDQVRVIQRNHMLDDSVLDQLRSEVQSSRAIAHPSQSVAPSAMLPQTNLAEVGSDDRVTNVSTQYNEKLRSALEGAFREYRSSPPELRPRLPRLPMNNKNLALVCALDSLLSDYFDSSEDLADTHSILYCAAVAACRVAHVKFPESDRATRPKPMIPAWQSRIEQRIGEARALIGKLICFREGNTRPRVMRFVRRAFSGTNIDPRDYASCVTERIDFLKQKVYAWANRIRRYKRRAERYSLNRAFQGDQRWVYRTWDRPDNGVSDVCRPNDDAMSLFWRNIWSVPVNHTEDDWICDVERACESLPAMEEINISPQDVACAVHSVPNWKAPGPDGLHNFWIKWLRSSHARLASQFQSSLESGTLPQFLTTGITHLLHKSGDTADPKNYRPITCLPTVYKLLTSILRAKICYHIDESSIMSASQNGCRNGSRGTKELLLIDMTISQQVRRLRKNLSTCWIDYKKAYDSVPHTWLMRVLELYKVDVSLRTFLRSCMGQWRTVLHYPGCRQIQRISEPIRIERGIFQGDSLSPLWFCLALNPLSTLLEESRLGYRLRRGGQVISHLLYMDDLKLFASSDLHLMELLKITENFSNSIRMEFGVEKCAVMHVKRGGIVESVGIQLSDSTQLRSLASTETYKYLGMAEALGINVADMKQSLQVRFFGRLTKVLKSLLSGGNKVRAFNGWVMPVLMYSFGVLKWTQTELETLDRKVRTLLTAYRMHHPRSSVMRLYIPRKCGGRGFLNAKNLHNREVCSLREHFLKTEMGMHRDVVAVDNGLTPLSMAKENWRKPVVLSTNDRRNVWQGKELHGRFYRALHEPGVDTLASVSWLRFGDLFGETEGFVCAIMDEVMMTNNYRKFIVKDGTVDICRACHRPGESIRHIISGCSRLANGEYLHRHNLVARIIHQQLALKYNLVESEIPYYKYVPDPVLENGHATLYWDRSIITDRTIIANKPDIVVIDRLERRAMIVDITVPHDENLFKAEKEKEIKYLDLAHEVVDMWGVDAAIIVPIVVSANGLIAKSLDRHLKRLSLGGWIKGLIQKAVLLDTARIVRRFLSLGP

SEQ ID NO: 12620 - protein, 1199 aa, Acronicta aceris
MLTRARARYIEHHTRLTTPDSSPSSALQQPQHGRTSPNAAATASSSSDEYYSPPTSPPPVRRRGGRRPPDRLGPRGPLASGGIPASGGSVQRMRWTRSLNENVMRAYYGATEGGTNLTAYRGRMLSLFQALEPTIDVSTQRLSDQVRVIQRNHMLDDSVLDQLRSEVQSSRAIAHPSQSVAPSATLPQTNLAEVGSDDRVTNVSTQYNEKLRSALEGAFREYRSSPPELRPRLPRLPMNNKNLALVCALDSLLSDYFDSSEDLADTHSILYCAAVAACRVAHVKFPESDRATRPKPMIPAWQSRIEQRIGEARALIGKLICFREGNTRPRVMRFVRRAFSGTNIDPRDYASCVTERIDFLKQKVYAWANRIRRYKRRAERYSLNRTFQGDQRWVYRTWDRPDNGVSDVCRPNDDAMSSFWRNIWSVPVNHTEDDWICDVERACESLPAMDEINISPQDVACAVHSVPNWKAPGPDGLHNFWIKWLRSSHARLASQFQSSLESGTLPQFLTTGITHLLHKSGDTADPKNYRPITCLPTVYKLLTSILRAKICYHIDESSIMSASQNGCRNGSRGTKELLLIDMTISQQVRRLRKNLSTCWIDYKKAYDSVPHTWLMRVLELYKVDVSLRTFLQSCMGQWRTVLHYPGCRQIQRISEPIRIERGIFQGDSLSPLWFCLALNPLSTLLEESRLGYRLRRGGQVISHLLYMDDLKLFASSDLHLMELLKITENFSNSIRMEFGVEKCAVMHVKRGGIVESVGIQLSDSTQLRSLASTETYKYLGMAEALGINVADMKQSLQVRFFGRLTKVLKSLLSGGNKVRAFNGWVMPVLMYSFGVLKWTQTELETLDRKVRTLLTAYRMHHPRSSVMRLYIPRKCGGRGFLNAKNLHNREVCSLREHFLKTEMGMHRDVVAVDNGLTPLSMAKENWRKPVVLSTNDRRNVWQGKELHGRYYRALHEPGVDTLASVSWLRFGDLFGETEGFVCAIMDEVMMTNNYRKFIVKDGTVDICRACHRPGESIRHIISGCSRLANGEYLHRHNLVARIIHQQLALKYNLVESEVPYYKYVPDPVLENGHATLYWDRSIITDRTIIANKPDIVVIDRLERRAMIVDITVPHDENLFKAEKEKEIKYLDLAHEVVDMWGVDAAIIVPIVVSANGLIAKSLDRHLKRLSLGGWIKGLIQKVVLLDTARIVRRFLSLGP

SEQ ID NO: 12621 - protein, 1192 aa, Eilema sororculum
MLTRAQATRNRSAPTTSPDSSLSSAAQPPTVEPAASSSSSSDEFFSPPTSPTPERRPGRGRPPTCLGPRRPPASNRAPATGGNVHRMRWTNSINENVMRAYFAATEGGTNLSAYRTRMLPLFQALEPTINTSAQRLSDQVRVIQRNRMLNETVLEALRLECLRNICVTPAPAPAPASTAERNDDTRVAPDDTPIPVSIQYNEEIKEALECALREYRSMPVHVRPRLPRLPIHRRNIALVSALDSLLPRYLENSENLGDTHSILYCTAVAACRMAGAKFPIKDPAIRPKFTIPAWQCRIERRVAEARVLIGKLICFRSGNTRPRVMRYVTRAFAGTDISPQDYTSRVTERIDFLKQKVCAWANRIRRYKKRVDRYTVNRMFQRDQRWVYRSWERTDESVDDVRRPDAEATNAFWRSIWSVPVSHTEGDWMREVERACETIPEMEEIYIDATDVDCAVRSLSNWKSPGPDGLHNFWLKWLRSSHVVLASQFQSAIESGTLPAFMTTGVTHLLHKTGSTLEPNNYRPITCLPTVYKLLTSILRAKINNHINNNSIMCASQNGCRNGARGTKELLLIDMAISQQARRNRKDLTACWIDYKKAFDSVPHTWLLRVLELYKVNTTLCTFLRSCMRQWRTVLFYPGCRQALGGGVPITIERGIFQGDSLSPLWFCLALNPLSTLLVNSGLGYRLRREGQMVSHLFYMDDLKLFAHTNPQLIALLKVTETFSNSIKMAFGVDKCAVIHVKRGRVVESEGIQLSDSTNLRSLLVTETYKYLGMSQALCINEVDMKQLLQERFFGRLKKVLNSLLSGGNKVRACNSWVMPLLMYSFGILKWTQTELDTIDRKVRTQLTAFRMHHPRSSVMRLYIPRKCGGRGFLNAKTLHNREVCNLRDYFLKSNVDMHRDVVNVDTGLTPLGLAKENWRRPTIVSTDSRREVWQSKELHGRFYRALHRPEVDLLASVAWLRFSDLFGETEGFVCAIADEVIKTNNYRKYIMRDGTIDICRACHQPGESLRHITSGCSRLANGEYLHRHNQVARIIHQRLALKYNLVEVEVPYYRYVPEPVQENSHITLYWDRSIITDRTVVANKPDIVVIDRSERRALIVDVTIPHDENLVKAETDKQVKYLDLAHEVVDMWNVDSAIIVPIVVSVNGLIAKSLDQHLKRLGLDGWVKGQMQKAVLLDTARIVRKFLSLEP

SEQ ID NO: 12622 - protein, 1196 aa, Eilema sororculum
MLTRAKTKIIIQDAHLTPTDSSCSSASQAPGTTSPRPTPVEASSSDEYFSPPTSPTPVRRPGRGRPPTCLGPRRPPASNRAPAAGGNVHRMRWTNSINENVMRAYFAATEGGTNLSAYRSRTLPLFQVLEPSVNTSAQRLSDQVRVIQRNHMLNETVLETLRQECLRNICVTPALAPAPASTTALNEDSHVTRDDTPIPVSIQYNEEIKEALEYALREYRSMPIHVRPRLPRLPIHRRNIALVSALDSLLPKYLENSENLGDTHSILYCTAVAACRMAGAKFPIKDPAIRPKPAIPAWQCRIERRVAEARVLIGKLICFRSGNTRPRVMRYVTRAFAGTNISPQDYTSRVTERIDFLKQKVCAWANRIRRYKKRVDRYTVNRMFQRDQRWVYRSWERTDESVDDLRRPDAEATNAFWRSIWSVPVSHTEGDWMREVERACETIPEMEEIYIDATDVDCAVRSLSNWKSPGPDGLHNFWLKWLRSSHVVLASQFQSAIESGTLPAFMTTGVTHLLHKTGSTLEPNNYRPITCLPTVYKLLTSILRAKINNHINNNSIMCTSQNGCRNGARGTKELLLIDMTISQQARRNRKDLVACWIDYKKAFDSVPHTWLLRVLELYKVNTTLCTFLRSCMGQWRTVLLYPGCRQALGSGEPITIERGIFQGDSLSPLWFCLALNPLSTLLVNSGLGYRLRREGQMVSHLFYMDDLKLFAHTNPQLIALLKVTETFSNSIKMAFGVDKCAVIHVKRGRVVESEGIQLSDSTNLRSLLVTETYKYLGMSQALCINEVGMKQMLQERFFGRLKKVLNSLLSGGNKVRACNSWVMPLLMYSFGILKWTQTELDTIDRKVRTQLTAFRMHHPRSSVMRLYIPRKCGGRGFLNAKTLHNREVCNLKDYFLKSNVDMHRDVVNVDTGLTPLGLAKENWRRPTIVGTDSRREVWQSKELHGRFYRALHRPEVDLLASVSWLRFSDLFGETEGFVCAIADEVIKTNNYRKYIMRDGTIDICRACHQPGESLRHITSGCSRLANGEYLHRHNQVARIIHQRLALKYNLVEVEVPYYRYVPEPVLENSHITLYWDRSIITDRTVVANKPDIVVIDRSERRALIVDVTIPHDENLVKAEKDKQVKYLDLAHEVVDMWNVDSAIIVPIVVSVNGLIAKSLDQHLKRLGLDGWVKGQMQKAVLLDTARIVRKFLSLEP

SEQ ID NO: 12623 - protein, 1164 aa, Eilema sororculum
MQCNMTNNNNSSDEYFSPPTSPTPVRRPGRGRPPSSLGSRGPPASNRAPATGGNVRRMRWTSSINENVMRAYFAATGGGANLTAYRDRMLILFQDLEPTVNVSAQRLSDQVRAIQRCHLLDSSVLERLRSDLQNNDITPSPPQAVMQVVPQETQPVQTDCELDNVATSVSTQYIEQIRNALECAVRDYRSMNYQIRPRLPRLPVHKRNIALVCALDSLLPNYLDNCEHLGDTHSILYCAAYAACRVAGVKFPECNTAIRPKSGKPRWQCRIERRIAETRALIGKLICFRSGNTRPRVMRFVNRVFSGTGVSPFDYTSRVTERIDFLKQKVYAWANRIKRYKKRCDRYTLNCTFQRDERWVYRNWERADSVGDEHFPDVAATNTFWRNIWSVPVAHTEGDWVRKVKRSCEAIETMEPVIISEDDIACVVRSLPNWKAAGPDGLHNFWLKWLRSSHARLAFQFQSALESASLPSFMTTGITHLLFKSGCAMNPKNYRPITCLPTVYKLLTSVLRVKIASHITRNSILSCSQNGCRSGARGTKELLIIDTAVNQQVRRNRRDMATCWIDYKKTYDSVPHTWLLRVLELYKVDTTLCTFLEACMGQWSTALRYPGCRHIPDDGELIKIERGIFQGDSLSPLWFCLALNPLSTILEDSGLGYCLRRGSQVISHLLYMDDLKLFAPNNRQLMELLKVTETFSTSIRMEFGVDKCAVMHVKKGEIVESEGIELSDSTKLRSLSVNDTYKYLGISQALGVNESDMKQSLRERFFCRLKKVLKSLLSGGNKVRAYNDWVIPVLTYSFGILRWTQTELEALDRRVRTLLTAYRMHHPRSSVMRLYIPRKFGGRGFLNIKTLHNREICNLREYFLKVNVDVHRDVVAVDRGLTPLALAKENWRKPAILSINDRKEVWKSKELHGRFHRALYGPDVDLKASVSWLRFGDLFGETEGFVCAITDEVVMTNNYRRYILKDGTVDICRACHRPGESLRHIISGCSRLANGEYLHRHNQVARIVHQQLALKYKLVDSEVPYYRYVPDPVLDDGRVTLYWDRSVITDRTIVANKPDIVVIDRLERRAIIIDVTIPHDENLVKAEKDKQIKYLDLAHEVVDMWNVDSAIIVPIVVSVHGLIAKSLDQHLKRLALDSWVKGLMQKAVLLDTARIVRRFLSLEP

SEQ ID NO: 12624 - protein, 1195 aa, Eilema sororculum
MITRAKTKLLQDAHLTPTDSSCSSASQVPEITSPRPTPAEASSSDEYFSPPTSPTPVRRPGRGRPPTCLGPQRPPASNRAPATGGDVHRMRWTNSINENVMRAYFAATGGGTNLSAYRSRILPLFQALEPSVNTSAQRLSDQVRVIQRNRMLNETVLETLRLECLRNTCVTPAPAPAPASTTAINEESYVTRDDTPIPVSIQYNEEIKEALECALREYRSMPIHVRPRLPRLPIHRRNIALVSALDSLLPKYLENSENLGDTHSILYCTAVAACRMAGAKFPIKDPAIRPKPAIPAWQCRIERRVAEARVLIGKLICFRSGNTRPRVMRYVTRAFAGTNISPQDYTSRVTERIDFLKQKVCAWANRIRRYKKRVDRYTVNRMFQRDQRWVYRSWERTDESVDDVRRPDAEATNAFWRSIWSVPVSHTEGDWMREVERACETIPAMEEIYIDATDVDCAVRSLSNWKSPGPDGLHNFWLKWLRSSHVVLASQFQSAVESGTLPTFMTTGVTHLLHKTGSTLEPNNYRPITCLPTVYKLLTSILRAKINNHINNNSIMCASQNGCRNGARGTKELLLIDMTISQQARRNRKDLAACWIDYKKAFDSVPHTWLLRVLELYKVNTTLCTFLRSCMGQWRTVLFYPGCRQALGGDEPITIERGIFQGDSLSPLWFCLALNPLSTLLVNSGLGYRLRREGQMVSHLFYMDDLKLFAHTNPQLMALLKVTETFSNSIKMAFGVDKCAVIHVKRGRVVESEGIQLSDSTNLRSLLVTETYKYLGMSQALCINEADMKQMLQDRFFGRLKKVLNSLLSGGNKVRACNSWVMPLLMYSFGILKWTQTELDTIDRKVRAQLTAFRMHHPRSSVMRLYIPRKCGGRGFLNAKTLHNREVCNLRDYFLKSNVDMHRDVVNVDTGLTPLGLAKENWRRPTIVSTDSRREVWQSKELHGRFYRALHRPEVDLLASVSWLRFSDLFGETEGFVCAIADEVIKTNNYRKYIMRDGTIDICRACHQPGESLRHITSGCSRLANGEYLHRHNQVARIIHQRLALKYNLVDVEVPYYRYVPEPVLENSHITLYWDRSIITDRTVIANKPDIVVIDRSERRALIVDVTIPHDENLVKAEKDKQVKYLDLAHEVVDMWNVDSAIIVPIVVSVNGLIAKSLEQHLKRLGLDGWVKGQMQKAVLLDTARIVRKFLSLEP

SEQ ID NO: 12625 - protein, 1189 aa, Eilema sororculum
MLTRAQARNRNAQTTSPDSSLSSAAQPPAMEPAASSSSSSDEFFSPPTSPTPVRRPGRGRPPTCLGPRRPPASNRAPAAGGNVHRMRWTNSINENVMRAYFTATEGGTNLSAYRTRMLPLFQALEPSINTSAQRLSDQVRVIQRNRMLNETVLETLRQECLRNICVTPAPAPASTAEINNDTYVAPDDTPIPVSIQYNEEIKEALECALREYRSVPVHVRPRLPWLPIHRRNIALVSALDSLLPRYLENSENLGDTHSILYCAAVAACRMAGAKFPIKDPAIRPKSAIPAWQCRIERRVAEARVLIGKLICFRSGNTRPRVMRYVTRAFAGTDISPQDYTSRVTERIDFLKQKVYAWANRIRRYKRRVDRYTVNRMFQRDQRWVYRSWERTDESVDDVRRPDAEATNAFWRSIWSVPVSHTEGDWMCEVERACETIPEMEEIYIDATDVDCAVRSLSNWKSPGPDGLHNFWLKWLRSSHVVLASQFQSAIESGTLPAFMTTGVTHLLHKTGSTLEPNNYRPITCLPTVYKLLTSILRAKINNHINNNSIMCASQNGCRNGARGTKELLLIDMAISQQARRNRKDLTACWIDYKKAFDSVPHTWLLRVLELYKVNTTLCTFLRSCMGQWRTVLFYPGCRQALGGGVPITIERGIFQGDSLSPLWFCLALNPLSTLLVNSGLGYRLRREGQMVSHLFYMDDLKLFAHTNPQLIALLKVTETFSNSIKMAFGVDKCAVIHVKRGRVVESEGIQLSDSTNLRSLLVTETYKYLGMSQALCINEVDMKQMLQERFFGRLKKVLNSLLSGGNKVRACDSWVMPLLMYSFGILRWTQTELDTIDRKVRTQLTAYRMHHPRSSVMRLYIPRKCGGRGFLNAKTLHNREVCNLRDYFLKSNVDMHRDVVNVDTGLTPLGLAKENWRRPTIVSTDSRREVWQSKELHGRFYRALHRPEVDLLASVSWLRFSDLFGETEGFVCAIADEVIKTNNYRKYIMRDGTIDICRACHQPGESLRHITSGCSRLANGEYLHRHNQVARIIHQRLALKYNLVEVEVPYYKYVPEPVLQNSHITLYWDRSIITDRAVVANKPDIVVIDRSERRALIVDVTIPHDENLVKAEKDKQVKYLDLAHEVVDMWNFDSAIIVPIVVSVNGLIAKSLDQHLKRLGLDGWVKGQMQKAVLLDTARIVRKFLSLEP

SEQ ID NO: 12626 - protein, 1212 aa, Ptilodon capucinus
MTDAPRRNPRRQCRQRSAVRHYAQSTPPDQSPRSASPSPASIIRTSVTAVASSESDEYFSPPTSPPPVRRQRGRPPGHLGLLGQPAPNRVLVPSGVVRRMRWTSSMNENVMRAYYEATEGGTNLTAYRDRMLPLFQSLEPAVNVSAQRLSDQVRVIQRGNMLADTVLDRLRSEVQSRRVVPVASSQPAAQPVASATVTSRLAADSDVDRDNAPIDVSTQYNDLLRSTLEDVVREYRSMPNHLRPRIPRLPMHKRNRALVGALDSLLSIYFDSSDDLVDTHSILYCAAITVCRVARVKVFNTDTATRPKPAVPAWQCRIERRISEARALIGKLSCFREGNTRPRVMRFVKRAFAGTDVSSREYISRITERIDFLKQKIYAWANRIRRYKARVDRYSQNSMFQRDQRWVYRSWERPNEPVSELQRPDDNAMTTFWRDIWSVPVTHYEGNWIGDVERMCEPIKEMEAISIGPLDVANAVRSLPNWKAPGPDGLHNFWLKWLRSSHVRLASQFQSALQSGSLPEFITTGVTHLLHKTGSTTDPKNYRPITCLPTIYKTLTSILRAKIARHVEDNSIMSASQNGCRSGSRGTKELLLIDMTICQQARRNRKDLSTCWIDYKKAYDSVPHTWLVRVLELYKIDTTLRTFLESCMRQWKTVLLCPGSRQILGNGEPIRIERGIFQGDSLSPLWFCLALNPLSTLLEGSGFGFRLRRGGQVISHLLYMDDLKLFAPTALRLSGLLKVTETFSNSIRMEFGVDKCAVMHAKQGRMVESEGIQLSDSIQLRSLAATETYKYLGMSQGLGISETDMKQLLRDRFLGRLKKVLKSLLSGGNKVRAYNGWVMPVLMYSFGILKWTQTELDALDRTVRTTLTAYRMHHPRSSVMRLYIPRKCGGRGFLNVKTLHNREICSLREYFLRADGEMHVDVVAVDNGLTPLSLAKENWRKPVVLTTDDRRVVWQGKELHGRYYRALHGPDVDLAASVAWLRFGDLFGETEGFVCAIMDEVVMTNNYRRYILRDGTIDICRACHRPGESLRHIISGCSRLANGQYLHRHNQVARIVHQQLALKYHLVTSEVPYYRYEPQPVLEEGHITLYWDRSIITDRTIVANKPDIVLIDRQERRAMIIDITVPHDENLVKAEKDKESKYLDLAHEVVDMWDIDAAIIVPIVVSAHGLLAKSLDKHLKRLALGSWIKGQIQKAVLLETARIVRKFLSLEP

SEQ ID NO: 12627 - protein, 1212 aa, Ptilodon capucinus
MTDAPRRNPRRLCRQRTVNEPNAQSTPPDPSPRSASPSPASIIRTSVTAVASSESDEYFSPPTSPPPVRQQRGRPPGHLGLLGQPAPNRVLVPSGVVRRMRWTSSINENVMRAYYEATEGGTNLTAYRNRMLPLFQSLEPAVNVSAQRLSDQVRVIQRGNMLADTVLDRLRSEMQSRRVVPVASSQPAAQPVASATVTSRLAADSDVDRDNAPINVSNQYNELLRSTLEDVVQVYRSMPNHLRPRIPRLPMHKGNRGLVGALDSLLSIYFDSSDNLADTHSILYCAAITVCRVARVKVFNTDTATRPKPAVPAWQCRIERRISEARALIGKLSCFREGNTRPRVMRFVKRAFAGTDVSPREYISRVTERIDFLKQKIYAWANRIRRYKVRVDRYSQNSMFQRDQRWVYRSWERPSEPVSELQRPDDNATTTFWRDIWSVPVTHYEGDLIGDVERMCEPIKEMEAISIGPLDVANAVRSLPNWKAPGPDGLHNFWLKWLRSSHVRLASQFQSALQSGSLPEFITTGVTHLLHKTGSTTDPKNYRPITCLPTIYKTLTSILRAKIARHVEDNSIMSASQNGCRSGSRGTKELLLIDMTICQQARRNRKDLSTCWIDYKKAYDSVPHTWLVRVLELYKIDTTLRTFLESCMRQWKTVLLCPGSRQILGNGEPIRIERGIFQGDSLSPLWFCLALNPLSTLLEESGFGFRLRRGGQVISHLLYMDDLKLFAPTALQLTGLLKVTETFSNSIRMEFGVDKCAVMHAKQGRLVESEGIQLSDSIQLRSLAATETYKYLGMSQGLGISETDMKQLLRDGFLGRLKKVLKSLLSGGNKVRAYNGWVMPVLMYSFGILKWTQTELDTLDRTVRTTLTSYRMHHPRSSVMRLYIPRKCGGRGFLNVKTLHNREICSLREYFLRADGEMHVDVVAVDNGLTPLSLAKENWRKPVVLTTDDRRLVWQGKELHGRYYRALHGPDVDLAASVAWLRFGDLFGETEGFVCAIMDEVVMTNNYRKYILRDGTIDICRACHRPGESLRHIISGCSRLANGQYLHRHNQVARIIHQQLALKYRLVTPEVPYYRYEPQPVLEEGHISLYWDRSIITDRTIVANKPDIVLIDRQERRAMIVDITVPHDENLVKAEKDKESKYLDLAHEVVDMWDIDAAIIVPIVVSAHGLLAKSLDKHLKRLALGGWIKGQIQKAVLLETARIVRKFLSLEP

SEQ ID NO: 12628 - protein, 975 aa, Ptilodon capucinus
MPNHLRPRIPRLPMHKGNRALVGALDSLLSIYFDSSDNLADTHSILYCAAITVCRVARVKVFNTDTATRPKPAVPAWQCRIERRISEARALIGKLSCFREGNTRPRVMRFVKRAFAGTDVSPREYISRVTERIDFLKQKIYAWANRIRRYKVRVDRYSQNSMFQRDQRWVYRSWERPSEPVSELQRPDDNATTTFWRDIWSVPVTHYEGDWIGDVERMCEPIKEMEAISIGPLDVANAVRSLPNWKAPGPDGLHNFWLKWLRSSHVRLASQFQSALQSGSLPEFITTGVTHLLHKTGSTTDPKNYRPITCLPTIYKTLTSILRAKIARHVEDNSIMSASQNGCRSGSRGTKELLLIDMTICQQARRNRKDLSTCWIDYKKAYDSVPHTWLVRVLELYKIDTTLRTFLESCMRQWKTVLLCPGSRQILGNGEPIRIERGIFQGDSLSPLWFCLALNPLSTLLEESGFGFRLRRGGQVISHLLYMDDLKLFAPTALQLTGLLKVTETFSNSIRMEFGVDKCAVMHAKQGRLVESEGIQLSDSIQLRSLAATETYKYLGMSQGLGISETDMKQLLRDRFLGRLKKVLKSLLSGGNKVRAYNGWVMPVLMYSFGILKWTQTELDTLDRTVRTTLTAYRMHHPRSSVMRLYIPRKCGGRGFLNVKTLHNREICSLREYFLRADGEMHVDVVAVDNGLTPLSLAKENWRKPVVLTTDDRRLVWQGKELHGRYYRALHGPDVDLAASVAWLRFGDLFGETEGFVCAIMDEVVMTNNYRKYILRDGTIDICRACHRPGESLRHIISGCSRLANGQYLHRHNQVARIIHQQLALKYRLVTSEVPYYRYEPQPVLEEGHISLYWDRSIITDRTIVANKPDIVLIDRQERRAMIVDITVPHDENLVKAEKDKESKYLDLAHEVVDMWDIDAAIIVPIVVSAHGLLAKSLDKHLKRLALGGWIKGQIQKAVLLETARIVRKFLSLEP

SEQ ID NO: 12629 - protein, 1204 aa, Agrochola circellaris
MLTRSRARRLIDTHPTPSDSSLSSASQLPDPAPDVSPVIPAAAAASSSSDEYFSPPTSPPPARRGRGRPPASLGLRGPPASDRVPAPGGSVRRMRWTQTVNENVMRAYFGATEGGSNLTAYRGRMLSLFQVLEPAVNVSAQRLSDQVRVIQRNHMLDDAVLDRLRLESRNNRVTPASPLVAVQLQNSLSATPRPDHVGEEVDDGVISVSSQCNAQLRNALEDAFREYRSTPPGLRPRLPRLPMHKKNKALVCTLDSLLSNYFDGSKDLADTHSILYCAAVAACRVAHVKFPSSDRAPRPKPAVPAWQCRIERRIGEARVLIGKLICFREGNTRPRVMRFVKRAFSGTDTSSRDYLTRVTERIDFLKQKICAWANRIRRYRRRVERYTQNRTFQSDERWVYRAWERLDQGVIDTRLPDDDAMCSFWRSIWSAPVNHTEGDWTGKIERACERIPEMGAINISPQDVACAVRPLPNWKSPGPDGLHNFWIKWLQRSHARLASQFQSALESGSLPQFLTTGITHLLHKSGSTAEPKNYRPITCLPTVYKVFTSILRTKINKHIDTNSIMSVSQNGCKNGSRGTKELLLIDMAINQQVRRSRRDLSTCWIDYKKAYDSVPHTWLMRVLELYKVDATLRTFLISCMGQWRTVLRYPGCRQIQRISEPIRIERGIFQGDSLSPLWFCLALNPLSTLLEDSGLGYRLRRGGQVISHLLYMDDLKLFAPNNFQLVELLKVTETFSSAIRMEFGVDKCAVMHVKRGGIVESGGTQLPDSIHLRSLSSIETYKYLGMSEALGINTADMKQSLRERFFDRLNKVLNSLLSGGNKVRAFNGWVMPVLMYSFGILKWTQTELDALDRRVRTLLTVNRMHHPRSSVMRLYIPRKCGGRGFLNAKTLHNREVCSLREYFLEADVGMHRDVVSVDKGLTPLSLASENWRKPIVLDTNDRREVWQSKELHGRFYRALHGPDVDLLASVSWLRFGDLFGETEGFVFAIMDEVMMTNNYRKYIVKDGTVDICRACHRPGESIRHIISGCSRLANGDYLHRHNLVARIIHQQLALKYNLVESEVPYYKYVPDPVLENGNITLYWDRSIITDRTIVANKPDIVVIDRLERRTMIIDIAVPHDENLVKAEKDKQIKYLDLAREVVDMWDVDTAVIVPIVVTANGIIAKSLDQHLRRLSLGSWIKGLIQKAVLLDTARIVRRFLSQEP

SEQ ID NO: 12630 - protein, 1204 aa, Agrochola circellaris
MLTRSRARRLIDTHPTPSDSSLSSASQLPDPAPDVSTVIPAAAAASSSSDEYFSPPTSPPPARRGRGRPPASLGLRGPPASDRVPAPGGSVQRMRWTQTVNENVMRAYFGATEGGSNLTAYRGRMLSLFQVLEPAVNVSAQRLSDQVRVIQRNHMLDDAVLDRLRLESRNNRVTPASPLVAVQLQNSLSATPRPDHVGEEVDDGVISVSSQCNARLRNALEDAFREYRSTPPGLRPRLPRLPMHKKNKALVCTLDSLLSNYFDGSKDLADTHSILYCAAVAACRVAHVKFPSSDRAPRPKPAVPAWQCRIERRIGEARVLIGKLICFREGNTRPKVMRFVKRAFSGTDTSSRDYLTRVTERIDFLKQKICAWANRIRRYRRRFERYTQNRTFQSDERWVYRAWERLDQGVIDTRLPDDDAMCSFWRSIWSAPVNHTEGDWTGKIERACERIPEMGAINISPQDVACAVRPLPNWKSPGPDGLHNFWIKWLQRSHGRLASQFQSALESGSLPQFLTTGITHLLHKSGSTAEPKNYRPITCLPTVYKVFTSILRTKINKHIDTNSIMSASQNGCKNGSRGTKELLLIDMAINQQVRRSRRDLSTCWIDYKKAYDSVPHTWLMRVLELYKVDATLRTFLISCMGQWRTVLRYPGCRQIQRNSEPIRIERGIFQGDSLSPLWFCLALNPLSTLLEDSGLGYRLRRGGQVISHLLYMDDLKLFAPNNLQLVELLKVTETFSSAIRMEFGVDKCAVMHVKRGRIVESGGTQLPDSIHLRSLSSIETYKYLGMSEALGINTADMKQSLKERFFDRLNKVLNSLLSGGNKVRAFNGWVMPVLMYSFGILKWTQTELDALDRRVRTLLTVNRMHHPRSSVMRLYIPRKCGGRGFLNAKTLHNREVCSLREYFLETDVGMHRDVVSVDKGLTPLSLANENWRKPIVLDTNDRREVWQSKELHGRFYRALHGPDVDLLASVSWLRFGDLFGETEGFVFAIMDEVMMTNNYRKYIVKDGTVDICRACHRPGESIRHIISGCSRLANGDYLHRHNLVARIIHQQLALKYNLVESEVPYYKYVPDPVLENGNITLYWDRSIITDRTIVANKPDIVVIDRLERRTMIIDIAVPHDENLVKAEKDKQIKYLDLAREVVDMWDVDTAVIVPIVVTANGVIAKSLDQHLRRLSLGSWIKGLIQKAVLLDTARIVRRFLSQEP

SEQ ID NO: 12631 - protein, 1203 aa, Hydraecia micacea
MLTRSRARRLPTTHPTSSGSSLSSASQLPEPAPDVSPVSPAAAVASSSSDEYFSPPTTPPPVCRRGRGRPPASLGLRGPPASERVPAPGGSVQRMRWTQTVNENVMRAYFGATEGGSNLTAYRGRMLSLFQVLEPAVNVSAQRLSDQVRVIQRNHMLDNVVLDRLRLESRNSHVTPASSLVAVQLQPSVPLRPDCVDIEDDDEAISVSSQCNARLRSALEDAFREYRSIPPGLRPRLPRLPMHKKNKALVCALDSQLSNCFNDSKDLADTHSILYCAAVAACRVAHVKFPNSDRAPRPKPAVPAWQCRIECRIGEARALIGKLICFREGNTRPRVMRFVRRAFSGTDISSRDYLSRVTERIDFLKQKICAWANRIRRYRRRVERYTQNRRFQSDERWVYRAWERPDQGVTDTRLPDDDAMCSFWRNIWSVPVSHTEGDWTGKIERACDLIPEMEALIISPQDVARAVRPLPNWKSPGPDGLHNFWIKWFKRSHDRLASQFQSALESGSLPQFLTTGITHLLYKSGSTADPKNYRPITCLPTVYKVLTSILRTKINKHIDTNSIMSVSQNGCKNGSRGTKELLLIDMTINQQVRRSRKDLSTCWIDYKKAYDSVPHTWLMRVLELYKVDTTLCTFLMSCMGQWRTVLRYPGCRNIQRNSESIRIERGIFQGDSLSPLWFCLALNPLSTLLEDSGLGYRLRRGGQVISHLLYMDDLKLFAPNNLQLMELLKITETFSSAIRMEFGVDKCAVMHVKRGEIVESVGNQLSDSTNLRALSASDTYKYLGMSEALGINVTDMKQSLKERFFGRLKKVFNSLLSGGNKVRAFNDWVMPVLMYSFGILKWTQTELDALDRKVRTLLTANRMHHPRSSVMRLYIPRKCGGRGFLNAKTLHNREICSLREYFLETDVGMHRDVVVVDNGLTPLSLGKENWRKPVVLDTNDRMEVWQSKELHGRFFRALHGPDVDLLASVAWLRFGDLFGETEGFVCAIMDEVMMTNNYRRFIVKDGTVDICRACHRPGESIRHIISGCSRLANGEYLHRHNLVARIIHQQLALKYSLVESEVPYYRYVPDPVLENGNITLYWDRSIITDRTIVANKPDIVVMDRLERRAMIVDITIPHDENLVKAEKDKQIKYLDLAREVVDMWDVDSAIIVPIVVTANGLIAKSLDQHLRRLSLASWIKGLIQKAVLLDTARIVRRFLSLEP

SEQ ID NO: 12632 - protein, 1203 aa, Hydraecia micacea
MLTRSRARRLPTTHPTSSGSSLSSASQLPEPAPDVSPVSPAAAVASSSSDEYFSPPTTPPPVCRRGRGRPPASLGLRGPPASERVPAPGGSVQRMRWTQTVNENVMRAYFGATEGGSNLTAYRGRMLSLFQVLEPAVNVSAQRLSDQVRVIQRNHMLDNVVLDRLRLESRNSHVTPASSLVAVQLQPSVPLRPDCVDIEDDDEAISVSSQCNARLRSALEDAFREYRSIPPGLRPRLPRLPMHKKNKALVCALDSQLSNCFNDSKDLADTHSMLYCAAVAACRVAHVKFPNSDRAPRPKPAVPAWQCRIECRIGEARALIGKLICFREGNTRPRVMRFVRRAFSGTDISSRDYLSRVTERIDFLKQKICAWANRIRRYRRRVERYTQNRRFQSDERWVYRAWERPDQGVTDTRLPDDDAMCSFWRNIWSVPVSHTEGDWTGKIERACDLIPEMEALIISPQDVARAVRPLPNWKSPGPDGLHNFWIKWFKRSHDRLASQFQSALESGSLPQFLTTGITHLLYKSGSTADPKNYRPITCLPTVYKVLTSILRTKINKHIDTNSIMSVSQNGCKNGSRGTKELLLIDMTINQQVRRSRKDLSTCWIDYKKAYDSVPHTWLMRVLELYKVDTTLCTFLMSCMGQWRTVLRYPGCRNIQRNSEPIRIERGIFQGDSLSPLWFCLALNPLSTLLEDSGLGYRLRRGGQVISHLLYMDDLKLFAPNNLQLMELLKITETFSSAIRMEFGVDKCAVMHVKRGEIVESVGNQLSDSTNLRALSASDTYKYLGMSEALGINVTDMKQSLKERFFGRLKKVFNSLLSGGNKVRAFNDWVMPVLMYSFGILKWTQTELDALDRKVRTLLTANRMHHPRSSVMRLYIPRKCGGRGFLNAKTLHNREICSLREYFLETDVGMHRDVVVVDNGLTPLSLGKENWRKPVVLDTNDRMEVWQSKELHGRFFRALHGPDVDLLASVAWLRFGDLFGETEGFVCAIMDEVMMTNNYRRFIVKDGTVDICRACHRPGESIRHIISGCSRLANGEYLHRHNLVARIIHQQLALKYSLVESEVPYYRYVPDPVLENGNITLYWDRSIITDRTIVANKPDIVVMDRLERRAMIVDITIPHDENLVKAEKDKQIKYLDLAREVVDMWDVDSAIIVPIVVTANGLIAKSLDQHLRRLSLASWIKGLIQKAVLLDTARIVRRFLSLEP

SEQ ID NO: 12633 - protein, 1098 aa, Hydraecia micacea
MRAYFGATEGGSNLTAYRGRMLSLFQVLEPAVNVSAQRLSDQVRVIQRNHMLDNVVLDRLRLESRNSHVTPASSLVAVQLQPSVPLRPDCVDIEDDDEAISVSSQCNARLRSALEDAFREYRSIPPGLRPRLPRLPMHKKNKALVCALDSQLSNCFNDSKDLADTHSILYCAAVAACRVAHVKFPNSDRAPRPKPAVPAWQCRIECRIGEARALIGKLICFREGNTRPRVMRFVRRAFSGTDISSRDYLSRVTERIDFLKQKICAWANRIRRYRRRVERYTQNRRFQSDERWVYRAWERPDQGVTDTRLPDDDAMCSFWRNIWSVPVSHTEGDWTGKIERACDLIPEMEALIISPQDVARAVRPLPNWKSPGPDGLHNFWIKWFKRSHDRLASQFQSALESGSLPQFLTTGITHLLYKSGSTADPKNYRPITCLPTVYKVLTSILRTKINKHIDTNSIMSVSQNGCKNGSRGTKELLLIDMTINQQVRRSRKDLSTCWIDYKKAYDSVPHTWLMRVLELYKVDTTLCTFLMSCMGQWRTVLRYPGCRNIQRNSEPIRIERGIFQGDSLSPLWFCLALNPLSTLLEDSGLGYRLRRGGQVISHLLYMDDLKLFAPNNLQLMELLKITETFSSAIRMEFGVDKCAVMHVKRGEIVESVGNQLSDSTNLRALSASDTYKYLGMSEALGINVTDMKQSLKERFFGRLKKVFNSLLSGGNKVRAFNDWVMPVLMYSFGILKWTQTELDALDRKVRTLLTANRMHHPRSSVMRLYIPRKCGGRGFLNAKTLHNREICSLREYFLETDVGMHRDVVVVDNGLTPLSLGKENWRKPVVLDTNDRMEVWQSKELHGRFFRALHGPDVDLLASVAWLRFGDLFGETEGFVCAIMDEVMMTNNYRRFIVKDGTVDICRACHRPGESIRHIISGCSRLANGEYLHRHNLVARIIHQQLALKYSLVESEVPYYRYVPDPVLENGNITLYWDRSIITDRTIVANKPDIVVMDRLERRAMIVDITIPHDENLVKAEKDKQIKYLDLAREVVDMWDVDSAIIVPIVVTANGLIAKSLDQHLRRLSLASWIKGLIQKAVLLDTARIVRRFLSLEP

SEQ ID NO: 12634 - protein, 1201 aa, Hydraecia micacea
MLTRSATARRARIPPPDSSLSSASPPAPLVSSPTVSAVMTPAAAVASSSSDEYFSPPTTPPPARRRGGRRPPDGLGPRGPPASDRVPAPGGSVQRMRWTRSINENVMRSYYGATEGGSNLTAYRVRMLSLFQVLEPAVNVSAQRLSDQVRVIQRNHMLDDTVLDRLRNEIQSSHAIAPQSQTAVILPQSNTSHADEGSNDRATNVSTQCNEELSSALEDAIQEYRFMSPELRPRLPRLPMHNKNRALVAVLNSQLSKYFDDCEDLTDTHSILYCAAVAACRVAHVKFTNDSRATRPKPAVPAWQCRIERRIGGARALIGKLICFREGNTRPRVMRFVRRAFLGTDISPQDYTSCVTERIDFLKQKVYAWANRIRRYKRRVERYTQNRTFQSDERWVYRDWERPDQSMADTCLPDDDAMCSFWRSIWSVPVSHTEGDWARDVERACDPIPEMEAITICPQDVARAVRPLPNWKSPGPDGLHNFWIKWFSRSHARLASQFQTALESGSLPQFLTTGITHLLHKSGSTAEPKNYRPITCLPTVYKVLTSILRAKINKHIDTNFIMSASQNGCRNGSRGTKELLLIDMTISQQVRRFRKDLSTCWIDYKKAYDSVPHTWLMRVLELYKVDTTLRTFLMSCMGQWRTVLRYPGCRNIQRNSEPIRIERGIFQGDSLSPLWFCLALNPLSTLLEDSGLGYRLRRGGQVISHLLYMDDLKLFAPNNLQLMELLKVTQTFSNAIRMEFGVDKCAVMHVKRGEIVESVGNQLSDSTNLRALSASETYKYLGMSEALGINVTDMKQSLKERFFGRLKKVLNSLLSGGNKVRAFNGWVMPVLMYSFGILKWTQTELDALDRRVRTLLTANRMHHPRSSVMRLYIPRKCGGRGFLNSKTLHNREICSLREYFLETDVGMHRDVVMVDKGLTPLSLAKENWRKPVVLDTNDRMEVWQSKELHGRFFRALHGPDVDLLASVAWLRFGDLFGETEGFVCAIMDEVMMTNNYRRFIVKDGTVDICRACHRPGESIRHIISGCSRLANGEYLHRHNLVARIIHQQLALKYSLVESEVPYYRYVPDPVLENGNITLYWDRSIITDRTIVANKPDIVVVDRSERRAMIVDITVPHDENLVKAEKDKQIKYLDLAREVVDMWDVDSAIIVPIVVTANGLIAKSLDQHLRRLSLGSWIKGLIQKAVLLDTARIVRRFLSLEP

SEQ ID NO: 12635 - protein, 1203 aa, Amphipyra tragopoginis
MLTRSRAKTQGTRLPSSASSLSSASQPPEPASTVSDVTPAAAVASSSSDEYFSPPTSPPPRRRGRGRPPASLGPRGPPASDRVPAAGGSVQRMRWTQSMNENCMRAYFGATEGGTNLTAYRGRMLSLFQALEPAVNVSAQRLSDQVRVIQRDHRLDDAALDRLRSEVQSSHVISLQSQTAVQLQVPTVVPPRSIFADEESDDRVTNVSTQCSDQLRSALELAIREYRSTPPDLRPRLPRLPMNKKNRALMCALDSLLSSYFDGSEDLADAHSILYCAAVAACRVARIKFDNNDRATRPKPAVPAWQCRIERRIGEARALIGKLICFREGNTRPRVMRFVRRAFSGTDTSPRDYMSRVTERIDFLKQKVYAWANRIRRYKRRVERYTQNRMFQRDQRWVYRAWERSDQGVGDAHLPDDDAMNSFWRSIWSVPVSHTEGDWMRDVERVCEPILDMGAISISPQDVASAVRPLPNWKSPGPDGLHNFWLKWLRSSHARLASHFQSSLETGTLPQFLTTGVTHLLHKSGSTAEPKNYRPITCLPTVYKLLTSILRRKISCHIENNSIMSASQNGCRNGSRGTKELLLIDMAISQQVRRSRKDLSTCWIDYKKAYDSVPHTWLMRVLELYKVNTTLCTFLTSCMGQWRTVLRYPGCRQIQGIGEPIRIERGIFQGDSLSPLWFCLALNPLSTLLEGSGLGYRLRRGGQVISHLLYMDDLKLFAPNNLQLLELLKVTETFSNAISMEFGVDKCAVMHVKRGKIMESVGTQLSDSINLRSLSSTETYKYLGMSEALGINEADMKQSLRERFYGRLKKVLKSLLSGGNKVRAFNGWVMPVLMYSFGILKWTQTELDALDRRVRTLLTAYRMHHPRSSVMRLYIPRKCGGRGFLNAKTLHNREVCSLREYFSQADVGMHRDVVAVDKGFTPLSLAKENWRKPVVLDTNGRKEVWRSKELHGRFYRALHGPDVDFLASVAWLRFGDLFGETEGFVCAIMDEVMMTNNYGKYVVKDGTVDICRACHCPGESIRHVVSGCSRLANGEYLHRHNLVARIIHQQLALKYNLVDAEVPYYKYVPDPVLENGHVTLYWDRSIITDRTIVANKPDIVVIDRSERRAMIVDITVPHDENLVKAENEKKNKYLDLAHEVVDMWEIDSAVIVPIVVTANGLIAKSLDQHLMRLSLGSWIKGLIQKAVLLDTARIVRKFFSLEP

SEQ ID NO: 12636 - protein, 1201 aa, Amphipyra tragopoginis
MLTRARTREARPPPPDSPLSSASQPPESSPTVSAVTPAAAVASSSSDEYFSPPTSPTPVRRQGRRRPPNSLGPRGPPAPSRVLATGGCVQRMKWTQSINENVMRAYYGSTEGGTNLTAYRVRMLTLFQELEPAINVSAQRLSDQVRVIQRNHRLDDAALDRLRLEVQNSRVTPVPSQTAVHHININVVPPRSDCVDGDVDDRAVTVSSQYNDRLRSALEDAIREYRANPELRPRLPRLPMHNKNRALVCALDSLLSSYFESSEDLVDTHSILYCAAVAACRVANVKFNNSERATRPKPAIPAWQCRIERRIDGARALIGKLICFREGNTRPRVMRFVRRAFSGTGISPREYMSQVTERIDFLKQKVCAWASRIRRYKRRVERYAQNRMFRCDQRWVYRAWERPDQGVSDGRLPDDDAMSSFWRSIWSVPVTHTEGDWTRDIERACEPIEEMGEILISPQDVASAARPLPNWKSPGPDGLHNFWIKWLRSSHARLASQFQSSLESGSLPQFLTTGVTHLLHKSGSTAEPKNYRPITCLPTVYKLLTSILRTKINTHVENNSIMSPSQNGCRNGSRGTKELLLIDMAISQQVRRSRKNLSTCWIDYKKAYDSVPHTWLMRVLELYKINATLRTFLTSCMRQWRTVLRYPGCRPILGSGEPISIERGIFQGDSLSPLWFCLALNPLSTLLEGSGLGYPLRRGGQVVSHLLYMDDLKLFAPTKLQLVELLKVTETFSNSIRMEFGVDKCAVMHVRRGGIMESEGLQLSDSIHLRSLSANDTYKYLGMSEGLGISEADMKQSLRERFFGRLKKVLKSLLSGGNKVRAFNGWVMPVLMYSFGILKWTQTELDALDRRVRTLLTANRMHHPRSSVMRLYIPRKCGGRGLLNAKTLHNREVCSLREYFLHADAGMHRDVVAVDKGLTPLNLAKENWRKPVVLSTNDRREVWQSKELHGRFYRALHGPDVDFLASVSWLRFGDLFGETEGFVCAIMDEVIMTNNYRKYIVKDGTVDICRACHCPGESLRHIISGCSRLANGEYLHRHNQVARIIHQQLALRYNLVESEVPYYKYVPDPVLENGHITLYWDRSIITDRTIVANKPDIVVIDRSERRTMIVDVTIPHDENLVKAEKDKQIKYLDLAHEVVNMWDVDSATIVPIVVTANGLMAKSLDQHLKRLSLGGWIKGLIQKAVLLDTARIVRRFLSLEP

SEQ ID NO: 12637 - protein, 1206 aa, Amphipyra tragopoginis
MLTRSRAKAQNTRPPSSASSLSSASQPPEPASIVSDVTPAAAVASSSSDEYFSPATSPSPPPARRRGRGRPPTCLGPRGPPASDRVPAPGGSVQRMRWTQSMNENCMRAYFGATEGGTNLTAYRGRMLSLFRALEPAVNVSAQRLSDQVRVIQRDHRLDDAALDRLRSEMQNSHAAPLPSQIRTQTLVPPAVPLESNYADEEGEDRAISAGTQYSEIMRSALEDALREFRSTPPELRPRLPRLPMHNKNRALVCALDSLLPNVFESSEDLGDTQSILYCAAVAACRVAHVKFPNDNRATRPKSAVPAWQCRIERRIGEARVLIGKLTCFREGNRRPRVMRFVRRAISGTDIGPGEYASRVTERIDFLKQKVYAWANRIRRYRRRVDRYTQNRIFQSDQRWVYRTWERPDQGVSDTHLPDNDVMNAFWRNIWSVPVTHTEGDWMQEVQRACEPIQEMGAVTIGPQDVTSAVRPMPNWKSPGPDGLHNFWIKWLRSSHTRLASQFQSSLESGSLPAFLTTGITHLLFKSGSTAEPKNYRPITCLPTVYKLLTSILRAKLNHHIDSNAIMCATQNGCKNGSRGTKELLLIDMAISQQVRRSRKDLSTCWIDYKKAYDSVPHTWLMRVMELYKVNATLRTFLMSCMGQWRTVLHYPGCRQIQGNGELIRIERGIFQGDSLSPLWFCLALNPLSTLLEGSGLGYRLRRGGQVISHLLYMDDLKLFAPNNLQLVELLKVTETFSNSIRMEFGVDKCAVMHVKRGRIMESVGTQLSDSIHLRSLSSTETYKYLGMSEALGINEADMKQSLRERFFGRLIKVLKSLLSGGNKVRAFNGWVMPVLMYSFGILRWTQTELDALDRRVRTLLTAYRMHHPRSSVMRLYIPRKCGGRGFLNAKTLHNREVCSLREYFSQADVGMHRDVVAVDKGLTPLSLAKENWRKPVVLDAKGRMEVWRSKELHGRFYRALHGPDVDFLASVAWLRFGDLFGETEGFVCAIMDEVMMTNNYRKYIVRDGTVDICRACHCPGESIRHIVSGCSRLANGEYLHRHNLVARIIHQQLALKYNLVDTEVPYYKYVPDPVLENGHVTLYWDRSIITDRTIVANKPDIVVIDRLERRTMIVDITVPHDENLVKAENDKKIKYLDLAHEVVDMWDVDSAVIVPIVVTANGLIAKSLDQHLMRLSLGSWIKGLIQRAVLLDTARIVRKFLSLDP

SEQ ID NO: 12638 - protein, 1154 aa, Amphipyra tragopoginis
MITRSRAKTQSTQPPPSASSLSSASQPPEPTSTVSDVTPAAAVASSSSDEYYSPPTSPPPARRRGRGRPPACLGPRGPPASDRVPASGGSVQRMRWTQSMNENCMRAYFGATEGGTNLTAYRGRMLSLFQALEPAVNVSAQRLSDQVRVIQRDHRLDGAALDRLRSEMQSSHVVPLQSQTAVQSQVPSVVAPRSIPADEESDDRVTNVSTQSNEQLRSALELAFREYRSTLPDLRPRLPRLPMNNKNKALMCALDSLLSSYFDGSEDLADTHSILYCAAVAACRVAHVKVDNNDKATRPKPAVPAWQCRIERRIGEARALIGKLICFREGNTRPRVMRFVRRAFLGTDTSPRDYMSRVAERIDLLKQKVYAWANRIRRYKRRVERYTQNRMFQRDQRWVYRAWERPDQGVRDVHLPDDDAMNSFWHSIWSVPVSHAEGGWMRDVERVCEPILDMGAISISPQDVASAVRPLPNWKSPGPDGLHNFWLKWLRSSHARLASQFQSSLETGTLPQFLTTGVTHLLHKSGSTAEPKNYRPITCLPTVYKLLTSILRCKISSHIENNSIMSASQNGCRNGSRGTKELLLIDMAISQQVRRSRKDLSTCWIDYKKAYDSVPHTWLLRVLELYKVNATLCAFLTSCMGQWRTVLRYPGCRQIQGRGEPIRIERGIFQGDSLSPLWFCLALNPLSTLLEGSGLGYRLRRGGQVISHLLYMDDLKLFAPNNLQLMELLKVTETFSNSIRMEFGVDKCAVMHVKRGRIMESVGTELSDSIHLRSLSSTETYKYLGMSEALGINEADMKQSLRERFYGRLKKVLKSLLSGGNKVRAFNGWVMPALMYSFGILKWTQTELDALDRRVRTLLTAYRMHHPRSSVMRLYISRKCGGRGFLNAKTLHNREVCSLREYFSQADVGMHRDVVAVDKGLTPLSLAKENWRMPVVLDTNGRKDVWRSKELHGRFYRALHGPDVDFQASVAWLRFGDLFGETEGFVCAIMDEVMMTSNYRRYAVKDGTVDICRACHCPGESIRHIVSGCSRLANGEYLHRHNLVARIIHQQLALKYNLVDAEVPYYKYVPDPVLENGHVTLYWDRSIITDRTIVANKPDIVVIDRSERRAMIVDITVPHDENLVKAENDKKSNILIWHTRLSTCGMLTQQSLCR

SEQ ID NO: 12639 - protein, 1003 aa, Amphipyra tragopoginis
MDDRAVTVSSQYNDQLRSALEDAIREYRANPELRPRLPRLPMHNKNRALVCALDSLLSSYFESSEDLGDTHSILYCAAVAACRVANVKFNNSERATRPKPAVPAWQCRIERRIDGARALIGKLICFREGNTRPRVMRFVRRAFSGTGISPREYMSQVTERIDFLKQKVCAWASRIRRYKRRVERYTQNRMFQCDQRWVYRAWERPDQGVNDGRLPDDDAMNSFWRSIWSVPVIHTEGDWMRDIERACEPIEEMGEILISPQDVASAARPLPNWKSPGPDGLHNFWIKWLRSSHARLATQFQSSLESGSLPQFFTTGVTHLLHKSGSTAEPKNYRPITCLPTVYKLLTSILRSKINTHIENNSVMSSAQNGCRNGSRGTKELLLIDMAISQQVRRSRKNLSTCWIDYKKAYDSVPHTWLMRVLELYKINATLRTFLMSCMGQWRTVLRYPGCRPIRESGEPIRIERGIFQGDSLSPLWFCLALNPLSTLLEGSGLGYPLRRGGQVVSHLLYMDDLKLFAPTKLHLVELLKVTETFSNSIRMEFGVDKCAVMHVRRGGIMESEGLQLSDSIHLRPLSANDTYKYLGMSEGLGISEADMKQSLRERFFGRLKKVLKSLLSGGNKVRAFNGWVMPVLMYSFGILKWTQTELDALDRRVRSLLTANRMHHPRSSVMRLYIPRKCGGRGLLNAKTLHNREVCSLREYFLHADAGMHRDVVAVDKGLTPLNLAKENWRKPVVLSTNDRREIWQSKELHGRFYRALHGPDVDFQASVSWLRFGDLFGETEGFVCAIMGEVIMTNNYRKYIVRDGTVDICRACHCPGESLRHIISGCSRLANGEYLHRHNQVARIIHQQLALKYNLVESEVPYYKYVPDPVLENGHITLYWDRSIIADRTIVANKPDIVVIDRSERRTMIVDVTIPHDENLVKAEKDKQIKYLDLAHEVVNMWDVDSATIVPIVVTANGLMAKSLDQHLKRLSLGGWIKGLIQKAVLLDTARIVRRFLSLEP

SEQ ID NO: 12640 - protein, 1110 aa, Amphipyra tragopoginis
MKWTQSINENVMRAYYGSTEGGTNLTAYRVRMLTLFQELEPAINVSAQRLSDQVRVIQRNHRLDDAALDRLRLEVQNSRVTPFPSQTAVHEVNINIVPPRSDYVDGDMDDRAVTVSSQYNDQLRSALEDAIREYRADPELRPRLPRLPMHNKNRALVCALDSLLSSYFESSEDLGDTHSILYCAAVAACRVANVKFNNSERATRPKPAVPAWQCRIERRIDGARALIGKLICFREGNTRPRVMRFVRRAFSGTGISPREYMSQVTERIDFLKQKVCAWASRIRRYKRRVERYTQNRMFQCDQRWVYRAWERPDQGVSDGRLPDDDAMNSFWRSIWSVPVIHTEGDWMRDIERACEPIEEMGEILISPQDVASAARPLPNWKSPGPDGLHNFWIKWLRSSHARLATQFQSSLESGSLPQFFTTGVTHLLHKSGSTAEPKNYRPITCLPTVYKLLTSILRSKINTHIENNSVMSSAQNGCRNGSRGTKELLLIDMAISQQVRRSRKNLSTCWIDYKKAYDSVPHTWLMRVLELYKINATLRTFLMSCMGQWRTVLRYPGCRPIRESGEPIRIERGIFQGDSLSPLWFCLALNPLSTLLEGSGLGYPLRRGGQVVSHLLYMDDLKLFAPAKLQLVELLKVTETFSNSIRMEFGVDKCAVMHVRRGGIMESEGLQLSDSIHLRPLSANDTYKYLGMSEGLGISEADMKQSLRERFFGRLKKVLKSLLSGGNKVRAFNGWVMPVLMYSFGILKWTQTELDALDRRVRSLLTANRMHHPRSSVMRLYIPRKCGGRGLLNAKTLHNREVCSLREYFLHADAGMHRDVVAVDKGLTPLNLAKENWRKPVVLSTNDRREIWQSKELHGRFYRALHGPDVDFQASVSWLRFGDLFGETEGFVCAIMDEVIMTNNYRKYIVKDGTVDICRACHCPGESLRHIISGCSRLANGEYLHRHNQVARIIHQQLALKYNLVESEVPYYKYVPDPVLENGHITLYWDRSIITDRTIVANKPDIVVIDRSERRTMIVDVTIPHDENLVKAEKDKQIKYLDLAHEVVNMWDVDSATIVPIVVTANGLMAKSLDQHLKRLSLGGWIKGLIQKAVLLDTARIVRRFLSLEP

SEQ ID NO: 12641 - protein, 870 aa, Noctua pronuba
MRFVRRAFSGTDISPREYMSRVTERIDFLKQKVYAWANRIRRYRRRADRYTQNRMFQSDERWVYRTWERPVTIQGVTDTHLPDNDAMSAFWRSIWSVPVSHTEGDWMRVVEQACDSIPEMEAISISPLDVARAVHPLPNWKSPGPDGLHNFWIKWLQRSHACLASQFQSSLETGSLPSFFTTGVTHLLHKSGSTAEPKNYRPITCLPTVYKVLTSILRAKIVRHIDNNSIMSVSQNGCRNGSRGTKELLLIDMAISQQVRRSRRDLSTCWIDYKKAYDSVPHTWLRRVLELYKIDATLRTFLVSCMGQWSTVLLYPGCRQVLGNDEPIRIERGIFQGDSLSPLWFCLALNPLSTLLEDSGLGYRLRRGGQVISHLLYMDDLKIFAPSNLQLMELLKVTETFSSAIRMEFGVDKCAVMHVKRGEIMESVGTQLSDSIYLRSLSSTETYKYLGMSEALGINATDMKQSLKERFFGRLNKVLKSLLSGGNKVRAFNGWVMPVLMYSYGILKWTQTELDALDRKVRTLLTANRMHHPRSSVMRLYIPRKCGGRGFLNAKTLHNREVCSLREYFLETDVGMHRNVVSVDKGLTPLSLANENWRKPVVLDTNDRKEVWQSKELHGRFFRALHGPDVDLLASVSWLRFGDLFGETEGFVCAIMDEVIMTNNYRKYIVKDGTVDICRACHRPGESIRHIVSGCSRLANGEYLHRHNLVARIIHQQLALQYNLVGTEVPYYKYAPDPVLENGHATLYWDRSIITDRTILANKPDIVVIDRRERRAMIVDITVPHDENLVKAENDKKIKYLDLAHEVVDMWDVDSAIIVPIVVTVNGLIAKSLDQHLRRLSLRGWVKGLIQKAVLLDTARIVRRFLSLEP

SEQ ID NO: 12642 - protein, 1063 aa, Noctua pronuba
MSDQVRVIQNNHRLDDATLDRLRSELRISPASNPLPSQNVTHVPAALPLRANQHAEEEDDRAVSADNLCNEELRSALEDAIREYRFTSPDLRPRLPRLPMNKKNRALVCALDALLPNFIASSANLCDTHSILYCTAVAACRVANVKFPNTDSATRPKSAVPVWQCRIERRINEARALIGKLICFREGNTRPRVMRFVRRAFSGTDISPREYMSRVTERIDFLKQKVYAWANRIRRYRRRVDRYTQNRMFQSDERWVYRTWERPVTIQGVTDTHLPDNDAMSAFWRSIWSVPVSHTEGDWMRVVEQACDSIPEMEAISISPLDVARAVRPLPNWKSPGPDGLHNFWIKWLQRSHACLASQFQSSLETGSLPSFFTTGVTHLLHKSGSTAEPKNYRPITCLPTVYKVLTSILRAKIVRHIDNNSIMSISQNGCRNGSRGTKELLLIDMAISQQVRRSRRDLSTCWIDYKKAYDSVPHTWLRRVLELYKIDATLRTFLVSCMGQWSTVLLYPGCRQVLGNDEPIRIERGIFQGDSLSPLWFCLALNPLSTLLEDSGLGYRLRRGGQVISHLLYMDDLKIFAPSNLQLMELLKVSETFSSAIRMEFGVDKCAVMHVKRGEIMESVGTQLSDSIYLRSLSSTETYKYLGMSEALGINATDMKQSLKERFFGRLNKVLKSLLSGGNKVRAFNGWVMPVLMYSYGILKWTQTELDALDRKVRTLLTANRMHHPRSSVMRLYIPRKCGGRGFLNAKTLHNREVCSLREYFLETDVGMHRDVVSVDKGLTPLSLANENWRKPVVLDTNDRKEVWQSKELHGRFFRALHGPDVDLLASVSWLRFGDLFGETEGFVCAIMDEVIMTNNYRKYIVKDGTVDICRACHRPGESIRHIVSGCSRLANGEYLHRHNLVARIIHQQLALQYNLVGTEVPYYKYAPDPVLENGHATLYWDRSIITDRTILANKPDIVVIDRRERRAMIVDITVPHDENLVKAENDKKIKYLDLAHEVVDMWDVDSAIIVPIVVTVNGLIAKSLDQHLRRLSLRGWVKGLIQKAVLLDTARIVRRFLSLEP

SEQ ID NO: 12643 - protein, 1204 aa, Noctua pronuba
MLTRLRAKQLAHPPSPGSSLSSASQPPGRATSVSTLSPVAAVASSSSDEFFSPPSTPPPPQRRRGRGRPPAGLGPRGQQAPNRVPAAGGNVSRMRWTQSINEQVMRAYYGATEGGSNLTAYRGRMLSLFQVLEPAVSVSAQRLSDQVRVIQRNHMLDDTVLDRLRSESRSNPVTPASPMIAGLLQSATSTSPRSDHGGEEDDSEVISVSTQCNAQLRSALEGAFREYRSTPPELRPRLPRLPMHKKNKALMCALDSQLSNYFDSSKDLADTHSILYCGAVAACRVAHVKFPNNDRATRPKLAVPAWQCRIERRIGEARALIGKLICFREGNTRPRVMRFVRRAFSGIDITFRDYLARVTERIDFLKQKICAWASRIRRYKRRVERYTQNRTFQSDERWVYRAWERPDQGVTDTRLPDDDAMCLFWRSIWSVPVSHTEGDWTREVEQACDPIQEMGAIIISPQDVACAVRPLPNWKSPGPDGLHNFWIKWFQRSHACLASQFQLALESGSLPQFLTTGITHLLHKSGSTAEPKNYRPITCLPTVYKVLTSILRAKINQHIENNSIMSASQNGCRNGSRGTKELLLIDMAISQQVRRSRKDLSTCWIDYKKAYDSVPHTWLMRVLELYKVDAALRTFLMSCMRHWRTILRYPGCRQIQRNSEPIRIERGIFQGDSLSPLWFCLALNPLSTLLEGSGLGYRLRRGSQVISHLLYMDDLKLFAPNNLQLMKLLKVTETFSSAIRMEFGVDKCAVMHVKRGEIMESVGTQLSDSIHLRSLTSTETYKYLGMSEALGINTADMKQSLRERFFGRLNKVLGSLLSGGNKVRAFNGWVMPVLMYSFGILKWTQTELDALDRRVRALLTANRMHHPRSSVMRLYIPRKCGGRGFLNAKTLHNREVCSLREYFLEADVGMHRDVVSVDKGLTPLSLANENWRKPKVLVTNDRKEVWQGKELHGRFYRALHGPDVDFLASVSWLRFGDLFGETEGFVCAIMDEVMMTNNYRKYIVKDGTVDICRACHRPGESIRHIISGCSRLANGEYLHRHNLVARIIHQQLALKYNLVQSEVPYYKYAPDPVLDDGNITLYWDRPIVTDRTIVANKPDIVVIDRLERRAMIVDITVPHDENLVKAEKDKQFKYLDLAREVVDMWDVNTAVIVPIVVSANGLIAKSLDQHLRRLALGSWIKGLIQKAVLLDTARIVRRFLSQEP

SEQ ID NO: 12644 - protein, 1204 aa, Noctua pronuba
MLTRLRAKQLAHPPSPGSSLSSASQPPGRATSVSTLSPVAAVASSSSDEFFSPPSTPPPPQRRRGRGRPPAGLGPRGQQAPNRVPAAGGNVSRMRWTQSINEQVMRAYYGATEGGSNLTAYRGRMLSLFQVLEPTVSVSAQRLSDQVRVIQRNHMLDDTVLDRLRSESRSNPVTPASPMIAGLLQSATSTSPRSDHGGEEDDSEVISVSTQCNAQLRSALEGAFREYRSTPPELRPRLPRLPMHKKNKALMCALDSQLSNYFDSSKDLADTHSMLYCGAVAACRVAHVKFPNNDRATRPKLAVPAWQCRIERRIGEARALIGKLICFREGNTRPRVMRFVRRAFSGIDITFRDYLARVTERIDFLKQKICAWASRIRRYKRRVERYTQNRTFQSDERWVYRAWERPDQGVTDTRLPDDDAMCLFWRSIWSVPVSHTEGDWTREVEQACDPIQEMGAIIISPQDVACAVRPLPNWKSPGPDGLHNFWIKWFQRSHACLASQFQLALESGSLPQFLTTGITHLLHKSGSTAEPKNYRPITCLPTVYKVLTSILRAKINQHIESNSIMSASQNGCRNGSRGTKELLLIDMAISQQVRRSRKDLSTCWIDYKKAYDSVPHTWLMRVLELYKVDATLRTFLMSCMRHWRTVLRCPGCRQIQRNSEPIRIERGIFQGDSLSPLWFCLALNPLSTLLEGSGLGYRLRRGGQVISHLLYMDDLKLFAPNNLQLMKLLKVTETFSSAIRMEFGVDKCAVMHVKRGEIMESVGTQLSDSIHLRSLNSTETYKYLGMSEALGINTADMKQSLRERFFGRLNKVLGSLLSGGNKVRAFNGWVMPVLMYSFGILKWTQTELDALDRRVRALLTANRMHHPRSSVMRLYIPRKCGGRGFLNAKTLHNREVCSLREYFLEADVGMHRDVVSVDKGLTPLSLANENWRKPKVLVTNDRKEVWQGKELHGRFYRALHGPDVDFLASVSWLRFGDLFGETEGFVCAIMDEVMMTNNYRKYIVKDGTVDICRACHRPGESIRHIISGCSRLANGEYLHRHNLVARIIHQQLALKYNLVQSEVPYYKYAPDPVLDDGNITLYWDRPIVTDRTIVANKPDIVVIDLLERRAMIVDITVPHDENLVKAEKDKQFKYLDLAREVVDMWDVNTAVIVPIVVSANGLIAKSLDQHLRRLALGSWIKGLIQKAVLLDTARIVRRFLSQEP

SEQ ID NO: 12645 - protein, 1196 aa, Spilosoma lubricipeda
MLTRARSRALLPSSDSSLRSALPSSDARTEVPTVAEASSSSSSDEFFSPPTSPIPVRRQGRDRPPTSLGSRGPLTSNRAPATGGDVRRMKWTQSINENVMRAYFRATELGTNLTAYRVRLVSLFQELEPAVNVSAQRLSDQVRAIQRCHLLDDTVLERIRSDIRNSLTVPSSLHVVDVVTNSTPQNEDVSELVDSEIISVSTLYNDKIRSTLEDVIREYRCVNFNNRPRLPRLPIHKRNLALVSALDSLLPDYFGNSEDLSDTHSILYCAAIAVCRVAGIKFAENITTTRPENTVPAWQCRIERRIAGARTLIGKLISFRSGNTRPKVMRFVKQAFLGTTISPQQYMSCVTERIDFLKQKVYAWANRIRRYRKRIDRYNQNRMFQRNEKWVYRKWENLSPCMSDGQVPDENATNSFWRSIWSVPVAHTEGDWYRDVERSCESLLPMELINIDKEDVSCAVRSLPNWKAPGPDGLHNFWLKWFRSSHACLASQFQTALDSGSLPQFLTTGITHLLYKSGSAMDPKNFRPITCLPTLYKLLTSILRLKITTHINQNSILSVSQNGCRSGTRGTKELLIIDMTISQQVRRNRKSLATCWIDYKKAFDSVPHTWLLKVLELYKIDTTLCTFLKSCMRQWRTVLRYPGCRQTAVNDVPIKIERGIFQGDSLSPLWFCLALNPLSTLLEGSGLGYRLQKEAPVISHLFYMDDLKLFAPTKLQLTALLRVTENFSNSIKMEFGIDKCAVMHVKKGVIVESEGIELSDSTRLRSLSATETYKYLGFSQSLGIPESDMKQSLRERFFGRLKKVLKSLLSGGNRVRAYNGWVMPVLMYSFGILRWTQTELDALDRRVRTLLTAFRMHHPRSSVMRLYIPRKFGGRGLLNVKTLHNREIYNLREYFLHTDVGVHRSVVAMDTGLTPLALAKENWRKPVVLGTNERREVWKGKELHGRFYRALNGPDIDFKASTSWLRYGDLFGETEGFVCAIMDEVIMTNNYRKYILKDGTVDICRACHRPGESIRHIISGCSRLANGEYLHRHNQVARIVHQQLALKYKLVNSEVPYYRYVPDPVLENGRATLYWDRSIITDRTIVANKPDIVVIDRSERRAMIVDIAVPHDENLVKVEKEKQIKYLDLSHEIVDMWDVDSVIIVPIVVSVHGLIAKSLDQHLKRLTLDGWIKGLMQKAVLLDTARIVRRFLSLEP

SEQ ID NO: 12646 - protein, 1198 aa, Ochropleura plecta
MLTRAAQARNARHPPPGSSLSSASPPPEPSLVVSAVTPAVAVASSSSDEYFSPPTTPPPVRRRGRHRPPDGLGPRGPPASDRVPAPGGSVQRMRWTQSINENVMRSYYGATEGGNNLTAYRVRMLSLFQVLEPAVNVSAQRLSDQVRVIQRNRMLDDTVLDRLRTEMQSSQVITSSSQAVVPPQPHQLINRVNEVSNDVATNVSTQCSEEMRSTLEGAIREYRYMSPELRPRLPRLPMHNKNRALVAALDSQLSSYFDNCENLTDAHSILYCAAVTVCRVAHVKFPDDRATRPKPAIPFWQCRIERRIGAARALIGKLTCFREGNTRPRVMRFVRRAFAGTDISPPDYISRIAERIDFLKQKVYAWANRIRRYKRRVERYTQNRTFQSDERWVYRAWERPDQGVSDTHLPDDNAMCLFWRSIWSVPVSHTEGEWTREVERACDPIPEMGALTISPQDVACAVRPLPNWKSPGPDGLHNFWIKWIQRSHVRLAALFQTALESGSLPKFLTTGITHLLHKSGSMAEPKNYRPITCLPTLYKVLTSILRAKITKHIDDNSIMSASQNGCRNGSRGTKELLLIDMAISQQVRRSRRHLSTCWIDYKKAYDSVPHTWLMRVLELYKIDATLRTFLISCMRQWSTVLRYPGCRQIQRNSEPIRIERGIFQGDSLSPLWFCLALNPLSTLLENSGLGYRLRRGGQVISHLLYMDDLKLFAPNDLQLMELLKVTETFSSSIRMEFGVDKCAVMHVKRGEIVESVGTQLSDSINLRSLSATETYKYLGMSEALGINVADMKQSLKERFFGRLRKVFNSLLSGGNKVRAFNGWVMPVLMYSFGILKWTQTELDALDRKVRTLLTTFRMHHPRSSVMRLYIPRSCGGRGFLNAKTLHNREICSLREYFLETDVGMHRDVVAVDKGFTPLSLAKENWRKPVVLDTNDRREVWQSKELHGRFFRALHGPDVDQPASVAWLRSGDLFGETEGFVCAIMDEVMMTNNYRRFIVKDGTVDICRACHRPGESIRHIISGCSRLANGEYLHRHNLVARIIHQQLALKYSLVESEVPYYRYEPDPVLEHGNITLYWDRSIITDRTIVANKPDIVVVDRSERRAMIVDITVPHDENLVKAEKDKQIKYIDLAREVVDMWDVDSAIIVPIVVSANGLIAKSLDQHLRRLSLGSWIKGLIQKAVLLDTARIVRRFLSLEP

SEQ ID NO: 12647 - protein, 1199 aa, Ochropleura plecta
MKMITRSAARRDARLPPPGSLSSASPPPEPSLVVSAVTSAVAVASSSSDEYFSPPTTPPPARRRGGRRPPDGLGLRGPPASDRVPAPGGSVQRMRWTSSINENVMRSYYGATEGGNNLTAYRVRMLSLFQVLEPAVNVSAQRLSDQVRVIQRNRMLDDTVLDRLRTEMQSSQVITSSSQAVVPPQSHQLVSRADEVSNDMATNVSTQCSEEMRSALEGAIREYRYMSPELRPRLPRLPMHNKNRALVAVLDSQLSNYFDNCENLTDAHSILYCAAVAACRVAHVKFPDDGATRPKPAVPFWQCRIERRIGVARALIGKLICFKEGNTRPRVMRFVRRAFAGADISPPDYMSRITERIDFLKQKVYAWANRIRRYKRRVERYTLNRTFQSDERWVYRAWERPDQGVSDTHLPDDDAMCLFWRSIWSVPVSHTEGEWTREVERACDPIPEMGALTISPQDVACAVRPLPNWKSPGPDGLHNFWIKWIQRSHVRLAALFQSALESGSLPKFLTTGITHLLHKSGSTAEPKNYRPITCLPTLYKVLTSILRAKITKHIDDNSIMSASQNGCRNGSRGTKELLLIDMAISQQVRRSRRHLSTCWIDYKKAYDSVPHTWLMRVLDLYKIDATLRTFLISCMRQWSTVLRYPGCRQIQRNSEPIRIERGIFQGDSLSPLWFCLALNPLSTLLENSGLGYRLKRGGQVISHLLYMDDLKLFAPNDLQLMELLKVTETFSSAIRMEFGVDKCAVMHVKRGEIVESVGTQLSDSINLRSLSATETYKYLGMSEALGINVADMKQLLKERFFGRLRKVFNSLLSGGNKVRAFNGWVMPVLMYSFGILKWTQTELDALDRKVRTLLTAFRMHHPRSSVMRLYIPRSCGGRGFLNAKTLHNREICSLREYFLETDVGMHRDVVAVDKGLTPLSLAKENWRKPVVLDTNDRREVWQSKELHGRFFRALHGPDVDQSASVAWLRSGDLFGETEGFVCAIMDEVMMTNNYRRFIVKDGTVDICRACHRPGESIRHIISGCSRLANGEYLHRHNLVARIIHQQLALKYNLVEAEVPYYRYEPDPVLEHGYITLYWDRSIITDRTVVANKPDIVVVDRSERRAMIVDITVPHDENLVKAEKDKQIKYIDLAREVVDMWDVDSAIIVPIVVSANGLIAKSLDQYLRRLSLGSWIKGLIQKAVLLDTARIVRRFLSLEP

SEQ ID NO: 12648 - protein, 974 aa, Ochropleura plecta
MSPELRPRLPRLPMHNKNRALVAVLDSQLSNYFDNCENLTDAHSILYCAAVAACRVAHVKFPDDGATRPKPAVPFWQCRIERRIGVARALIGKLICFKEGNTRPRVMRFVRRAFAGTDISPPDYMSRITERIDFLKQKVYAWANRIRRYKRRVERYTLNRTFQSDERWVYRAWERPDQGVSDTHLPDDDAMCLFWRSIWSVPVSHTEGEWTWEVERACDPIPEMGALTISPQDVACAVRPLPNWKSPGPDGLHNFWIKWIQRSHVRLAALFQSALESGSLPKFLTTGITHLLHKSGSTAEPKNYRPITCLPTLYKVLTSILRAKITKHIDDNSIMSASQNGCRNGSRGTKELLLIDMAISQQVRRSRRHLSTCWIDYKKAYDSVPHTWLMRVLDLYKIDATLRTFLISCMRQWSTVLRYPGCRQIQRNSEPIRIERGIFQGDSLSPLWFCLALNPLSTLLENSGLGYRLKRGGQVISHLLYMDDLKLFAPNDLQLMELLKVTETFSSAIRMEFGVDKCAVMHVKRGEIVESVGTQLSDSINLRSLSATETYKYLGMSEALGINVADMKQLLKERFFGRLRKVFNSLLSGGNKVRAFNGWVMPVLMYSFGILKWTQTELDALDRKVRTLLTAFRMHHPRSSVMRLYIPRSCGGRGFLNAKTLHNREICSLREYFLETDVGMHRDVVAVDKGLTPLSLAKENWRKPVVLDTNDRREVWQSKELHGRFFRALHGPDVDQSASVAWLRSGDLFGETEGFVCAIMDEVMMTNNYRRFIVKDGTVDICRACHRPGESIRHIISGCSRLANGEYLHRHNLVARIIHQQLALKYNLVEAEVPYYRYEPDPVLEHGYITLYWDRSIITDRTVVANKPDIVVVDRSERRAMIVDITVPHDENLVKAEKDKQIKYIDLAREVVDMWDVDSAIIVPIVVSANGLIAKSLDQYLRRLSLGSWIKGLIQKAVLLDTARIVRRFLSLEP

SEQ ID NO: 12649 - protein, 1106 aa, Ochropleura plecta
MRWTSSINENVMRSYYGATEGGNNLTAYRVRMLSLFQVLEPAVNVSAQRLSDQVRVIQRNRMLDDTVLDRLRTEMQSSQVITSSSQAVVPPQSHQLVSHDDEVSNDMATNVSTQCNEEMRIALEGAIREYRYISPELRPRLPRLPMHNKNRALVAVLDSQLSNYFDNCENLTDAHSILYCAAVAACRVAHVKFPDDGATRPKPVVPFWQCRIERRIGVARALIGKLICFREGNTRPRVMRFVRRAFAGTDISPPDYMSHITERIDFLKQKVYAWANRIRRYKRRVERYTLNRTFQSDERWVYRAWERPDQGVSDTHLPDDDAMCLFWRNIWSVPVSHTEGEWTREVERACNPIPEMGALTISPQDVACAVRPLPNWKSPGPDGLHNFWLKWIQRSHARLATLFQTALESGSLPKFLTTGITHLLHKSGSTTEPKNYRPITCLPTIYKVLTSILRAKITKHIDDNSIMSASQNGCRNGSRGTKELLLIDMAISQQVRRSRRHLSTCWIDYKKAYDSVPHTWLMRVLELYKVDATLRTFLSSCMRQWNTVLRYPGCRQIQRNSEPIRIERGIFQGDSLSPLWFCLALNPLSTLLEDSGLGYRLRRGGRVISHLLYMDDLKLFAPNDSQLMELLKVTETFSSAISMEFGVDKCAVMHVKRGEIVESVGTQLSDSIHLRSLSANETYKYLGMSEALGINVADMKQSLKERFFGRLRKVFNSLLSGGNKVRAFNGWVMPVLMYSFGILKWTQTELDALDRKVRTLLTAYRMHHPRSSVMRLYIPRSCGGRGFLNAKTLHNREICSLREYFLEADVGMHRDVVTVDKGFTPLSLAKENWRKPVVLDTNDRREVWQSKELHGRFFRALHGPDVDQPASVAWLRSGDLFGETEGFVCAIMDEVMMTNNYRRFIVKDGTVDICRACHRPGESIRHIISVCSRLANGEYLHRHNLVARIIHQQLALKYSLVESEVPYYRYEPDPVLEHGNITLYWDRSIITDRTIVANKPDIVVVDRSERRAMIVDITVPHDENLVKAEKDKQIKYIDLAREVVDMWDVDSAIIVPIVVSANGLIAKSLDQHLRRLSLGSWIKGLIQKAVLLDTARIVRRFLSLEP

SEQ ID NO: 12650 - protein, 1200 aa, Hecatera dysodea
MLTRSRTRAQTTQSTSSGSSLSSASQPPGPTPAVSPEIPVAAVASSSSDEYFSPPTTPPPARRRGRGRPPTSLGPRGPPASDRVPAIGGSVQRMRWTQSINENVMRSYFGATEGGTNLTAYRGRMLSLFQVLEPAVNVSAQRLSDQVRVIRRNRMLDDAVLDRLRLESRSSRVSPASPPAAVQIQPSISPRPDHVSEDVDDGAITVSTQCNERLRSALEDAFREYRSTPPELRPRLPRLPMHNKNRALVCALDSQLENCFNSSKDLADTHSILYCAAAAACRVAHVKFPNSDRATRPAVPAWQCRIERRIGEARALIGKLICFREGNTRRRVMRFVRRAFSGTDISPRDYLTRVTERIDFLKQKVYAWASRIRRYKRRVERYTQNRTFQSNERWVYRAWERPDQVMTDTHLPDDDAMCSFWRSIWSVPVSHTEGDWTREVERTCDPIPEMGAITISPQDVARAVRPLPNWKSPGPDGLHNFWIKWFTRSHVRLASQFQSALESRSLPQFLTTGITHLLHKSGSTVEPKNYRPITCLPTVYKVLTSILRAKINDHIESNSIMSTSQNGCRNGARGTKELLLIDVAISQQVRRSRKDLSTCWIDYKKAYDSVPHTWLMRVLELYKVDAVLRAFLMSCMGQWRTVLHYPGCRQTQANSEPIRIERGIFQGDSLSPLWFCLALNPLSTLLEGSGQGYRLRRGGQVISHLLYMDDLKLFAPNNLQLMKLLKVTETFSSDISMEFGVDKCAVMHVKRGEIMESVGTQLSDSIHLRSLCSTETYKYLGMSEALGINAISVKQSLKERFFGRLNKVLNSLLSGGNKVRAFNGWVMPVLMYSFGILKWTQTELDALDRRVRSLLTANRMHHPRSSVMRLYIPRKCGGRGFLNAKTLHNREVCSLREYFLEADVGMHRDVVAVDKGLTPLSLANENWRKPVVLDTNDRREVWQSKELHGRFYRVLHGPDVDFLASVAWLRFGDLFGETEGFICAITDEVMMTNNYRKYIVKDGTVDICRACHRPGESIRHIISGCSSLANGDYLHRHNLVARIIHQQLALKYNLVESEVPYYRYVPDPVLENGNCTLYWDRSIITDRTIVANKPDIVVIDRLERRAMIVDIAVPHDENLVKAEKDKQSKYLDLAREVVDMWNVNTAVIVPIVVTANGIIAKSLDQHLKRLSLGSWIKGLIQKAVLLDTARIVRRFLSREP

SEQ ID NO: 12651 - protein, 1061 aa, Hecatera dysodea
MNKENNNKNIIQRNRMLDDAVLDRLRLESRSSRVSPASPPAAVQIQPSISPRPDHVSEDVDDGTISVSTQCNERLRSALENAFREYRSTPPELRPRLPRLPMHNKNRALVCALDSQLSIYFDSSENLTDTHSILYCGAAAACRVAHVKLPNSDRVARPAVPAWQCRIERRIAEARALIGKLICFREGNTRRRVMRFVRRAFSGTDISPRDYLTRVTERIDFLKQKVYAWANRIRRYKRRVERYTQNRIFQNNERWVYRAWERPDQGVTDTRLPDDEAMLSFWRNIWSVPVSHTEGDWTREVERACDSIPEMGAINISPQDVARAVRPLPNWKSPGPDGLHNFWIKWLTRSHARLASQFQSALESRSLPQFFTTGITHLLHKSGSTADPKNYRPITCLPTVYKVLTSILRAKINDHIESKSIMSISQNGCRSGARGTKELLLIDVAISQQVRRSRKDLSTCWIDYKKAYDSVPHTWLMRVLELYKVDAVLRAFMMSCMGQWRTVLHYPGCRQTQANSEPIRIERGIFQGDSLSPLWFCLALNPLSTLLEGSGQGYRLRRGGQVISHLLYMDDLKLFAPNNLQLMKLLKVTETFSSDISMEFGVDKCAVMHVKRGEIMESVGTQLSDSIHLRSLCSTETYKYLGMSEALGINATSVKQSLKERFFGRLNKVLNSLLSGGNKVRAFNGWVMPVLMYSFGILKWTQTELDALDRRVRSLLTANRMHHPRSSVMRLYIPRKCGGRGFLNAKTLHNREVCSLREYFLEADVGMHRDVVAVDKGFTPLSLANENWRKPVVLDTNDRREVWQSKELHGRFYRVLHGPDVDFLASVAWLRFGDLFGETEGFICAITDEVMMTNNYRKYIVKDGTVDICRACHRPGESIRHIISGCSSLANGDYLHRHNLVARIIHQQLALKYNLVESEVPYYRYAPDPVLENGNCTLYWDRSIITDRTIVANKPDIVVIDRLERRAMIVDIAVPHDENLVKAEKDKQSKYLDLAREVVDMWDVNTAVIVPIVVTANGIIAKSLDQHLKRLSLGSWIKGLIQKAVLLDTARIVRRFLSREP

SEQ ID NO: 12652 - protein, 1200 aa, Hecatera dysodea
MLTRSRTRAQTTQSTSSGSSLSSASQPPGPTPAVSPEIPVAAVASSSSDEYFSPPTTPPPARRRGRGRPPTSLGPRGPPASDRVPAIGGSVQRMRWTQSINENVMRSYFGATEGGTNLTAYRGRMLSLFQVLEPAVNVSAQRLSDQVRVIQRNRMLDDAVLDRLRLESRSSRVSPASPPAAVQIQPSISPRPDHVSEDVDDGAITVSTQCNERLRSALEDAFREYRSTPPELRPRLPRLPMHNKNRALVCALDSQLENCFNSSKDLADTHSILYCAAAAACRVAHVKFPNSDRATRPAVPAWQCRIERRIGEARALIGKLICFREGNTRRRVMRFVRRAFSGTDISPRDYLTRVTERIDFLKQKVYAWASRIRRYKRRVERYTQNRTFQSNERWVYRAWERPEQVVTDTHLPDDDAMCSFWRSIWSVPVSHTEGDWTREVERTCDPIPEMGAITISPQDVARAVRPLPNWKSPGPDGLHNFWIKWFTRSHVRLASQFQSALESRSLPQFLTTGITHLLHKSGSTAEPKNYRPITCLPTVYKVLTSILRAKINDHIESNSIMSTSQNGCRNGARGTKELLLIDVAISQQVRRSRKDLSTCWIDYKKAYDSVPHTWLMRVLELYKVDAVLRAFLMSCMGQWRTVLHYPGCRQTQANSEPIRIERGIFQGDSLSPLWFCLALNPLSTLLEGSGQGYRLRRGGQVISHLLYMDDLKLFAPNNLQLMKLLKVTETFSSDISMEFGVDKCAVMHVKRGEIMESVGTQLSDSIHLRSLCSTETYKYLGMSEALGINATSVKQSLKERFFGRLNKVLNSLLSGGNKVRAFNGWVMPVLMYSFGILKWTQTELDALDRRVRSLLTANRMHHPRSSVMRLYIPRKCGGRGFLNAKTLHNREVCSLREYFLEADVGMHRDVVAVDKGFTPLSLANENWRKPVVLDTNDRREVWQSKELHGRFYRVLHGPDVDFLASVAWLRFGDLFGETEGFICAITDEVMMTNNYRKYIVKDGTVDICRACHRPGESIRHIISGCSSLANGDYLHRHNLVARIIHQQLALKYNLVESEVPYYRYVPDPVLENGNCTLYWDRSIITDRTIVANKPDIVVIDRLERRAMIVDIAVPHDENLVKAEKDKQSKYLDLAREVVDMWNVNTAVIVPIVVTANGIIAKSLDQHLKRLSLGSWIKGLIQKAVLLDTARIVRGFLSREP

SEQ ID NO: 12653 - protein, 1200 aa, Hecatera dysodea
MLTRSRTRCQNTRLTPSDSSLNSASQPPGPTPPASPEIPVAAVASSSSDEYFSPPTTPPPARRRGRGRPPNSLGPRGPPASDRVPAIGGSVQRMRWTHSINENVMRSYFGATEGGTNLTAYRGRMLSLFQVLEPAVNVSAQRLSDQVRVIQRNRMLDDAVLDRLRLESRSSRVSPASPPAAVQIQPSISPRPDHVSEDVDDGTISVSTQCNERLRSALEDAFREYRSTPPELRPRLPRLPMHNKNRALVCALDSQLSIYFDSSENLTDTHSILYCGAAAACRVAHVKLPNSDRVARPAVPAWQCRIERRIAEARALIGKLICFREGNTRRRVMRFVRRAFSGTGISPRDYLTRVTERIDFLKQKVYAWANRIRRYKRRVERYTQNRTFQNNERWVYRAWERPDQGVTDTRLPDDEAMLSFWRNIWSVPVSHTEGDWTREVERACDSIPEMGAINISPQDVARAVRPLPNWKSPGPDGLHNFWIKWLTRSHARLASQFQSALESRSLPQFFTTGITHLLHKSGSTADPKNYRPITCLPTVYKVLTSILRAKINDHIESNSIMSISQNGCRSGARGTKELLLIDVAISQQVRRSRKDLSTCWIDYKKAYDSVPHTWLMRELELYKVDAVLRAFLMSCMGQWRTVLHYPGCRQTQANSEPIRIERGIFQGDSLSPLWFCLALNPLSTLLEGSGQGYRLRRGGQVISHLLYMDDLKLFAPNNLQLMKLLKVTETFSSDISMEFGVDKCAVMHVKRGEIMESVGTQLSDSIHLRSLCSTETYKYLGMSEALGINATSVKQSLKERFFGRLNKVLNSLLSGGNKVRAFNGWVMPVLMYSFGILKWTQTELDALDRRVRSLLTANRMHHPRSSVMRLYIPRKCGGRGFLNAKTLHNREVCSLREYFLEADVGMHRDVVAVDKGFTPLSLANENWRKPVVLDTNDRREVWQSKELHGRFYRVLHGPDVDFLASVAWLRFGDLFGETEGFICAITDEVMMTNNYRKYIVKDGTADICRACHRPGESIRHIISGCSSLANGDYLHRHNLVARIIHQQLTLKYNLVESEVPYYRYAPDPVLENGNCTLYWDRSIITDRTIVANKPDIVVIDRLERRAMIVDIAVPHDENLVKAEKDKQSKYLDLAREVVDMWDVNTAVIVPIVVTANGIIAKSLDQHLKRLSLGSWIKGLIQKAVLLDTARIVRRFLSREP

SEQ ID NO: 12654 - protein, 1200 aa, Mythimna impura
MLTRSRAQKLHTHPTSSGSSLSSASQPPGPAPTVSPEIPVAAVASSSSDEYFSPLTTPPPARRRGRGRPPASLGPRGPPASDRVPAAGGSVQRMRWTSSINENVMRSYFGATEGGINLTAYRGRMLSLFQVLEPAVNVSVQRLSDQVRVIQRNRMLDDAVLDRLRLESQNSRVSPATTPAAVQRLPTASPRPVQVGDADDDAAISVSTQCNDRFRGALEDAFREYRSTPPGLRPRLPRLPMHKRNRALVCALDSQLSNCFDSSKDLTDTHSILYCAAVAACRVAHVKFPNCDRATRPAVPAWQCRIEHRIGGARALIGKLICFREGNTRPRVMRFVRRAFSGTDISPRDYLPCVTERIDFLKQKIYAWANRFRRYKRRVERYTRNRTFQSNERWVYRDWERSDQGVTDTRLPDDDAMCSFWRSIWSAPVSHTEGDWIREVERACDLLPEMGAITISPQDVARAVRPMPNWKSPGPDGLHNFWVKWFQRSHARLASQFQSALESGSLPQFLMTGITHLLHKSGSTAEPKNYRPVTCLPTVYKVLTSILRAKINSHIETNSIMSASQNGCRNGSRGTKELLLIDIAISQQVRRSRKNLSACWIDYKKAYDSVPHTWLMRVLQLYKVDATLRTFLMACMGQWRTVLHYPGCRQIQENNEPIRIERGIFQGDSLSPLWFCLALNPLSTLLEGSGLGYRLKRGGQVISHLLYMDDLKLFAPNNLQLVELLKVTETFSSAIRMEFGVDKCAVIHVKRGEIMASVGIQLSDSIHLRSLCSTETYRYLCLSESLGINTDDVKQSLKERFFGRLNKVLNSLLSGGNKVRAFNGWVMPVLMYSFGILKWTQTELDDLDRRVRTLLTANRMHHPRSSVMRLYIPRKCGGRGFLNAKTLHNREVCSLREYFLKTDVGMHRDVVAVDKGLTPLSLANENWRKPIVLDTNDRREVWQSKELHGRFYRALHGPDVDLLASVSWLRFGDLFGETEGFVFAIMDEVMMTNNYRKYIVKDGTVDICRACHRPGESIRHIISGCSHLANGDYLHRHNLVARIIHQQLALKYNLVESEVPYYRYVPDPVLDNGNITLYWDRSIITDRTIVANKPDIVVIDRLERRTMIVDIAVPHDENLVKAEKDKQTKYLDLAREVVHMWEVDRAIIVPIVVTANGLIAKSLEQHLRRLSLDSWIKGLIQKAVLLDTARIVRRFLSQEP

SEQ ID NO: 12655 - protein, 1200 aa, Mythimna impura
MLTRAAARRARLPPPASSLSSASPPPEPSPTVSAVTPAVAVASSSSDEYFSPPTSPPPARRRRGRRPPSGLGPRGPPASDRVPAPGGSVQRMRWTQSINENVMRAYYGATEGGNNLTAYRVRMLSLFQVLEPAVNVSAQRLSDQVRVIQRNHMLDDTVLDRLRTEMSNHTIAPSSQSVVPVMVPPSYHLSGHVDEEITDMVTHVSTQCNNELRSALECAIREYRNMPLELRPRLPRLPMHNKNKALVAALDLQLSNYFDDCKDLTDTHSIMYCAAVAACRLAHVKFPNCDVATRPKPAVPAWQCRIERRIGGARALIGKLICFREGNTRPRVMRFVRRAFSGTDISPRDYMSRVTERIDFLKQKVYAWANRIRRYKRRVDRYTQNRTFRSNERWVYRAWERPDQGVTDACLPDDDAMSSFWRSIWSVPVSHTEGDWTREVERACDPIPQMGAIDISPQDVARAVRPLPNWKSPGPDGLHNFWIKWFTRSHARLAYQFQSALESGSLPQFLTTGITHLLHKSGSTAEPKNYRPITCLPTVYKVLTSILRSKINSHIDKNLIMSPSQNGCRNGSRGTKELLLIDMTISQQVRRSRKDLSTCWIDYKKAYDSVPHTWLMRVLELYKIDTTLRTFLMSCMRQWSTVLRYPGCRHTQRNSEPVRIERGIFQGDSLSPLWFCLALNPLSTLLENSGLGYRLKRGGQVISHLLYMDDLKLFAPNNLQLMELLKVTETFSSAIRMEFGVDKCAVMHVKRGEVVESVGTQLTDFINLRSLSPTETYKYLGMSEALGINITDMKQTLKERFFGRLKKVFNSLLSGGNKVRAFNGWVMPVLMYSFGVLKWTQTELDALDRKVRTLLTAYRMHHPRSSVMRLYIPRKCGGRGFLNAKTLHNREVCSLREYFLAADVGMHRDVVTVDKGLTPLSLANENWRKPVVLDTNDRREVWQSKELHGRFFRALHGPDVDQLASVAWLRSGDLFGETEGFVCAIMDEVIMTNNYRRFIVKDGTVDICRACHRPGESIRHIISGCSRLANGEYLHRHNLVARIIHQQLALKYSLVESEVPYYRYEPDPVLDNGHITLYWDRSIITDRTIVANKPDIVVVDRSERRAMIVDISVPHDENLVKAEKDKQIKYIDLAREVVDMWDVDSAIIVPIVVSGNGLIAKSLDQHLRRLALGDWIKGLIQKAVLLDTARIVRRFLSLEP

SEQ ID NO: 12656 - protein, 1001 aa, Mythimna impura
MVTHVSTQCNNELRSALECAIREYRNMPLELRPRLPRLPMHNKNKALVAALDLQLSNYFDDCEDLTDTHSIMYCAAVAACRVAHVKFPSCDVSTRPKPAVPAWQCRIERRIGGARALIGKLICFREGNTRPRVMRFVRRAFSGTDISPRDYMSRVTERIDFLKQKVYAWANRIRRYKRRVERYTQNRTFRSNERWVYRAWERPDQGVTDTRLPDDDAMSSFWRSIWSVPVSHTEGDWTREVERACDPIPQMGAIDISPQDVARAVRPLPNWKSPGPDGLHNFWIKWFTRSHARLAYQFQSALESGSLPQFLTTGITHLLHKSGSTAEPKNYRPITCLPTVYKVLTSILRSKINSHIDKNLIMSPSQNGCRNGSRGTKELLLIDMTISQQVRRFRKDLSTCWIDYKKAYDSVPHTWLMRVLELYKIDTTLRTFLMSCMRQWSTVLRYPGCRHIQRNSEPVRIERGIFQGDSLSPLWFCLALNPLSTLLENSGLGYRLKRGGQVISHLLYMDDLKLFAPNNLQLMELLKVTETFSSAIRMEFGVDKCAVMHVKRGEVVESVGTQLTDSINLRSLSPTETYKYLGMSEALGINITDMKQSLKERFFGRLKKVFNSLLSGGNKVRAFNGWVMPVLMYSFGVLKWTQTELDALDRRVRTLLTAYRMHHPRSSVMRLYIPRKCGGRGFLNAKTLHNREVCSLREYFLATDVGMHRDVVAVDKGLTPLSLANENWRKPVVLDTNDRREVWQSKELHGRFFRAFHGPDVDQLASVAWLRFGDLFGETEGFVCAIMDEVIMTNNYRRFIVKDGTVDICRACHRPGESIRHIISGCSRLANGEYLHRHNLVARIIHQQLALKYSLVESEVPYYRYEPDPVLDNGHITLYWDRSIITDRTIVANKPDIVVVDRSERRAMIVDISVPHDENLVKAEKDKQIKYIDLAREVVDMWDVDSAIIVPIVVSANGLIAKSLDQHLRRLALGGWIKALIQKAVLLDTARIVRRFLSLEP

SEQ ID NO: 12657 - protein, 868 aa, Mythimna impura
MRFVRRAFSGTDISPRDYMSRVTERIDFLKQKVYAWANRIRRYKRRVERYTQNRTFRSNERWVYRAWERPDQGVTDACLPDDDAMSSFWRSIWSVPVSHTEGDWTREVERACDPIPQMGAIDISPQDVARAVRPLPNWKSPGPDGLHNFWIKWFTRSHARLAYQFQSALESGSLPQFLTTGITHLLHKSGSTAEPKNYRPITCLPTVYKVLTSILRSKINSHIDKNLIMSPSQNGCRNGSRGTKELLLIDMTISQQVRRSRKDLSTCWIDYKKAYDSVPHTWLMRVLELYKIDTTLRTFLMSCMRQWSTVLRYPGCRHTQRNSEPVRIERGIFQGDSLSPLWFCLALNPLSTLLENSGLGYRLKRGGQVISHLLYMDDLKLFAPNNLQLMELLKVTETFSSAIRMEFGADKCAVMHVKRGEVVESVGTQLTDSINLRSLSPTETYKYLGMSEALGINITDMKQSLKERFFGRLKKVLNSLLSGGNKVRAFNGWVMPVLMYSFGVLKWTQTELDALDRRVRTLLTAYRMHHPRSSVMRLYIPRKCGGRGFLNAKTLHNREVCSLREYFLAADVGMHRDVVAVDKGLTPLSLANENWRKPVVLDTNDRREVWQSKKLHGRFFRALHGPDVDQLASVAWLRFGDLFGETEGFVCAIMDEVIMTNNYRRFIVKDGTVDICRACHRPGESIRHIISGCSRLANREYLHRHNLVARIIHQQLALKYSLVESEVPYYRYEPDPVLDNGHITLYWDRSIITDRTIVANKPDIVMVDRSERRAMIVDISVPHDENLVKAEKDKQIKYIDLAREVVDMWDVDSAIIVPIVVSANGLIAKSLDQHLRRLALGGWIKGLIQKVVLLDTARIVRRFLSLEP

SEQ ID NO: 12658 - protein, 1200 aa, Mythimna impura
MLTRAAARRARPPPPASSLSSASPPPAPCLTVSAVTPAVAAASSSSDEYYSPPTTPPPTRRRGERRPPACLGSRGPPASDRVPATGGCVSRMRWTQSINENVMRAYYGATEGGNNLTAYRVRMLSLFQVLEPAVNVSAQRLSDQVRVIQRNHMLDDTVLDRLRTEMGSHAIASSSQTAVPSQVSPSNHLPNHADEESTDMVTHVSTQCSNELRSALECAIREYRNMPLELRPRLPRLPMCNKNKALVAALDSQLSNYFDDCEDLTDTHSIMYCAAVAACRVAHVKFPNSDVATRPKPAVPAWQCRIERRIGGARALIGKLICFREGNTRPRVMRFVRRAFSGTDISPRDYMSCVTERIDFLKQKVYAWANRIRRYKRRVERYTQNRTFRSNERWVYRAWEQPGQSVTDTRLPDDDAMSSFWRNIWSVPVNHSEGGWTREVERACEPIPEMGAITISPQDVARAVRPLPNWKSPGPDGLHNFWIKWLQRSHARLASQYQTALESGSLPEFLTTGVTHLLHKSGSTAEPKNYRPITCLPTVYKVLTSILRAKINHHVDNNAIMSASQNGCRNGSRGTKELLLIDMAISQQVRRSRKDLSTCWIDYKKAYDSVPHTWLMRVLELYKIDTTLRTFLMSCMRQWRTVLRYPGCRHIQRNSEPVRIERGIFQGDSLSPLWFCLALNPLSTLLENSGLGYRLKRGGQVISHLLYMDDLKLFAPNNLQLMELLKVTETFSSAIRMEFGVDKCAVMHVKRGEIVESMGTQLSDSINLRSLSPTETYKYLGMSEALGINAIDMKQTLKERFFGRLKKVFNSLLSGGNKVHAFNGWVMPVLMYSFGVLKWTQTELDALDRRVRTLLTAYRMHHPRSSVMRLYIPRKCGGRGFLNAKTLHNREVCSLREYFLAADVGMHRDVVAVDKGLTPLSLANESWRKPVVLDTNDRREVWQSKELHGRFFRALHGPDVDQLASVAWLRVGDLFGETEGFVCAIMDEVIMTNNYRRFIVKDGTVDICRACHRPGESIRHIISGCSRLANGEYLHRHNLVARIIHQQLALKYSLVESEVPYYRYMPDPVLDNGDITLYWDRSIITDRTIVANKPDIVVVDRRERRTMIVDISVPHDENLVKAEKDKQIKYIDLAREVVDMWDVDSAIIVPIVVSANGLIAKSLDQHLRRLALGGWIKGLIQKAVLLDTARIVRRFLSLEP

SEQ ID NO: 12659 - protein, 868 aa, Mythimna impura
MRFVRWAFSGTDISPRDYLPCVTERIDFLKQKIYAWANRIRRYKRRVERYTRNRTFQSNERWVYRDWERSDQGVTDTRLPDDDAMCSFWRSIWSAPVSHTEGDWIREVERACDLLPEMGAITISPQDVARAVRPLPNWKSPGPDGLHNFWVKWFQRSHARLASQFQSALESGSLPQFLTTGITHLLHKSGSTAEPKNYRPITCLPTVYKVLTSILRAKINSHIETNSIMSASQNGCRNGSRGTKELLLIDIAISQQVRRSRKNLSACWIDYKKAYDSVPHTWLMRVLELYKVDATLRTFLMSCMGQWRTVLHYPGCRQIQENNEPIRIERGIFQGDSLSPLWFCLALNPLSTLLEGSGLGYRLKRGGQVISHLLYMDDLKLFAPNNLQLVELLKVTETFSSAIRMEFGVDKCAVIHVKRGEIMESVGIQLSDSIHLRSLCSTETYKYLGMSESLGINTDDVKQSLKERFFGRLNKVLNSLLSGGNKVRAFNGWVMPVLMYSFGILKWTQTELDALDRRVRTLLTANRMHHPRSSVMRLYIPRKCGGRGFLNAKTLHNREVCSLREYFLKTDVGMHRDVVAVDKGLTPLSLANENWRKPIVLDTNDRREVWQSKELHGRFYRALHGPDVDLLASVSWLRFGDLFGETEGFVFAIMDEVMMTNNYRKYIVKDGTVDICRACHRPGESIRHIISGCSHLANGDYLHRHNLVARIIHQQLALKYNLVESEVPYYRYVPDPVLDNGNITLYWDRSIITDRTIVANKPDIVVIDRLERRTMIVDIAVPHDENLVKAEKDKQTKYLDLAREVVDMWEVDNAIIVPIVVTANGLIAKSLEQHLRRLSLGSWIKGLIQKAVLLDTARIVRRFLSQEP

SEQ ID NO: 12660 - protein, 1048 aa, Mythimna impura
MLDDTVLDRLRTEMSNHAIAPSSQPVVPVMVPPSYHLSDHADEEITDMVTHVSTQCNNELRSALECAIREYRNMPLELRPRLPRLPMHNKNKALVAALDLQLSNYFDDCEDLTDTHSIMYCAAVAACRVAHVKFPSCDVSTRPKPAVPAWQCRIERRIGGARALIGKLICFREGNTRPRVMRFVRRAFSGTDISPRDYMSRVTERIDFLKQKVYAWANRIRRYKRRVERYTQNRTFRSNERWVYRAWERPDQGVTDTRLPDDDAMSSFWRSIWSVPVSHTEGDWTREVERACDPIPQMGAIDISPQDVARAVRPLPNWKSPGPDGLHNFWIKWFTRSHARLAYQFQSALESGSLPQFLTTGITHLLHKSGSTAEPKNYRPITCLPTVYKVLTSILRSKINSHIDKNLIMSPSQNGCRNGSRGTKELLLIDMTISQQVRRFRKDLSTCWIDYKKAYDSVPHTWLMRVLELYKIDTTLRTFLMSCMRQWSTVLRYPGCRHIQRNSEPVRIERGIFQGDSLSPLWFCLALNPLSTLLENSGLGYRLKRGGQVISHLLYMDDLKLFAPNNLQLMELLKVTETFSSAIRMEFGVDKCAVMHVKRGEVVESVGTQLTDSINLRSLSPTETYKYLGMSEALGINITDMKQSLKERFFGRLKKVFNSLLSGGNKVRAFNGWVMPVLMYSFGVLKWTQTELDALDRRVRTLLTAYRMHHPRSSVMRLYIPRKCGGRGFLNAKTLHNREVCSLREYFLATDVGMHRDVVAVDKGLTPLSLANENWRKPVVLDTNDRREVWQSKELHGRFFRAFHGPDVDQLASVAWLRFGDLFGETERFVCAIMDEVIMTNNYRRFIVKDGTVDICRACHRPGESIRHIISGCSRLANGEYLHRHNLVPRIIHQQLALKYSLVESEVPYYRYEPDPVLDNGHITLYWDRSIITDRTIVANKPDIVVVDRSERRAMIVDISVPHDENLVKAEKDKQIKYIDLAREVVDMWDVDSAIIVPIVVSANGLIAKSLDQHLRRLALGGWIKALIQKAVLLDTARIVRRFLSLEP

SEQ ID NO: 12661 - protein, 1200 aa, Mythimna impura
MLTRSRAQKLHTHPTSSGSSLSSASQPPGPAPTVSPEIPVAAVASSSSDEYFSPPTTPPPARRRGRGRPPASLGPRGPPASDRVPAAGGSVQRMRWTSSINENVMRSYFGATEGGINLTAYRGRMLSLFQVLEPVVNVSVQRLSDQVRVIQRNRMLDDAVLDRLRLESQSSRVSPATTPAAVQRLPTASPRPVQVGDADDDAAISVSTQCNDRLRGALEDAFREYRSTPPGLRPRLPRLPMHKRNRALVCALDSQLSNCFDSSKDLTDTHSILYCAAVAACRVAHVKFPNCDRATRPAVPAWQCRIEHRIGEARALIGKLICFREGNTRPRVMRFVRRAFSGTDISPRDYLPCVTERIDFLKQKIYAWANRIRRYKRRVERYTRNRTFQSNERWVYRDWERSDQGVTDTRLPDDDAMCSFWRSIWSAPVSHTEGDWIREVERACDLLPEMGAITISPQDVARAVRPLPNWKSPGPDGLHNFWVKWFQRSHARLASQFQSALESGSLPQFLTTGITHLLHKSGSTAEPKNYRPITCLPTVYKVLTSILRAKINSHIETNSIMSASQNGCRNGSRGTKELLLIDIAISQQVRRSRKNLSACWIDYKKAYDSVPHTWLMRVLELYKVDATLRTFLMSCMGQWRTVLHYPGCRQIQENNEPIRIERGIFQGDSLSPLWFCLALNPLSTLLEGSGLGYRLKRGGQVISHLLYMDDLKLFAPNNLQLVELLKVTETFSSAIRMEFGVDKCAVIHVKRGEIMESVGIQLSDSIHLRSLCSTETYKYLGMSESLGINTDDVKQSLKERFFGRLNKVLNSLLSGGNKVRAFNGWVMPVLMYSFGILKWTQTELDALDRRVRTLLTANRMHHPRSSVMRLYIPRKCGGRGFLNAKTLHNREVCSLREYFLKTDVGMHRDVVAVDKGLTPLSLANENWRKPIVLDTNDRREVWQSKELHGRFYRALHGPDVDLLASVSWLRFGDLFGETEGFVFAIMDEVMMTNNYRKYIVKDGTVDICRACHRPGESIRHIISGCSHLANGDYLHRHNLVARIIHQQLALKYNLVESEVPYYRYVPDPVLDNGNITLYWDRSIITDRTIVANKPDIVVIDRLERRTMIVDIAVPHDENLVKAEKDKQTKYLDLAREVVDMWEVDRAIIVPIVVTANGLIAKSLEQHLRRLSLGSWIKGLIQKAVLLDTARIVRRFLSQEP

SEQ ID NO: 12662 - protein, 1198 aa, Phlogophora meticulosa
MLTRSAARRARPPPPASSLSSASSPPKPSTIVSTVKPAVPVASSSSDEYFSPPTSPPPARRRRGRRPPDGLGPRGPPASDRVPAPGGSVQRMRWTQSINENVMRSYYGATEGGSNLTAYRVRMLSLFQVLEPAVNVSAQRLSDQVRVIQRNHMLDDVVLDRLRTEMQSSRVITSPSHTVVPPQYNIVLSSFADGEGSDKVTNVSTQYNEELRSALEGAIREYRFMLPALRPRLPRLPMHNKNRALVAALDSQLSNYFDNCDDLTDAHSILYCAAVAACRVAHVKFPYDIATRPKPAVPAWQCRIQRRIAGARELIGKLVCYREGNTRPRVMRYVRRAFLGTDISPRDYMSRVTERIDFLKQKVYAWASRIRRYKRRVERYTQNRTFQSNERWVYRAWERPVQGVTDTHLPDDDVMCSFWRNIWSVPVSHTEGDWTREVERACDPIPQMGAITISPQDVARAVRPLPNWKSPGPDGLHNFWIKWLQKSHARLASQFQSALETGSLPQFLTTGITHLLHKSGSTAEPKNYRPITCLPTVYKVLTSILRVKINNHIDSNSIMSASQNGCRNGSRGTKELLLIDTAISQQVRRSRKDLSTCWIDYKKAYDSVPHTWLKRVLELYKVDATLRTFLTSCMGQWRTVLRYPGCRQIQRNSEPIRIERGIFQGDSLSPLWFCLALNPLSTLLEDSGLGYRLKRGGQVVSHLLYMDDLKLFAPSDLQLMELLTVTKTFSSAIRMEFGVDKCAVMHVKRGKIVESVGTQLPDFINFRALSPIETYKYLGMSEALGINAADMKQSLKERFFGRLKKVCNSLLSGGNKVRAFNGWVMPVLMYSFGILKWTQTELDALDRRVRTFLTASRMHHPRSSVMRLYIPRKCGGRGFLNAKTLHNREICSLRDYFLETDVGMHRDVVAVDQGLTPLSLAKENWRKPVVLDTNDRKEVWQSKELHGRFFQALHGPDVDQLASVSWLRFGDLFGETEGFVCAIMDEVIMTNNYRRFIVKDGTVDICRACHRPGESIRHIISGCSRLANEEYLHRHNLVARIIHQQLALKYSLVESEVPYYKYVPDPVLENGSVTLYWDRSIITDRTIVANKPDIVLMDRIERRATIIDVTVPHDGNLVKAEKDKQIKYLDLAREVVNMWDVDSAIVVPIVVSANGLIAKSLDQHLRRLALGSWIKGLIQKAVLLDTARIVRRFLSLEP

SEQ ID NO: 12663 - protein, 1175 aa, Phlogophora meticulosa
MLTRSAARRARPPPPASSLSSASSPPKPSTIVSTVKPAVPVASSSSDEYFSPPTSPPPARRRRRSVQRMRWTQSINENVMRSYYGATEGGSNLTAYRVRMLSLFQVLEPAVNVSAQRLSDQVRVIQRNHMLDDVVLDRLRTEMQSSRVITSPSHTVVPPQYNIVLSSFADGEGSDKVTNVSTQYNEELRSALEGAIREYRFMLPALRPRLPRLPMHNKNRALVAALDSQLSNYFDNCDDLTDAHSILYCAAVAACRVAHVKFPYDIATRPKPAVPAWQCRIERRIAGARALIGKLVCYREGNTRPRVMRYVRRAFLGTDISPRDYMSRVTERIDFLKQKVYAWASRIRRYKRRVERYTQNRTFQSNERWVYRAWERPVQGVTDTHLPDDDVMCSFWRNIWSVPVSHTEGDWTREVERACDPIPQMGAITISPQDVARAVRPLPNWKSPGPDGLHNFWIKWLQKSHARLASQFQSALETGSLPQFLTTGITHLLHKSGSTAEPKNYRPITCLPTVYKVLTSILRVKINNHIDSNSIMSASQNGCRNGSRGTKELLLIDTAISQQVRRSRKDLSTCWIDYKKAYDSVPHTWLKRVLELYKVDATLRTFLTSCMGQWRTVLRYPGCRQIQRNSEPIRIERGIFQGDSLSPLWFCLALNPLSTLLEDSGLGYRLKRGGQVVSHLLYMDDLKLFAPSDLQLMELLTVTKTFSSAIRMEFGVDKCAVMHVKRGKIVESVGTQLPDFINFRALSPIETYKYLGMSEALGINAADMKQSLKERFFGRLKKVCNSLLSGGNKVRAFNGWVMPVLMYSFGILKWTQTELDALDRRVRTFLTASRMHHPRSSVMRLYIPRKCGGRGFLNAKTLHNREICSLRDYFLETDVGMHRDVVAVDQGLTPLSLAKENWRKPVVLDTNDRKEVWQSKELHGRFFQALHGPDVDQLASVSWLRFGDLFGETEGFVCAIMDEVIMTNNYRRFIVKDGTVDICRACHRPGESIRHIISGCSRLANEEYLHRHNLVARIIHQQLALKYSLVESEVPYYKYVPDPVLENGSVTLYWDRSIITDRTIVANKPDIVVMDRIERRATIIDVTVPHDGNLVKAEKDKQIKYLDLAREVVDMWDVDSAIVVPIVVSANGLIAKSLDQHLRRLALGSWIKGLIQKAVLLDTARIVRRFLSLEP

SEQ ID NO: 12664 - protein, 1202 aa, Phlogophora meticulosa
MLTRSRARVLNAPTTSSGSSLSSASQLPGPAPDVSPVTPAAAVASSSSDEYYSPPTSPPPVRRCGRGRPPASLGLRGPPASARVPASGGSVQRMRWTQSINENVMRSYYGATEGGTNLTAYRGRMLSLFQVLEPAVNVSAQRLSDQVRVIQRNHMLDDAVLDRLRLNSRSNRVTPASPPVAVQLQNLPSVSPRPDYVGEEDDDAAISVSSQCNVRLRSALEDAFREYRSTPPGLRQRLPRLPMHKKNKALMSALDSLLSNSFDSSRDLADTHSILYCAAVAACRVANVKFPNSVRSTRPAIPAWQCRIERRIGEARVLIGKLICFREGNTRPRVMRFVRRAFSGTDISSRDYLTRVTERIDFLKQKICAWANRIRRYKRRVERYTQNRTFRSDERWVYRTWERPDQGVTDTFLPDDEAMCLFWRSIWSVPVSHTEGDWTREVERMCEPLPEMGAINISPQDVACAVRPLPNWKSPGSDGLHNFWIKWLKSSHARLASQFQSALESGSLPQFLTTGITHLLHKSGSTAEPKNYRPITCLPTVYKVLTSILRSKINNHIDSTSIMSVSQNGCKNGSRGTKELLLIDMAISQQVRRSRKDLSTCWIDYKKAYDSVPHTWLMRVLELYKIDATLRTFLKSCMGQWRTVLHYPGCRQFQENSEPIRIERGIFQGDSLSPLWFCLALNPLSTLLEGSGLGYRLRRGGQVISHLLYMDDLKLFAHNNLQLMKLLKVTETFSSAIRMDFGVDKCAVMHVKRGGIVESTGTQLSDSIYLRSLSSTETYKYLGMSEALGINTADMKQSLKERFFGRLNKVLNSLLSGGNKVRAFNSWVMPVLMYSFGILKWTQTELDALDRRVRTLLTANRMHHPRSSVMRLYISRKCGGRGFLNAKTLHNREVCSLREYFLEADVGIHRDVVAMDKALTPLSLANENWRKPIVLDTTDRMEIWKSKELHGRFYRVLHGPNVDLSASVSWLRFGDLFGETEGFVCAIMDEVIMTNNYRKYIVKDGTVDICRACHRPGESIRHIISGCSRLANGDYLHRHNLVAKIIHQQLALKYNLVESEVPYYKYVPDPVLENGNITLYWDRSVITDRTIVANKPDIVVIDRSDRRTMIVDITVPHDENLVKAEKEKQIKYLDLAREVVDMWDVNTAVIVPIVVTANGIIAKSLDQHLRRLSLGSWIKGLIQKAVLLDTARIVRRFLSQEP

SEQ ID NO: 12665 - protein, 1202 aa, Phlogophora meticulosa
MLTRSRARVLNAPITSSGSSLSSASQLPGPAPDVSPVTPAAAVASSSSDEYYSPPTSPPPVRRCGRGRPPASLGLRGTPASARVPASGGSVQRMRWTQSINENVMRSYYGATEGGTNLTAYRGRMLSLFQVLEPAVIVSAQRLSDQVRVIQRNHMLDDAVLDRLRLNSRSNRVMPASSLVAVQLPSLPIVSPRPEYVGEEDDDAAISVSSQCNVRLRSALEDAFREYRSTPPELGQRLPRLPMHKKNKALMCALDSLLSNSFDNSKDLADTHSILYCAAAAACRVANVKFPNSKKATRPAVPAWQCRIERRIGEARVLIGKLICFREGNTRPRVMRFVRRAFSGTDISSRDYLSRVTERIDFLKQKICAWANRIRRYKRRVERYTQNRTFRSDERWVYRAWERPDQGVIDTCLPDDKAMYSFWRSIWSVPVSHTEGDWTREVERACEPLPVMGTINISPQDVACAVRPLPNWKSPGPDGLHNFWIKWLKSSHARLATQFQSALESGSLPQFLTTGITHLLHKSGSTAEPKNYRPITCLPTVYKVLTSILRSKINNHIETSSIMSVSQNGCKNGSRGTKELLLIDMTISQQVRRSRKDLSTCWIDYKKAYDSVPHTWLMRVLELYKIDATLHTFLTSCMRQWRTVLHYPGCRQFRENSEPIRIERGIFQGDSLSPLWFCLALNPLSTLLEGSGLGYRLRRGTQVISHLLYMDDLKLFAPNNLQLMELLKVTETFSSAIRMDFGVDKCAVMHVKRGGIVESAGTQLSDSIYLRSLSSTETYKYLGMSEALGINAADMKQSLKERFFGRLNKVLNSLLSGGNKVRAFNGWVMPVLMYSFGILKWTQTELDALDRRVRTLLTANRMHHPRSSVMRLYISRKCGGRGFLNAKTLHNREVCSLREYFLEADVGMHRDVVAVDKGLTPLSLANENWRKPIVLDTTDRMEIWKSKELHGRFYRVLHGSDVDLLASISWLRFGDLFGETEGFVCAIMDEVIMTNNYRKYIVKDGTVDICRACHRPGESIRHIISGCSRLANGEYLHRHNLVARIIHQQLALKYNLVELEVPYYKYVPDPVLENGNITLYWDRSIITDRTIVANKPDIVVIDRSERRTMIVDITVPHDENLVKAEKEKQMKYLDLAREVVDMWDVNTAVIVPIVVTANGIIAKSLDQHLRRLSLGSWIKGLIQKAVLLETARIVRRFLSQEP

SEQ ID NO: 12666 - protein, 1202 aa, Phlogophora meticulosa
MLTRSRARVLNAPKTSSGSSLSSASQLPGPAPDVSPVTPAAAVASSSSDEYYSPPTSPPPVRRCGRGRPPASLGLRGPPASARVPASGGSVQRMRWTQSINENVMRSYYGATEGGTNLTAYRSRMLSLFQVLEPAVNVSAQRLSDQVRVIQRNHMLDDTVLDRLRLNSRSNRVMPASPLVAVQLPSLPIVSPRPDYVGEEDDYAAISVSSQCNVRLRSALEDAFREYRSTPPELRQRLPRLPMHKKNKALMCALDSLLSNSFDNSKDLADTHSILYCAAAAACRVANVKFPNSKKATRPAVPAWQCRIERRIGEARVLIGKLICFREGNTRPRVMRFVRRAFSGTDISSRDYLTRVTERIDFLKQKICAWANRIRRYKRRVERYTQNRTFRSDERWVYRTWERPDQGVTDTFLPDDEAMCLFWRSIWSVPVSHTEGDWTREVERTCEPLPEMGAINISPQDVACAVRPLPNWKSPGPDGLHNFWIKWLKSSHARLASQFQSALESGSLPQFLTTGITHLLHKSGSTAEPKNYRPITCLPTVYKVLTSILRSKINNHIDSTSIMSVSQNGCKNGSRGTKELLLIDMAISQQVRRSRKDLSTCWIDYKKAYDSVPHTWLMRVLELYKIDATLRTFLKSCMGQWRTVLHYPGCRQFQENSEPIRIERGIFQGDSLSPLWFCLALNPLSTLLEGSGLGYRLRRGGQVISHLLYMDDLKLFAHNNLQLMKLLKVTETFSSAIRMDFGVDKCAVMHVKRGGIVESAGTQLSDSIYLRSLSSTKTYKYLGMSEALGINTADMKQSLKERFFGRLNKVLNSLLSGGNKVRAFNGWVMPVLMYSFGILKWTQTELDALDRRVRTLLTANRMHHPRSSVMRLYISRKCGGRGFLNAKTLHNREVCSLREYFLETDVGMHRDVVAMDKALTPLSLANENWRKPIVLDTTDRMEIWKSKELHGRFYRVLHGPDVDLSASVSWLRFGDLFGETEGFVCAIMDEVIMTNNYRKYIVKDGTVDICRACHRSGESIRHIISGCSRLANGDYLHRHNLVAKIIHQQLALKYNLVESEVPYYKYVPDPVLENGNITLYWDRSIITDRTIVANKPDIVVIDRLERRTMIVDITVPHDENLVKAEKEKQIKYLDLAREVVDMWDVNTAVIVPIVVTANGIIAKSLDQHLRRLSLGSWIKGLIQKAVLLDTARIVRRFLSQEP

SEQ ID NO: 12667 - protein, 868 aa, Phlogophora meticulosa
MRFVRRAFSGTDISSRDYLTRVTERIDFLKQKICAWANRIRRYKRRVERYTQNRTFRSDERWVYRTWERPDQGVTDTFLPDDEAMCLFWRSIWSVPVSHTEGDWTREVERTCEPLPEMGAINISPQDVACAVRPLPNWKSPGPDGLHNFWIKWLKSSHARLASQFQSALESGSLPQFLTTGITHLLHKSGSTAEPKNYRPITCLPTVYKVLTSILRSKINNHIDSTSIMSVSQNGCKNGSRGTKELLLIDMAISQQVRRSRKDLSTCWIDYKKAYDSVPHTWLMRVLELYKIDATLRTFLKSCMGQWRTVLHYPGCRQFQENSEPIRIERGIFQGDSLSPLWFCLALNPLSTLLEGSGLGYRLRRGGQVISHLLYMDDLKLFAHNNLQLMKLLKVTETFSSAIRMDFGVDKCAVMHVKRGGIVESAGTQLSDSIYLRSLSSTETYKYLGMSEALGINTADMKQSLKERFFGRLNKVLNSLLSGGNKVRAFNGWVMPVLMYSFGILKWTQTELDALDRRVRTLLTANRMHHPRSSVMRLYISRKCGGRGFLNAKTLHNREVCSLREYFLETDVGMHRDVVAMDKALTPLSLANENWRKPIVLDTTDRMEIWKSKELHGRFYRVLHGPDVDLSASVSWLRFGDLFGETEGFVCAIMDEVIMTNNYRKYIVKDGTVDICRACHRSGESIRHIISGCSRLANGDYLHRHNLVAKIIHQQLALKYNLVESEVPYYKYVPDPVLENGNITLYWDRSIITDRTIVANKPDIVVIDRLERRTMIVDITVPHDENLVKAEKEKQIKYLDLAREVVDMWDVNTAVIVPIVVTANGIIAKSLDQHLRRLSLGSWIKGLIQKAVLLDTARIVRRFLSQEP

SEQ ID NO: 12668 - protein, 1177 aa, Xestia xanthographa
MYIIIIICRARLPPPDSSLSSASPPPEPSPIVSAVTPAVAVASSSSDEYFSPPTTPPPARRRGGHRPPDGLGPRGPPASDRVPAPGGSMQRMRWTQSINENVMRAYYGATEGGNNLTAYRVRMLSLFQVLEPAVNVSAQRLSDQVRVIQRNRMLDDTVLVVPPQSSIIPCDNDVSNDMVTNVSTQCNVEMRSALEGAIREYRFMQPDLRPRIPRLPMHNRNRALVAVLDSQLSNYFDNCEDLTDVHSILYCAAVAACRVAHVKFPSDRATRPKPAIPAWQYRIERRIGGARALIGKLVCFREGNTRPRVMRFVRQAFSGTDISPRDYMSRVTERIDFLKQKVYAWANRIRRYKRRVDRYTQNRTFQKDERWVYRAWERPDQGVADTHLPDDDAMCSFWRSIWSVPVSHAEGEWTRVIERACDPISEMGAINISPQDVARAVRPLPNWKSPGPDGLHNFWIKWFTRSHARLATLFQSALESGSLPEFLTTGITHLLHKSGSTAEPKNYRPITCLPTVYKVLTSILRTKISKHIDDNSVMSASQNGCRNGSRGTKELLLIDMAISHQVRRSRKDLSTCWIDYKKAYDSVPHTWLMRVLELYKVDATLRTFLMSCMGQWRTVLRYPGCRQIHRNSEPIRIERGIFQGDSLSPLWFCLALNPLSTLLEDSGLGYRLRKDGQVISHLLYMDDLKLFAPNDLRLMELLKVTETFSNAIRMEFGVDKCAVMHVKRGEIVESVGTQLSDFITLRSLSATETYKYLGMSEALGVNVADMKQSLKERFFGRLKKVLNSLLSGGNKVRAFNGWVMPILMYSFGILKWTQTELDALDTKVRKLLTAYRMHRPRSSVMRLYIPRKCGGRGFLNAKTLHNREICSLREYFLGTDVGMHRDVVTMDKGFTPLSLAKENWRKPPVLDTNDRREVWQSKELHGRFFRALHGPDVDLSASVAWLRSGDLFGETEGFVCAIMDEVMMTNNYRRFIVKDGTVDICRACHRPGESIRHIISGCSRLANGEYLHRHNLVARIIHQQLALKYNLVESEVPYYRYVPDPVLYNGCITLYWDQSIITDRTIVANKPDIVVVDRSERRAMIVDITVPHDENLVKAEKDKQIKYLDLAREVVDMWEVDSAIIVPIVVSANGLIAKSLDQYLRRLSLGSWIKGLIQKAVLLDTARIVRRFLSLEP

SEQ ID NO: 12669 - protein, 961 aa, Xestia xanthographa
MHNKNRALVAVLDSQLSNYFDNCENLTDVHSILYCAAVAACRVAHVKFPSDRATRPKPAVPAWQYRIERRIGGARALIGKLVCFREGNTRPRVMRFVRQAFSGTDISPRAYMSRVTERIDFLKQKVYAWANRIRRYKRRVDRYTQNRTFQKDERWVYRAWERPDQGVADTHLPDDDAMCSFWRSIWSVPVSHAEGEWTRVIERACDPISEMGAITISPQDVARAVRPLPNWKSPGPDGLHNFWIKWFTRSHVRLATLFQSALESGSLPEFLTTGITHLLHKSGSTAEPKNYRPITCLPTVYKVLTSILRTKISKHIDDNSVMSASQNGCKNGSRGTKELLLIDMAISHQVRRSRKDLSTCWIDYKKAYDSVPHTWLMRVLELYKVDATLRTFLMSCMGQWRTVLRYPGCRQIQRNSEPIRIERGIFQGDSLSPLWFCLALNPLSTLLEDSGLGYRLRKDGQVISHLLYMDDLKLFAPNDLRLMELLKVTETFSNAIRMEFGVDKCAVMHVKRGEIVESVGTQLSDSITLRSLSATETYKYLGMSEALGVNVADMKQSLKERFFGRLKKVLNSLLSGGNKVRAFNGWVMPVLMYSFGILKWTQTELDALDTKVRKLLTAYRMHHPRSSVMRLYIPRKCGGRGFLNAKTLHNREICSLREYFLGTDVGMHRDVVTMDKGLTPLSLAKENWRKPPVLDTNDRREVWQSKELHGRFFRALHGPDVDLSASVAWLRSGDLFGETEGFVCAIMDEVMMTNNYRRFIVKDGTVDICRACHRQGESIRHIISGCSRLANGEYLHRHNLVARIIHQQLALKYNLVESEVPYYRYVPDPVLDNGCITLYWDQSIITDRTIVANKPDIVVVDRSERRAMIVDITVPHDENLVKAEKDKQIKYLDLAREVVDMWEVDSAIIVLIVVSAHGLIAKSLDQYLRRLSLGSWIKGLIQKAVLLDTARIVRRFLSLEP

SEQ ID NO: 12670 - protein, 1208 aa, Xestia xanthographa
MITRSRAKQHQKAHPPSPDSSLSSASQRPGHATPVSTVSPVAAVASSSSDEFFSPPSTPPPPPRGRRRGRGRPPAGLGPRGQQAPSRVPAAGGNVSRMRWTQSINENVMRAYYGATEGGSNLTAYRSRMLSLFQVLEPAVSVEAQRLSDQVRVIQRNHMLDDTVLDRLRSESRSNLVTPASPMIAVQVQNVSSAPPRSDRDGEEDDDEVISVSTQCNAQLRSALESAFREYRSTPPELRPRLPRLPMHNKNKALMCALDSQLSNCFDSSKDLADTHSILYCGAVAACRVAHVKFPNNDRATRPKLAVSAWQCRIERRIGEARALIGKLICFREGNTRPRVMRFVRRAFSGTDISFRDYLARVTERIDSLKQKICAWASRIRRYKRRVERYTQNRTFQSDERWVYRAWERPDQGVTDTRLPDDNAMCSFWRNIWSVPVSHTEGDWTWEVEQACDPIPEMGAIIISPQDVARAVRPLPNWKSPGPDGLHNFWIKWFPRSHACLASQFQSALESGSLPQFLTTGITHLLHKSGSTAEPKNYRPITCLPTVYKVLTSILRAKINQHIDSNSIMSASQNGCRNGSRGTKELLLIDMAISQQVRRSRKNLSTCWIDYKKAYDSVPHTWLMRVLELYKVDATLRTFLMSCMRQWRTVLRYPGCRQIQGNSEPIRIERGIFQGDSLSPLWFCLALNPLSTLLERSGLGYLLRRDGQVISHLLYMDDLKLFAPNNLQLMKLLKVTETFSSAIRMEFGVDKCAVMHVKRGEIMESVGTQLSDSIHLRSLSSTETYKYLGMSEALGINTADMKQSLRERFFGRLNKVLGSLLSGGNKVRAFNGWVMPVLMYSFGILKWTQTELDALDRRVRTLLTANRMHHPRSSVMRLYIPRKCGGRGFLNAKTLHNREVCSLREYFLEADGEMHRDVVSVDKGLTPLSLANENWRKPKVLNTNDRKEEWHGKELHGRFYRALHGPDVDFLASVSWLRFGDLFGETEGFVCAIMDEVMMTNNYRKYIVKDGTVDICRACHRPGESIRHIISGCSSLANGEYLHRHNLVARIIHQQLALKYNLVESEVPYYRYAPDPVLDNGNITLYWDRPITTDRTVVANRPDIVVIDRLERRTMIVDIAVPHDENLVKAEKDKQFKYLDLAREVVDMWDVNTAVIVPIVVSANGLIAKSLDQHLRRLSLGGWIKGLIQKAVLLDTARIVRRFLSQEP

SEQ ID NO: 12671 - protein, 1198 aa, Xestia xanthographa
MLTRSAAARRARLPPPDSSLSSASPPPEPSPIVSAVTPAVAVASSSSDEYFSPPTTPPPARRRGGRRPPDGLGPRGPPASDRVPAPGGSVQRMRWTQSINENVMRAYYGATEGGNNLTAYRVRMLSLFQVLEPAVNVSAQRLSDQVRVIQRNRMLDDTVLDRLRTEIQSSHVIATPSQAVVPPQSSIIPNCDNDVGNDMVTNVSTQCNVEMRSALEGAIREYRFMQPDLRPRIPRLPMHNKNRALVAVLDSQLSNYFDNCEDLTDVHSILYCAAVAACRVAHVKFPSDRATRPKPAVPAWQYRIERRIGGARALIGKLVCFREGNTRPRVMRFVRQAFSGTDISPRDYMSRVTERIDFLKQKVYAWANRIRRYKRRVDRYTQNRTFQKDERWVYRAWERPDQGVADTHLPDDDAMCSFWRSIWSVPVSHAEGEWTRVIERACDPVSEMGAITISPQDVARAVRPLPNWKSPGPDGLHNFWIKWFTRSHARLATLFQSALESGSLPEFLTTGITHLLHKSGSTAEPKNYRPITCLPTVYKVLTSILRTKISKHIDDNSVMSASQNGCRNGSRGTKELLLIDMAISHQVRRSRKDLSTCWIDYKKAYDSVPHTWLMRVLELYKVDATLRTFLMSCMGQWRTVLRYPGCRQIQRNSEPIRIERGIFQGDSLSPLWFCLALNPLSTLLEDSGLGYRLRKDGQVISHLLYMDDLKLFAPNDLQLMELLKVTDTFSSAIRMEFGVDKCAVMHVKRGEIVESVGTQLSDSITLRSLSATETYKYLGMSEALGVNVADMKQSLKERFFGRLKKVFNSLLSGGNKVRAFNGWVMPVLMYSFGILKWTQTELDALDTKVRKLLTAYRMHHPRSSVMRLYIPRKCGGRGFLNAKTLHNREICSLREYFLGTDVGMHRDVVTVDKGLTPLSLAKENWRKPPVLDTNDRREVWQSKELHGRFFRALHGPDVDLPASVAWLRSGDLFGETEGFVCAIMDEVMMTNNYRRFIVKDGTVDICRACHRPGETIRHIISGCSRLANGEYLHRHNLVARIIHQQLALKYNLVESEVPYYRYVPDPVLDNGCITLYWDQSIITDRTIVANKPDIVVVDRSERRAMIVDITVPHDENLVKAEKDKQIKYLDLAREVVDMWEVDSAIIVPIVVSAHGLIAKSLDQYLRRLSLGSWIKGLIQKAVLLDTARIVRRFLSLEP

SEQ ID NO: 12672 - protein, 1077 aa, Cosmia trapezina
MHSLFQVLEPALNVSAQRLSDQVRVIQRNHMLDDTVLDRLRSEMQSSRVIAPLSQTIVAPPPPQCNTNQADEGSDDTAANVSTQCNEELRSALEGAIQEYRFVSPELRPRLSRLPMHNKNRALVAALDSQLSNYFDDCEDLTDTHSILYCAAVAACRVAHVKFANDSRATRPKPAVPAWQCRIERRIGGARALIGKLICFREGNTHPRVMRFVRRAFSGTDVSPQDYMSRVTERIDFLRQKVYVWANRIRRYKRRVDRYTQNRTFQSDERWVYRGWERPDQGVTDTRLPDDDAMCSFWRSIWSVPVGHTEGDWAREVERACDPIPEMGAITICPQDVARAVRPLPNWKSPGPDGLHNFWIKWFPGSHARLAAQYQSALQSGSLPQFLTTGITHLLHKSGSTAEPKNYRPITCLPTVYKVLTSILRAKINEHIDTNSIMSVSQNGSRNGSRGTKELLLIDMAISQQVRRSRKDLSTCWIDYKKAYDSVPHTWLMRVLELYKVDATLRTFLMSCMGQWRTVLRYPGCRNIQRNSEPIRIERGIFQGDSLSPLWFCLALNPLSTLLEDSGLGYRLRRGGQVISHLLYMDDLKLFAPNNLQLMELLKVTETFSSAIRMEFGVDKCAVMHVKRGEIVESVGTQLSDSINLRTLSAAETYKYLGMSEALGINVADMKQSLKERFFGRLKKVFNSLLSGGNKVRAFNGWVMPVLMYSFGILKWTQTELDALDRRVRTLLTAYRMHHPRSSVMRLYIPRKCGGRGFLNAKTLHNREICSLREYFLEADVGMYRDVVAVDKGFTPLSLAKENWRKPVVLDTNDRMEVWQSKELHGRFFRALHGPDVDLLASVAWLRSGDLFGETEGFVCAIMDEVIMTNNYRRFFVKDGTVDICRACHRPGESIRHIISGCSRLANEEYLHRHNLVARIIHQQLALKYSLVESEVPYYRYVPDPVLENGNITLYWDRSIITDRTIVANKPDIVVVDRTERRAMVVDITVPHDGNLVKAEKDKQIKYLDLAREVVDMWDVDSAIIVPIVVSANGLIAKSLDQHLRRLSLGSWIKGLIQKAVLLDTARIVRRFLSLEP

SEQ ID NO: 12673 - protein, 1204 aa, Cosmia trapezina
MMQTRAKTRIQAHPPSPDSSLSSASQPVRASTVSAVSPVAAVASSSSDEFFSPPSSPTPPRRRGRGRPPAGLGPRGQPAPNRVPAAGGNVSRMRWTQSINENVMRAYYGATEGGINLTAYRGRMLSLFQVLEPAVNVSAQRLSDQVRVIQHNHRLDNATLDRLRSEMQSSSASNPPPSQNVMHVPAEIPLRANQRDEEENARAISADNLCNVEIRSALEDAIREYRFTSPDLRPRLPRLPMNKKNRALVCALDALLPNFIESSADLCDTHSILYCTAVAACRVACVKFPNTDRATRPKPAAPAWQCRIERRINEARVLIGKLICFREGNTRPRVMRFVRRAFSGTNVSPQEYVSRVTERIDFLKQKVYAWANRIRRYRRRVDRYSQNRMFQSDERWVYGAWERPIPTPGVTDVRPPDNETMSAFWRSIWSVPVSHTEGDWMRIVEQACDSIPNMDAVTISPLDVACAVRPLPNWKSPGPDGLHNFWIKWLQRSHACLASQFQSSLETGSLPLLFTTGVTHLLHKSGSTAEPKNYRPITCLPTVYKVLTSILRAKIAHHIYNNSIMSVSQNGCRNGSRGTKELLLIDMTISQQVRRSRKDLSTCWIDYKKAYDSVPHTWLIRVLELYKIDATLRTFLMSCMGQWKTVLLYPGCRRIPGIDEPIRIERGIFQGDSLSPLWFCLALNPLSTLLEDSGLGYRLRRGGQVISHLLYMDDLKLFAPNNLRLMELLKVTENFSSAIRMEFGVDKCAVMHVKRGEIMESVGTQLSDSIHLRSLSSTETYKYLGMSEALGINVADMKQSLKERFFGRLKKVFNSLLSGGNKVRAFNGWVMPVLMYSFGVLKWTQTELDALDRRVRTLLTAYRMHHPRSSVMRLYIPRKCGGRGFLNAKTLHNRKICSLREYFLEADVGMHRDVVAVDKGLTPLSLAKENWRKPAVLDTNDRREVWQGKELHGRFFRALHGPDVDFLASVSWLRFGDLFGETEGFVCAIMDEVIMTNNYRKYIVKDGTVDICRACHHPGESIRHIVSGCSRLANGEYLHRHNLVARIIHQQLALQYNLVESEVPYYRYVPDPVLENGQATLYWDRSIITDRTIVANKPDIVVIDRRERRAIIVDIAVPHDENLVKAEKDKKIKYLDLAHEVVDMWDVDSAIIVPIIVTVNGLIAQSLDQHLRRLSLRGWIKGLIQKAVLLDTARIVRRFLSLEP

SEQ ID NO: 12674 - protein, 1205 aa, Cosmia trapezina
MLTRSRAQHLRNTHPTSSGSSLSSASQLPEPAPDVSQVIPAAAVASSSSDEYFSPPTTPPPVRRRGRGRPPASLGPRGPPASDRVPAPGGSVQRMRWTQTVNENVIRAYFGATEGGSNLTAYRGRMLSLFQVLEPAVNVSAQRLSDQVRVIQRNHMLDDVVLDRLRLESRNSRVTSDSPMVAVQLQNLPSASPRPDRVGEEDDSGAISVSSQCNVQLRSALEDAFREYRSAPPGLRPRLPRLPMHKKNKALVCALDSQLSNCFDGSKDLADTHSILYCAAVAACRVAHVKFHNNDRVTRPKPAVPTWQCRIERRIGEARALIGKLICFREGNTRPRVMRFVRRAFSGMDISPRDYLTCVTERIDFLKQKICAWANRIRRYRRRVERYTQNRTFQSDERWVYRAWERPDQGVADTRLPDDDAMCSFWRSIWSVPVSHTEGDWTREVERACDHIPQMGALTISPQDVARAVRPLPNWKSPGPDGLHNFWIKWFQRSHARLASQFQSALQSGSLPQFLTTGITHLLHKSGSTAEPRNYRPITCLPTVYKVLTSILRAKINKHIDTNSIMSASQNGCGNGSRGTKELLLIDMTISQQVRRSRKDLSTCWIDYKKAYDSVPHTWLMRVLELYKIDATLRTFLMSCMGQWRTVLRYPGCRNIQRNSEPIRIERGIFQGDSLSPLWFCLALNPLSTLLEDSGLGYRLRRGGQVISHLLYMDDLKLFAPNNLQLMELLKVTETFSSAIRMEFGVDKCAVMHVKRGEIVESVRTQLSDSIHLRSLSSLETYKYLGMSEALGINAADMKQSLRERFFGRLNKVLNSLLSGGNKVRAFNGWVMPVLMYSFGILKWTQTELDALDRRVRTLLTANRMHHPRSSVMRLYIPRKCGGRGFLNAKTLHNREVCSLREYFLEVDVGMHREVVSVDKGLTPLSLANENWRKPIVLDTNDRREVWQSKELHGRFYRVLHGPDVDFLASVSWLRFGDLFGETEGFVFAIMDEVMMTNNYRKYIVKDGTVDICRACHRPGESIRHIISGCSRLANGDYLHRHNLVARIIHQQLALKYSLVESEVPYYRYVPDPVLENGNITLYWDRSIITDRTIVANKPDIVVIDRLERRTVIVDIAVPHDENLVKAEKDKQIKYLDLAREVVDMWDVDTAIIVPIVVTANGIIAKSLDQHLRRLSLGGWIKGLIQKAVLLDTARIVRRFLSQQP

SEQ ID NO: 12675 - protein, 1205 aa, Cosmia trapezina
MLTRSRAQQLRNTQPTSSGSSLSSASQLPEPAPDVSQVIPAAAVASSSSDEYFSPPTTPPPVRRRGRGRPPASLGPRGPSASDRVPAPGGSVQRMRWTQTVNENVMRAYFGATEGGSNLTAYRGRMLSLFQVLEPAVNVSAQRLSDQVRVIQRNHMLDDVVLDRLRLESRNSRVTSVSPMVAVQLQNLPSASPRPDCVGEEDDSGAISVSSQCNVQLRSALEDAFREYRSAPPGLRPRLPRLPMHKKNKALVGALDSQLSNCFDGSKDLADTHSILYCAAVAACRVAHVKFPNSDRVPRPKPAVPAWQCRIERRIGEARALIGKLICFREGNTRPRVMRFVRRAFSGTDISPRDYFACVTERIDFLKQKICAWANRIRRYRRRVERYTQNRTFQSDERWVYRAWERPDQGVADTQLPDDDAMCSFWRSIWSVPVSHTEGDWTREVERACDHIPQMGALTISPQDIARAVRPLPNWKSPGPDGLHNFWIKWFQRSHARLASQFQSALQSGSLPQFLTTGITHLLHKSGSTAEPRNYRPITCLPTVYKVLTSILRTKINKHIDTNSIMSASQNGCGNGSRGTKELLLIDMTINQQVRRSRKDLSTCWIDYKKAYDSVPHTWLMRVLELYKIDATLRTFLMSCMGQWRTVLRYPGCRNIQRNSEPIRIERGIFQGDSLSPLWFCLALNPLSTLLEDSGLGYRLRRGGQVISHLLYMDDLKLFAPNNLQLMELLKVTETFSSAIRMEFGVDKCAVMHVKRGEIVESVRTQLSDSIHLRSLSSLETYKYLGMSEALGINAADMKQSLRERFFGRLNKVLNSLLSGGNKVRAFNGWVMPVLMYSFGILKWTQTELDALDRRVRTLLTANRMHHPRSSVMRLYIPRKCGGRGFLNAKTLHNREVCSLREYFLEADVGMHRDVVSVDKGLTPLSLANENWRKPVVLDTNDRREVWQSKELHGRFYRVLHGPDVDFLASVSWLRFGDLFGETEGFVFAIMDEVMMTNNYRKYIVKDGTVDICRACHRPGESIRHIISGCSRLANGDYLHRHNLVARIIHQQLALKYSLVESEVPYYRYVPDPVLENGNITLYWDRSIITDRTIVANKPDIVVIDRLERRTMIVDIAVPHDENLVKAEKDKQIKYLDLAREVVDMWDVDTAIIVPIVVTANGIIAKSLDQHLRRLSLGGWIKGLIQKAVLLDTARIVRRFLSQQP

SEQ ID NO: 12676 - protein, 1200 aa, Cosmia trapezina
MLTRSATRKARLPPPDSSLSSASPPPVPSLTVSAVSTPAAVVASSSSDEYFSPPTTPPPARRRGGRRPPDGLGPRGPPASDRVPAPGGSVQRMRWTRAINENVMRSYYGATEGGNNLTAYRVRMHSLFQVLEPALNVSAQRLSDQVRVIQRNHMLDDTVLDRLRNEMQSSRVIAPLSQTIVAPPPPQCNTTQADEGSDGTAANVSTQCNEELRSALEGAIQEYRFVSPELRPRLPRLPMHNKNRALVAALDSQLSNYFDDCEDLTDTHSILYCAAVAACRVAHVKFANDSRATRPKPAVPAWQCRIERRIGGARALIGKLICFREGNTRPRVMRFVKRAFSGTDVSPQDYMSRVTERIDFLRQKVYAWANRIRRYKRRVDRYTQNRTFQSDERWVYRGWERPDQGVTDTRLPDDDAMCSFWRSIWSVPVSHTECDWAREVRRACDPIPEMGAITICPQDVARAVRPLPNWKSPGPDGLHNFWIKWFLGSHARLAAQYQSALQSGSLPQFLTTGITHLLHKSGSTTEPKNYRPITCLPTVYKVLTSILRAKINEHIDTNSIMSASQNGSRNGSRGTKELLLIDMAISQQVRRSRRDLSTCWIDYKKAYDSVPHTWLMRVLELYKVDATLRTFLMSCMGQWRTVLRYPGCRNIQRNSEPIRIERGIFQGDSLSPLWFCLALNPLSTLLENSGLGYRLRRGGQVISHLLYMDDLKLFAPSNLQLMELLKVTETFSSAIRMEFGVDKCAVMHVKRGEIVESVGTQLPDSINLRTLSAAETYKYLGMSEALGINVADMKQSLKERFFGRLKKVFNSLLSGGNKVRAFNGWVMPVLMYSFGILKWTQTELDALDRRVRTLLTAYRMHHPRSSVMRLYIPRKCGGRGFLNAKTLHNREICSLREYFLETDVGMHRDVVAVDKGLTPLSLAKENWRKPVVLDANDRMEVWQSKELHGRFFRALHGPDVNLLASVAWLRSGDLFGETEGFVCAIMDEVIMTNNYRRFIVKDGTVDICRACHRPGESIRHIISGCSRLANEEYLHRHNLVARIIHQQLALKYSLVESEVPYYRYVPDPVLENGHITLYWDRSIITDRTIVANKPDIVVVDRTERRAMIVDITVPHDGNLVKAEKDKQIKYIDLAREVVDMWDVDSAVIVPIVVSANGLIAKSLDQHLRRLSLGSWIKGLIQKAVLLDTARIVRRFLSLGP

SEQ ID NO: 12677 - protein, 1205 aa, Cosmia trapezina
MLTRSRAQHLKNTHPTSSGSSLSSASQLPEPAPDVSQVIPAAAVASSSSDEYFSPPTTPPPVRRRGRGRPPASLGPRGPPASDRVPAPGGSVQRMRWTQTVNENVMRAYFGATEGGSNLTAYRGRMLSLFQVLEPAVNVSAQRLSDQVRVIQRNHMLDDVVLDRLRLESRSSRVTSDSPMVAVQLQNLPSASPRPDRVGEEDDSGAISVSSQCNVQLRSALEDAFREYRSTPPGLRPRLPRLPMHKKNKALVCALDSQLSNCFDGSKDLADTHSILYCAAVAACRVAHVKFHNNDRVTRPKPAVPTWQCRIERRIGEARALIGKLICFREGNTRPRVMRFVRRAFSGMDISPRDYLTCVTERIDFLKQKICAWANRIRRYRRRVERYTQNRTFQSDERWVYRAWERPDQGVADTQLPDDDAMCSFWRSIWSVPVSHTEGDWTREVERACDHIPQMGALTISPQDVARAVRPLPNWKSPGPDGLHNFWIKWFQRSHARLASQFQSALQSGSLPQFLTTGITHLLHKSGSTAEPRNYRPITCLPTVYKVLTSILRAKINKHIDTNSIMSASQNGCGNGSRGTKELLLIDMTISQQVRRSRKDLSTCWIDYKKAYDSVPHTWLMRVLELYKIDATLRTFLMSCMGQWRTVLRYPGCRNIQRNSEPIRIERGIFQGDSLSPLWFCLALNPLSTPLEDSGLGYRLRRGGQVISHLLYMDDLKLFAPNNLQLMELLKVTETFSSAIRMEFGVDKCAVMHVKRGEIVESVRTQLSDSIHLRSLSSLETYKYLGMSEALGINAADMKQSLKERFFGRLNKVLNSLLSGGNKVRAFNGWVMPVLMYSFGILKWTQTELDALDRRVRTLLTANRMHHPRSSVMRLYIPRKCGGRGFLNAKTLHNREVCSLREYFLEADVGMHREVVSVDKGLTPLSLANENWRKPIVLDTNDRREVWQSKELHGRFYRVLHGPDVDFLASVSWLRFGDLFGETEGFVFAIMDEVMMTNNYRKYIVKDGTVDICRACHRPGESIRHIISGCSRLANGDYLHRHNLVARIIHQQLALKYSLVESEVPYYRYVPDPVLENGNITLYWDRSIITDRTIVANKPDIVVIDRLERRTVIVDIAVPHDENLVKAEKDKQIKYLDLAREVVDMWDVDTAIIVPIVVTANGIIAKSLDQHLRRLSLGGWIKGLIQKAVLLDTARIVRRFLSQQP

SEQ ID NO: 12678 - protein, 1203 aa, Mamestra brassicae
MLTRSRARAQTAQPTSSGSSLSSASQPPGPAPAVSPEIPVAAVASSSSDEYFSPPTTPPPARRRGRGRPPTSLGPRGPPASDRVPAIGGSVQRMRWTQTINENVMRSYYGATEGGTNLTAYRGRMLSLFQVLEPAVNVSAQRLSDQVRVILRNRMLDDAVLDRLRLESRSGRVSPASPPAAVQIQSSISPRSNNVGEDDDDGAISVSTQCNERLRSALEDAFREYRSTPPELRPRLPRLPMHNKNRALVCALDSQLTNCFDSSEDLADTHSILYCAAAAACRVAHVKFLNSDRATRPAVPAWQCRIERRIGEARALIGKLICFREGNTRRRVMRFVRRAFSGTDTTDTSPRDYLTRVTERIDFLKQKIYAWANRIRRYKRRVERYTQNRTFQSNERWVYRAWERPDQGVTDTRLPDDDVMCSFWRNIWSVPVSHTEGDWIREVERACDPILEMGATTISPQDVARAVRPLPNWKSPGPDGLHNFWIKWFTGSHARLASQFQSALESGSLPQFLTTGITHLLHKSGSTAEPKNYRPITCLPTVYKVLTSILRAKINHHIESNSIMSASQNGCRNGSRGTKELLLMDIAISQQVRRSRKDLSTCWIDYKKAYDSVPHTWLMRVLELYKVDAVLRTFLMSCMGQWRTVLRYPGCRQIQVNGDPIRIERGIFQGDSLSPLWFCLALNPLSTLLEGSGQGYRLRRGGQVISHLLYMDDLKLFAPNNLQLMELLKVTETFSSAISMEFGVDKCAVMHVKRGEIMESVGTQLSDSIHLRSLSSTETYKYLGMSEALGINANDMKQSLKERFFGRMNKVLNSLLSGGNKVRAFNGWVMPVLMYSFGILKWTQTELDALDRRVRSLLTANRMHHPRSSVMRLYIPRKCGGRGFLNAKTLHNREICSLREFFLEADVGMHRDVVAVDKGLTALSLANENWRKPVVLDTNDRREVWQSKELHGRFYRVLHGPDVDFLASVAWLRFGDLFGETEGFVCAIMDEVMMTNNYRKYIVKDGTVDICRACHRPGESIRHIISGCSSLANGDYLHRHNLVARIIHQQLALKYNLVESEVPYYRYVPDPVLENGNCTLYWDRSIITDRTIVANKPDIVVIDRLERRAMIVDIAVPHDENLVKTEKDKQTKYLDLAREVVDMWDVNTAVIVPIVVTANGIIAKSLDQHLKRLSLGSWIKGLIQKAVLLDTARIVRRFLSQGP

SEQ ID NO: 12679 - protein, 1200 aa, Mamestra brassicae
MLTRSRARAQTAQPTSSGSSLSSASQPPGPAPAVSPEIPVAAVASSSSDEYFSPPTTPPPARRRGRGRPPTSLGPRGPPASDRVPAIGGSVQRMRWTQTINENVMRSYYGATEGGTNLTAYRGRMLSLFQVLEPAVNVSAQRLSDQVRVILRNRMLDDAVLDRLRLESRSGRVSPASPPAAVQIQSSISPRSNNVGEDDDDGAISVSTQCNERLRSALEDAFREYRSTPPELRPRLPRLPMHNKNRALVCALDSQLTNCFDSSEDLADTHSILYCAAAAACRVAHVKFLNSDRATRPAVPAWQCRIERRIGEARALIGKLICFREGNTRRRVMRFVRRAFSGTDTSPRDYLTRVTERIDFLKQKIYAWANRIRRYKQRVERYTQNRTFQSNERWVYRAWERPDQGVTDTRLPDDDVMCSFWRNIWSVPVGHTEGDWIREVERACDPILEMGATTISPQDVARAVRPLPNWKSPGPDGLHNFWIKWFTGSHARLASQFQSALESGSLPQFLTTGITHLFHKSGSTEEPKNYRPITCLPTVYKVLTSILRAKINHHIESNSIMSASQNGCRNGSRGTKELLLMDIAISQQVRRSRKDLSTCWIDYKKAYDSVPHTWLMRVLELYKVDAVLRTFLMSCMGQWRTVLRYPGCRQIQVNGDPIRIERGIFQGDSLSPLWFCLALNPLSTLLEGSGQGYRLRRGGQVISHLLYMDDLKLFAPNNLQLMELLKVTETFSSAISMEFGVDKCAVMHVKRGEIMESVGTQLSDSIHLRSLSSTETYKYLGMSEALGINANDMKQSLKERFFGRLNKVLNSLLSGGNKVRAFNGWVMPVLMYSFGILKWTQTELDALDRRVRSLLTANRMHHPRSSVMRLYIPRKCGGRGFLNAKTLHNREICSLREFFLEADVGMHRDVVAVDKGLTALSLANENWRKPVVLDTNDRRKVWQSKELHGRFYRVLHGPDVDFLASVAWLRFGDLFGETEGFVCAIMDEVMMTNNYRKYIVKDGTVDICRACHRPGESIRHIISGCPSLANGDYLHRHNLVARIIHQQLALKYNLVESEVPYYRYVPDPVLENGNCTLYWDRSIITDRTIVANKPDIVVIDRLERRAMIVDIAVPHDENLVKTEKDKQTKYLDLAREVVDMWDVNTAVIVPIVVTANGIIAKSLDQHLKRLSLGSWIKGLIQKAVLLDTARIVRRFLSQGP

SEQ ID NO: 12680 - protein, 1192 aa, Mamestra brassicae
MLTRSRARHLASHPSPSASSLSSASPPPEPSPTVSAVTPAVAVASSSSDEYFSPPTTPPPARWRRGRRPRPRGPPASDRVPAPGGSVQRMRWTQSINENVMRSYFGATEGGTNLTAYRGRMLSLFQVLEPAVNVSAQRLSDQVRVIQRNRMLDDSVLDRLRMEMCGHVITPPSQTVSPPQSQISSHADEESNDRVTNVSTQCNEELRSALECAIREYRYIPPELRPRLPRLPMHNKNRALVAALDSQLSNYFDDCEDLTDTHSIMYCAAVAACRVAHVKMTNDRVTRPKPAVPAWQCRIERRIGGARALIGKLICFREGNTRPRVMRFVRRAFSGTDISPRDYMSRVTERIDFLKQKVYAWANRIRRYRRRVERYTQNRTFRSNERWVYRVWEQPDQGVTDTCLPDDDAMCSFWRNIWSVPVSHTEGGWIREVERACDPLPEMGAITISPQDVARALRPLPNWKSPGPDGLHNFWIKWLQRSHARLASQYQTALESGSLPEFLTTGVTHLLHKSGSTAEPKNYRPITCLPTVYKVLTSILRAKINNHINSNNIMSVSQNGCRNGSRGTKELLLIDMAISQQVRRFRKDLSTCWIDYKKAYDSVPHTWLMRVLELYKIDTMLRTFLMSCMGQWRTVLRYPGCRNIQRNSEPVRIERGIFQGDSLSPLWFCLALNPLSTLLENSGLGYRLKRGGQVISHLLYMDDLKLFAPSNLQLMELLKVTETFSSAIRMEFGVDKCAVMHVKRGEIMESVGTQLSDSINLRSLSSTETYKYLGMSEALGINVTDMKQSLRERFFGRLKKVFNSLLSGGNKVRAFNGWVMPVLMHSFGVLKWTQTELDALDRRVRTLLTAYRMHHPRSSVMRLYIPRKCGGRGFLNAKTLHNREICSLREYFLAVDVGMHRDVVTVDKGLTPLSLANENWRKPAVLDTNDRRAVWQSKELHGRFFRALHGPDVDQLASVAWLRFGDLFGETEGFVCAIMDEVIMTNNYRRFIVKDGTVDICRACHRPGESIRHIVSGCSRLANGEYLHRHNLVARIIHQQLALKYSLVESEVPYYRYAPDPVLDNGNITLYWDRSIITDRTIVANKPDIVVVDRIERRAMIVDITVPHDENLVKAEKDKQIKYIDLAREVVDMWDVDSAIVPIVVSANGLIATSLDQHLRRLSLGSWIKGLIQKAVLLDTARIVRRFLSLEP

SEQ ID NO: 12681 - protein, 960 aa, Mamestra brassicae
MHNKNRALVCALDSQLTNCFDSSEDLADTHSILYCAAAAACRVAHVKFLNSDRATRPAVPAWQCRIERRIGEARALIGKLICFREGNTRRRVMRFVRRAFSGTDTSPRDYLTRVTERIDFLKQKIYAWANRIRRYKRRVERYTQNRTFQSNERWAYRAWERPDQGVTDTRLPDDDVMCSFWRNIWSVPVSHTEGDWIREVERACDPILEMGATTISPQDVARAVRPLPNWKSPGPDGLHNFWIKWFTGSHARLASQFQSALESGSLPQFLTTGITHLLHKSGSTAEPKNYRPITCLPTVYKVLTSILRAKINHHIESNSIMSASQNGCRNGSRGTKELLLMDIAISQQVRRSRKDLSTCWIDYKKAYDSVPHTWLMRVLELYKVDAVLRTFLMSCMGQWRTVLRYPGCRQIQVNGDPIRIERGIFQGDSLSPLWFCLALNPLSTLLEGSGQGYRLRRGGQVISHLLYMDDLKLFAPNNLQLMELLKVTETFSSAISMEFGVDKCAVMHVKRGEIMESVGTQLSDSIHLRSLSSTETYKYLGMSEALGINANDMKQSLKERFFGRLNKVLNSLLSGGNKVRAFNGWVMPVLMYSFGILKWTQTELDALDRRVRSLLTANRMHHPRSSVMRLYIPRKCGGRGFLNAKTLHNREICSLREFFLEADVGMHRDVVAVDKGLTALSLANENWRKPVVLDTNDRREVWQSKELHGRFYRVLHGPDVDFLASVAWLRFGDLFGETEGFVCAIMDEVMMTNNYRKYIVKDGTVDICRACHRPGESIRHIISGCSSLANGDYLHRHNLVARIIHQQLALKYNLVESEVPYYRYVPDPVLENGNCTLYWDRSIITDRTIVANKPDIVVIDRLERRAMIVDIAVPHDENLVKTEKDKQTKYLDLAREVVDMWDVNTAVIVPIVVTANGIIAKSLDQHLKRLSLGSWIKGLIQKAVLLDTARIVRRFLSQGP

SEQ ID NO: 12682 - protein, 988 aa, Noctua fimbriata
MRSALEGAIREYRFMQPDLRPRIPRLPMHNKNRALVAVLDSQLSNYFDNCEDLTDAHSILYCAAVAACRVAHVKFSNDRATRPKPAVPPWQYRIERRIGGARALIGKLICFREGNTRPRVMRFVRRAFSGTDISPRDYMSRITERIDFLKQKVYAWANRIRRYKRRVDRYTQNRTFQRDERWVYRAWERPDQGVADTRLPDDDAMCSFWRSIWSVPVSHTEGEWTQGVERACDLVPEMGAITISPQDVVRAVRPLPNWKSPGPDGLHNFWIKWFTRSHARLAILFQSALESGSLPEFLTTGITHLLHKSGSTAEPKNYRPITCLPTVYKVLTSILRAKINKHIDDNSIMSASQNGCRNGSRGTKELLLIDMAISQQVRRSRRDLSTCWIDYKKAYDSVPHTWLMRVLELYKVDATLRTFLMSCMGQWRTVLRYPGCRQIQRNSEPIRIERGIFQGDSLSPLWFCLALNPLSTLLEDSGLGYRLRRGGQVISHLLYMDDLKLFAPNDLQLMELLKVTETFSSAIRMEFGVDKCAVMHVKRGEIVESVGTQLSDSINLRSLSATETYKYLGMSEALGINVADMKQSLKERFFGRLKKVFNSLLSGGNKVRAFNGWVMPVLMYSFGILKWTQTELDALDRRVRTLLTAYRMHHPRSSIMRLYIPRKCGGRGFLNAKTLHNREICSLREYFLETDVGMHRDVVAVDKGLTPLSLAKENWRKPLVLDTNDRMEVWQSKELHGRFFRALHGPDVDLSASVAWLRSGDLFGETEGFVCAIMDEVMMTNNYRRFIVKDGTVDICRACHRPGESIRHIISGCSRLANGEYLHRHNLVARIIHQQLALKYNLVESEVPYYKYVPDPVLENGSITLYWDQSIITDRTIVANKPDIVLVDRSERRTMIVDITVPHDENLVKAEKDKKIKYLDLAREVVDMWDVDSAIIVPIVVSAHGLIAKSLDQYLRRLSLGSWIKGLIQKAVLLDTARIVRRFLSLEP

SEQ ID NO: 12683 - protein, 1197 aa, Noctua fimbriata
MLTRAAAKRARLSPPDPSLSSASPPPESSPVVSAVTPAVAVASSSSDEYFSPPTTPPPVRRRGGRRPPDGLGPRGPPASDRVPAPGGSVQRMRWTQSINENVMRSYYGATEGGNNLTAYRVRMLSLFQVLEPAVNVSAQRLSDQVRVIQRNRMLDDTVLDRLRTETQSSHVITPSAQAVVLPQSSTIPNRDNDVSNDMVTNVSTQCNEEMRSALEGAIREYRFMQPDLRPRIPRLPMHNKNRALVAVLDSQLSNYFDNCEDLTDAHSILYCAAVAACRIAHVKFSDDRATRPKPAVPPWQYRIERRIGGARALIGKLICFREGNTRPRVMRFVRRAFSGTDISPRDYMSRITERIDFLKQKVYAWASRIRRYKRRVDRYTQNRTFQRDERWVYRTWERPDQGVADTRIPDDDAMCSFWRSIWSVPVSHTEGEWTREVERACDLVPEMGAITISPQDVVRAVRPLPNWKSPGPDGLHNFWIKWFTRSHARLAILFQSALESGSLPEFLTTGITHLLHKSGSTAEPKNYRPITCLPTVYKVLTSILRAKINKHIDDNSIMSASQNGCRNGSRGTKELLLIDMAISQQVRRSRRDLSTCWIDYKKAYDSVPHTWLMRVLELYKVDATLRTFLMSCMGQWRTVLRYPRCWQIQRNSEPIRIERGIFQGDSLSPLWFCLALNPLSTLLEDSGLGYQLRRGGQVISHLLYMDDLKLFAPNDLQLMELLKVTETFSSAIRMEFGVDKCAVMHVKRGEIVESVGTQLSDSINLRSLSATETYKYLGMSEALGINVADMKQSLKERFFGRLKKVFNSLLSGGNKVRAFNGWVMPVLMYSFGILKWTQTELDAMDRRVRTLLTAYRMHHPRSSVMRLYIPRKCGGRGFLNAKTLHNREICSLREYFLETDVGMHRDVVAMDKGLTPLSLAKENWRKPLVLDTNDRMEVWQSKELHGRFFRALHGPDVDLSASVAWLRSGDLFGETEGFVCAIMDEVMMTNNYRRFIVKDGTVDICRACHRPGESIRHIISGCSRLANGEYLHRHNLVARIIHQQLALKYNLVESEVPYYKYVPDPVLENGSITLYWDQSIITDRTIVANKPDIVVVDRSERRTMIVDITVPHDENLVKAEKDKKIKYLDLAREVVDMWDVDSAIIVPIVVSAHGLIAKSLDQYLRRLSLGSWIKGLIQKAVLLDTARIVRRFLSLEP

SEQ ID NO: 12684 - protein, 1198 aa, Noctua fimbriata
MLTRAAAKRARLSPPDPSLSSASPPPESSPVMSAVTPAVAVASSSSDEYFSPPTTPPPVRRRGGRRPPDGLGPRGPPASDRVPAPGGSVQRMRWTQSINENVMRSYYGATEGGNNLTAYRVRMLSLFQVLEPAVNVSAQRLSDQVRVIQRNRMLDDTVLDRLRTEMQSSHVIATPPPQAVVPPQSTIIPNRDNDVSNDIVTNVSTQCNEEMRSALEGAIREYRFMQPDLRPRIPRLPMHNKNRALVAVLDSQLSNYFDNCEDLTDAHSILYCAAVAACRVAHVKFSNDRATRPKPAVPPWQYRIERRIGGARALIGKLICFREGKTRPRVMRFVRRAFSGTDISPRDYMSRITERIDFLKQKVYAWANRIRRYKRRVDRYTQNRTFQRDERWVYRAWERPDQGVADTRLPDDDAMCSFWRSIWSVPVSHTEGEWTQGVERACDLVPEMGAITISPQDVVRAVRPLPNWKSPGPDGLHNFWIKWFTRSHARLAILFQSALESGSLPEFLTTGITHLLHKSGSTAEPKNYRPITCLPTVYKVLTSILRAKINKHIDDNSIMSASQNGCRNGSRGTKELLLIDMAISQQVRRSRSDLSTCWIDYKKAYDSVPHTWLMRVLELYKVDATLRTFLMSCMGQWRTVLRYPGCRQIQRNSEPIRIERGIFQGDSLSPLWFCLALNPLSTLLEDSGLGYRLRRGGQVISHLLYMDDLKLFAPNDLQLMELLKVTETFSSAIRMEFGVDKCAVMHVKRGEIVESVGTQLSDSINLRSLSATETYKYLGMSEALGINVADMKQSLKERFFGRLKKVFNSLLSGGNKVRAFNGWVMPVLMYSFGILKWTQTELDALDRRVRTLLTAYRMHHPRSSVMRLYIPRKCGGRGFLNAKTLHNREICSLREYFLETDVGMHRDVVAVDKGLTPLSLAKENWRKPLVLDTNDRMEVWQSKELHGRFFRALHGPDVDLSASVAWLRSGDLFGETEGFVCAIMDEVMMTNNYRRFIVKDGTVDICRACHRPGESIRHIISGCSRLANGEYLHRHNLVARIIHQQLALKYNLVESEVPYYKYVPDPVLENGSITLYWDQSIITDRTIVANKPDIVVVDRSERRTMIVDITVPHDENLVKAEKDKKIKYLDLAREVVDMWDVDSAIIVPIVVSAHGLIAKSLDQYLRRLSLGSWIKGLIQKAVLLDTARIVRRFLSLEP

SEQ ID NO: 12685 - protein, 1200 aa, Noctua fimbriata
MLTRSAAARRARLLPPDPSLSSASPPPESSPIVSAVTPAVAVASSSSDEYFSPPTTPPPVRRRGGRRPPDGLGPRGPPASDRVPAPGGSVQRMRWTQSINENVMRSYYGATEGGNNLTAYRVRMLSLFQVLEPAVNVSAQRLSDQVRVIQRNRMLDDTVLDRLRTEMQSSHVITPSAQAVVLPQSSTITNRDNDVSNDMVTNVSTQCNEEMRSALEGAIREYRFMQPDLRPRIPRLPMHNKNRALVAVLDSQLSNYFDNCEDLTDAHSVLYCAAVAACRVAHVKFFDDRATRPKPVVPPWQYRIERRIDGARALIGKLICFREGNTRPRVMRFVRRAFSGTDISPRDYMSRIIDIERIDFLKQKVYAWASRIRRYKRRVDRYTQNRTFQRDERWVYRAWERPDQGVADTRIPDDDAMCSFWRSIWSVPVSHTEGEWTREVERACDLVPEMGAITISPQDVVRAVRPLPNWKSPGPDGLHNFWIKWFTRSHARLAILFQSALESGSLPEFLTTGITHLLYKSGSTAEPKNYRPITCLPTVYKVLTSILRAKINKQIDDNSIMSASQNGCRNGSRGTKELLLIDMAISQQVRRSRRDLSTCWIDYKKAYDSVPHTWLMRVLELYKVDATLRTFLMSCMGQWRTVLRYPGCRQIQRNSEPIRIERGIFQGDSLSPLWFCLALNPLSTLLEDSGLGYRLRRGGQVISHLLYMDDLKLFAPNDLQLMELLKVTETFSSAIRMEFGVDKCAVMHVKRGEIVESVGTQLSDSINLRSLSATETYKYLGMSEALGINVADMKQSLKERFFGRLKKVFNSLLSGGNKVRAFNGWVMPVLMYSFGILKWTQTELDALDRRVRTLLTAYRMHHPRSSVMRLYIPRKCGGRGFLNAKTLHNREICSLREYFLETDVGMHRDVVAVDKGLTPLSLAKENWRKPLVLDTNDRMEVWQSKELHGRFFRALHGPDVDLSASVAWLRSGDLFGETEGFVCAIMDEVMMTNNYRRFIVKDGTVDICRACHRPGESIRHIISGCSRLANGEYLHRHNLVARIIHQQLALKYNLVESEVPYYKYVPDPVLENGSITLYWDQSIITDRTIVANKPDIVVVDRSERRTMIVDITVPHDENLVKAEKDKKIKYLDLAREVVDMWDVDSAIIVPIVVSAHGLIAKSLDQYLRRLSLGSWIKGLIQKAVLLDTARIVRRFLSLEP

SEQ ID NO: 12686 - protein, 1198 aa, Noctua fimbriata
MLTRAAAKRARLSPPDPSLSSASPPPESSPVMSAVTPAVAVASSSSDEYFSPPTTPPPVRRRGGRRPPDGLGPRGPPASDRVPAPGGSVQRMRWTQSINENVMRSYYGATEGGNNLTAYRVRMLSLFQVLEPAVNVSAQRLSDQVRVIQRNRMLDDTVLDRLRTEMQSSHVIATPPPQAVVSPQSTIIPNRDNDVSNDIVTNVSTQCNEEMRSALEGAIREYRFMQPDLRPRIPRLPMHNKNRALVAVLDSQLSNYFDNCEDLTDAHSILYCAAVAACRVAHVKFSNDRATRPKPAVPPWQYRIERRIGGARALIGKLICFREGNTRPRVMRFVRRAFSGTDISPRDYMSRITERIDFLKQKVYAWANRIRRYKRRVDRYTQNLTFQRDERWVYRAWERPDQGVADTRLPDDDAMCSFWRSIWSVPVSHTEGEWTQGVERACDLIPEMGAITISPQDVVRAVRPLPNWKSPGPDGLHNFWIKWFTRSHARLAILFQSALESGSLPEFLTTGITHLLHKSGSTAEPKNYRPITCLPTVYKVLTSILRAKINKHIDDNSIMSASQNGCRNGSRGTKELLLIDMAISQQVRRSRRDLSTCWIDYKKAYDSVPHTWLMRVLELYKVDATLRTFLMSCMGQWRTVLRYPGCRQIQRNSEPIRIERGIFQGDSLSPLWFCLALNPLSTLLEDSGLGYRLRRGGQVISHLLYMDDLKLFAPNDLQLMELLKVTETFSSAIRMEFGVDKCAVMHVKRGEIVESVGTQLSDSINLRSLSATETYKYLGMSEALGINVADMKQSLKERFFGRLKKVFNSLLSGGNKVRAFNGWVMPVLMYSFGILKWTQTELDALDRRVRTLLTAYRMHHPRSSIMRLYIPRKCGGRGFLNAKTLHNREICSLREYFLETDVGMHRDVVAVDKGLTPLSLAKENWRKPLVLDTNDRMEVWQSKELHGRFFRALHGPDVDLSASVAWLRSGDLFGETEGFVCAIMDEVMMTNNYRRFIVKDGTVDICRACHRPGESIRHIISGCSRLANGEYLHRHNLVARIIHQQLALKYNLVESEVPYYKYVPDPVLENGSITLYWDQSIITDRTIVANKPDIVVVDRSERRTMIVDITVPHDENLVKAEKDKKIKYLDLAREVVDMWDVDSAIIVPIVVSAHGLIAKSLDQYLRRLSLGSWIKGLIQKAVLLDTARIVRRFLSLEP

SEQ ID NO: 12687 - protein, 1198 aa, Noctua fimbriata
MLTRSAARRARLSPPDPSLSSASPPPESSPVVSAVTPAVAVASSSSDEYFSPPTTPPPVRRRGGRRPPDGLGPRGPPASDRVPAPGGSVQRMRWTQSINANVMRAYYGATEGGNNLTAYRVRMLSLFQVLEPAVNVSAQRLSDQVRVIQRNRMLDDTVLDRLRTEMQSSHVIATPPPQAVVPPQSTIIPNRDNDVSNDIVTNVSTQCNEEMRSALEGAIREYRFMQPDLRPRIPRLPMHNKNRALVAVLDSQLSNYFDNCEDLTDAHSILYCAAVAACRVAHVKFSDDRATRPKPAVPPWQYRIERRIGGARALIGKLICFREGNTRPRVMRFVRRAFSGTDISPRDYMSRITERIDFLKQKVYAWANRIRRYKRRVDRYTQNRTFQRDERWVYRVWERPDQGVADTRLPDDDAMCSFWRSIWSVPVSHTEGEWTQGVERACDLVPEMGAITISPQDVVRAVRPLPNWKSPGPDGLHNFWIKWFTRSHARLAILFQSALESGSLPEFLTTGITHLLHKSGSTAEPKNYRPITCLPTVYKVLTSILRAKINKHIDDNSIMSASQNGCRNGSRGTKELLLIDMAISQQVRRSRSDLSTCWIDYKKAYDSVPHTWLMRVLELYKVDATLRTFLMSCMGQWRTVLRYPGCRQIQRNSEPIRIERGIFQGDSLSPLWFCLALNPLSTLLEDSGLGYRLRRGGQVISHLLYMDDLKLFAPNDLQLMELLKVTKTFSSAIRMEFGVDKCAVMHVKRGEIVESVGTQLSDSINLRSLSATETYKYLGMSEALGINVADMKQSLKERFFGRLKKVFNSLLSGGNKVRAFNGWVMPVLMYSFGILKWTQTELDALDRRVRTLLTAYRMHHPRSSVMRLYIPRKCGGRGFLNAKTLHNREICSLREYFLETDVGMHRDVVAVDKGLTPLSLAKENWRKPLVPDTNDRMEVWQSKELHGRFFRALHGPDVDLSASVAWLRCGDLFGETEGFVCAIMDEVMMTNNYRRFIVKDGTVDICRACHRPGESIRHIISGCSRLANGEYLHRHNLVARIIHQQLALKYNLVESEVPYYKYVPDPVLENGSITLYWDQSIITDRTIVANKPDIVVVDRSERRTMIVDITVPHDENLVKAEKDKKIKYLDLAREVVDMWDVDSAIIVPIVVSAHGLIAKSLDQYLRRLSLGSWIKGLIQKAVLLDTARIVRRFLSLEP

SEQ ID NO: 12688 - protein, 988 aa, Noctua fimbriata
MRSALEGAIREYRFMQPDLRPRIPRLPMHNKNRALVAVLDSQLSNYFDNCEDLTDAHSILYCAAVAACRVAHVKFSDDRATRPKPAVPPWQYRIERRIGGARALIGKLICFREGNTRPRVMRFVRRAFSGTDISPRDYMSRITERIDFLKQKVYAWANRIRRYKRRVDRYTQNRTFQRDERWVYRAWERPDQGVADTRLPDDDAMCSFWRSIWSVPVSHTEGEWTQGVERACDLVPEMGAITISPQDVVRAVRPLPNWKSPGPDGLHNFWIKWFTRSHARLAILFQSALESGSLPEFLTTGITHLLHKSGSTAEPKNYRPITCLPTVYKVLTSILRAKINKHIDDNSIMSASQNGCRNGSRGTKELLLIDMAISQQVRRSRSDLSTCWIDYKKAYDSVPHTWLMRVLELYKVDATLRTFLMSCMGQWRTVLRYPGCRQIQRNSEPIRIERGIFQGDSLSPLWFCLALNPLSTLLEDSGLGYRLRRGGQVISHLLYMDDLKLFAPNDLQLMELLKVTETFSSAIRMEFGVDKCAVMHVKRGEIVESVGTQLSDSINLRSLSATETYKYLGMSEALGINVADMKQSLKERFFGRLKKVFNSLLSGGNKVRAFNGWVMPVLMYSFGILKWTQTELDALDRRVRTLLTAYRMHHPRSSVMRLYIPRKCGGRGFLNAKTLHNREICSLREYFLETDVGMHRDVVAVDKGLTPLSLAKENWRKPVVFDTNYRMEVWQSKELHGRFFRALHGPDVDLSASVAWLRSGDLFGETEGFVCAIMDEVMMTNNYRRFIVKDGTVDICRACHRPGESIRHIISGCSRLANGEYLHRHNLVARIIHQQLALKYNLVELEVPYYKYVPDPVLENGSITLYWDQSIITDRTIVANKPDIVVVDRSERRTMIVDITVPHDENLVKAEKDKKIKYLDLAREVVDMWDVDSAIIVPIVVSAHGLIAKSLDQYLRRLSLGSWIKGLIQKAVLLDTARIVRRFLSLEP

SEQ ID NO: 12689 - protein, 1198 aa, Atethmia centrago
MLTRSAAVRARLPPPDSSLSSASPPPVPSPTVCAVTTPTAAVASSSSDEYFSPPTTPPPVRRRGGRRPPDGLGSRGPPASDRVPAPGGSVKRMRWTQSVNENVMRSYYGATEGGNNLTAYRVRMLSLFQVLEPAVNVSAQRLSDQVRVIQRNHMLDDTVLDRLRSEMQRSHVIVPPSQTVVHSPQLSTNQADEGSDDRATNVSTQCNVELRSALEDAIREYRLMSPELRPRLPRLPMHKKNRALVAALDSQLSNYFDDCEDLTDTHSILYCAAVAVCRVAHVKFAKDSRTTRPKPTVPAWQCRIESRIGGARALIGKLICFREGNTRPRVMRFVRRAFSGTDIGPQDYMTRVTERIDFLKQKVYAWANRIRRYKRRVERYTQNRTFQSDERWVYRGWERPDQDVTDTRLPDDDVMCSFWRSIWSVPVSHTEGDWARKVERACDPIPEMGAITICPQDVARAVRPLPNWKSPGPDGLHNFWLKWFLRSHARLAAQYQTALESGSLPQFLTTGVTHLLHKSGSTAEPKNYRPITCLPTVYKLLTSILRAKINKHIDTNSIMSASQNGCRNGSRGTKELLLIDMTISQQVRRSRKDLSTCWIDYKKAYDSVPHTWLMRVLELYKVDATLRTFLISCMGQWRTVLRYPGCRNIQRNSEPIRIERGIFQSDSLSPLWFCLALNPLSTLLEDSGLGYRMRRGGQVISHLLYMDDLKLFASNNLQLMELLKITESFSSAIRMEFGVDKCAVMHVKRGKIVESVGTQLSDSINLRTLSASETYKYLGMSEALGINVTDMKQSLKERFFGRLKKVFNSLLSGGNKVRAFNGWVMPVLMYSFGILKWTQTELDALDRRVRTLLTAYRMHHPRSSVMRLYIPRKCGGRGFLNAKILHNRVVCSLREYFLEVDVGMHRDVVAVDKGLTPLSLAKENWRKLVVLDTNDRREVWQSKELHGRFFRALHEPDVDFQASVAWLRFGDLFGETEGFVCAIMDEVIMTKNYRRFIVKDGTVDVCRACHRPGESIRHIISGCSRLANEEYLHRHNLVARIIHQQLALKYSLVESEVPYYRYVPDPVLDNGNITLYWDRSIITDRTIVANKPDIVVVDRTERRAMIVDITVPHDGNLVKAEKDKQIKYLDLAREVVDMWDVDSAIIVLIVVSANGLIAKSLDQHLKRLTLDGWIKGLIQKAVLLDTARIVRRFLSLEP

SEQ ID NO: 12690 - protein, 975 aa, Atethmia centrago
MSPELRPRLPRLPMHKKNRALVATLDSQLSNYFDDCEDLTDTHSILYCAAVAVCRVAHVKFAKDSRATRPKPTVPAWQRRIERRIDGARALIGKLICFREGNTRPRVMRFVRRAFSGTDIGPQDYMSRVTERIDFLKQKVYAWANRIRRYKRRVERYTQNRTFQSEERWVYRGWERPDQGVTGTRLPDDDVMCSFWRSIWSVPVSHTEGDWVREVERACDPIPEMGAITISPQDVARAVRPLPNWKSPGPDGLHNFWLKWFLRSHARLAAQYQTALESGSLPQFLTTGVTHLLHKSGSTAEPKNYRPITCLPTVYKVLTSILRAKINEHIDTNSIMSASQNGCRNGSRGTKELLLIDITITQQVRHSRKDLSTCWIDYKKAYDSVPHTWLMRVLELYKVDATLRTFLMSCMGQGRTVLRYPGCRNIQRNSEPIRIERGIFQGDSLSPLWFCLALNPLSTLLEDSGLGYRLRRGSQVISHLLYMDDLKLFASNNLQLMELLKITETFSSAIRMEFGVDKCAVMHVKRGKIMESVGTQLSDSINLRALSASETYKYLGMSEALGINVTDMKQSLKERFFGRLKKVFNSLLSGGNKVRAFNGWVMPVLMYSFGILKWTQTELDALDRRVRTLLTAYRMHHPRSSVMRLYIPRKCGGRGFLNAKTLHNREVCSLREYFLKADVGMHRDVVAVDKGLTPLSLAKENWRKLVVLDTNDRREVWQSKELHGRFFRALHEPDVDFQASVAWLRFGDLFGETEGFVCAIMDEVIMTKNYRRFIVKDGTVDVCRACQRPGESIRHIISGCSRLANEEYLHRHNLVARIIHQQLALKYNLVESEVPYYRYVPDPVLENGNITLYWDRSIITDRTIIANKPDIVVVDRTERRAMIVDITVPHDGNLVKAEKDKQIKYLDLAREVVDMWDVNSAIIVPIVISANGLIAKSLDQHLRRLSLDGWIKGLIQRAVLLDTARIVRRFLSLEP

SEQ ID NO: 12691 - protein, 1075 aa, Atethmia centrago
MLSLFQVLEPAVNVSAQRLSDQVRVIQRNHMLDDTVLDRLRSEMQRSHVIVPPSQTVVHSPQLSTNQADEGSDDRATNVSTQCNVELRSALEDVIREYRLMSPELRPRLPRLPMHKKNRALVAALDSQLSNYFDDCEDLTDTHSILYCAAVAVCRVAHVKFAKDSRTTRPKPTVPAWQCRIESRIGGARALIGKLICFREGNTRPRVMRFVRRAFSETDIGPQDYMTRVTERIDFLKQKVYAWANRIRRYKRRVERYTQNRTFQSDERWVYRGWERPDQDVTDTRLPDDDVMCSFWRSIWSVPVSHTEGDWARKVERACDPIPEMGAITICPQDVARAVRPLPNWKSPGPDGLHNFWLKWFLRSHARLAAQYQTALESGSLPQFLTTGVTHLLHKSGSTAEPKNYRPITCLPTVYKLLTSILRAKINKHIDTNSIMSASQNGCRNGSRGTKELLLIDMTISQQVRRSRKDLSTCWIDYKKAYDSVPHTWLMRVLELYKVDATLRTFLISCMGQWRTVLRYPGCRNIQRNSEPIRIERGIFQGDSLSPLWFCLALNPLSTLLEDSGLGYRMRRGGQVISHLLYMDDLKLFASNNLQLMELLKITESFSSAIRMEFGVDKCAVMHVKRGKIVESVGTQLSDSINLRTLSASETYKYLGMSEALGINVTDMKQSLKERFFGRLKKVFNSLLSGGNKVRAFNGWVMPVLMYSFGILKWTQTELDALDRRVRTLLTVYRMHHPRSSVMRLYIPRKCGGRGFLNAKILHNREVCSLREYFLEADVGMHRDVVAVDKGLTPLSLAKENWRKLVVLDTNDRREVWQSKELHGRFFRALHEPDVDFQASVAWLRFGDLFGETEGFVCAIMDEVIMTKNYRRFIVKDGTVDVCRACHRPGESIRHIISGCSRLANEEYLHRHNLVARIIHQQLALKYSLVESEVPYYRYVPDPVLDNGNITLYWDRSIITDRTIVANKPDIVVVDRTERRAMIVDITVPHDGNLVKAEKDKQIKYLDLAREVVDMWDVDSAIIVPIVVSANGLIAKSLDQHLKRLTLDGWIKGLIQKAVLLDTARIVRRFLSLEP

SEQ ID NO: 12692 - protein, 1101 aa, Atethmia centrago
MRAYFGATEGGSNLTAYRGRMLSLFQVLEPAVNVSAQRLSDQVRVIQRKHMLDDVVLDRLRIESRNSHVSPASPLVAVQMQNLPGGSPRPDHADEEDDDEAISVSSQCNVRLRSALDDAFREYRSTPPGLRPRLPRLPMHKKNKALVCALDSQLSNYFDNSKDLADTHSILYCAAVAACRVAQVKFPNSDRAPRPKPAVPAWQSRIERRIGKTRALIGKLICFREGNTRPRVMRFVKRAFAGTDILSFRDYLTRVTERIDFLKQKICVWANRIRRYRRRMERYTQNRTFQNDERWVYRTWERPDQGVADTRLPDDDAICSFWRNIWSVPVNHTEGDWTKRIERACDLIPEMGALTILPQDVAHAVRPLPNWKSPGPDGLHNFWIKWFQRSHARLASQFQSALESGSLPLFLTTGITHPLHKSGSTAEPKNYRPITCLPTVYKVLTSILRAKINKHIETNLIMSASQNGCKNGSRGTKELLLIDIAISQQVRRSRKDLSTCWIDYKKAYDSVPHTWLMRVLELYKVDATLRTFLMSCMGQWRTVLCYPGCRYIQRNSEPIRIKRGIFQGDSLSPLWFCLALNPLSTLLENSGLGYRLRRGGQVISHLLYMDDLKLFAPNNLQLMELLKVTKTFSSAIRMEFGVDKCAVMHVKRGGIVESVGTQLSDSIHLRSLSSTETYKYLGMSEALGINAADMKQSLRERFFGRLNKVLNSLLSGGNKVRAFNGWVMPVLMYSFGILKWTQKELDALDRRVRTLLTANRMHHPRSSVMRLYIPRKCGGRGFLNAKTLHNRDICSLREYFLETDVVMHRDVVSVDKGLTPLSLADENWRKPIILDTNDRREVWQSKELHGRFYRVLHGPDVDLLASVSWLRFGDLFGETEGFVFAIMDEVIMTNNYRKYIVKDGTVDICRACHRPGESIRHIISGCSRLANGDYLHRHNLVAKIIHQQLALKYSLVESEVPYYRYAPDPVLENGNITLYWDRSIITDRTIVANKPDIVVIDRLTRRTMIIDISVPHDENLVKAEKDKQIKYLDLAHEVVDMWDVDTAIIVPIVVTANGIIPKSLDQHLKRLSLGSWIKGLIQRAVLLDTARIVRRFLSQEP

SEQ ID NO: 12693 - protein, 1198 aa, Mesoligia furuncula
MLTRLAARRARLLPPDSSLSSASPPPVPSPTVSAVMTPAAAVASSSSDEYFSPPTTPPPARRRRGRRPPDGLGLRGPPASDRVPAPGGSVQRMRWTQSINENVMRSYYGATEGGNILTAYRVRMLSLFQVLEPAVNVSAQRLSDQVRVIQRNHMLDETVLDRLRSEMQSSHVIAPQSQTAVILPQPNISHADEGSNDRAINVSTQCNEELRSALEDAIQEYRFMSPELWPRLPRLPMHNKNRALVAALDSQLSKYFDTCEDLIDTHSILYCAAVAACRVAHVKFANDSRATRPKQAVPAWQCRIERRIGGARTLIGKLICFREGNTRPRVMRFVRRAFSGTDISPQDYMSCVTERIDFLKQKVYAWANRIRRYRRRVERYTQNRTFQSDERWVYRGWERPDQGVAETCLPDDDAMCSFWRNIWSVPVSHTEGDWAREVERACDPIPEMGAMSICPQDVARAVRPLPNWKSPGPDGLHNFWIKWFPRSHARLASQFQTALKSGSLPQFLTTGITHLLHKSGSTAEPKNYRPITCLPTVYKVLTSILRTKINKHIDTNSIMSASQNGCRNGSRGTKELLLIDMAISQQVRRFRKDLSTCWIDYKKAYDSVPHTWLMRVLELYKVDTTLRTFLMSCMGQWRTVLRYPGCRNIQRNSEPIRIERGIFQGDSLSPLWFCLALNPLSTLLEDSGLGYRLRRGGQVISHLLYMDDLKLFALNNLQLMELLKITETFSSAIRMEFGVDKCAVMHVKRGEIVESVGTQLSDSTNLRALSASETYKYLGMSEALGIIVTDMKQSVKERFFGRLKKVLNSLLSGGNKVRAFNGWVMPVLMYSFGILKWTQTELDALDRRVRTLLTANRMHHPRSSVMRLYIPRKCGGRGFLNAKTLHNREICSLREYFLETDVGMHRDVVIVDKGLTPLSLAKENWRKPVVLDTNDRMEVWQSKELHGRFLRALRGPDVDLQASVAWLRFGNLFGETEGFVCAIMDEVMMTNNYRRFIVKDGTVDICRACHRLGESIRHIISGCSRLANGEYLHRHNLVARIIHQQLALKYNLVESEVPYYRYVPDPVLENGNITLYWDRSIITDRTIVANKPDIVVVDRSERRAMIVDITVPHDENLVKAEKDKQIKYLDLAREVVDMWDVDTAIIVPIVVTANGLIAKSLDQHLRRLSLGSWIKGLIQRAVLLDTARIVRRCLSLEP

SEQ ID NO: 12694 - protein, 1032 aa, Mesoligia furuncula
MQSSHVIAPQPQTAVLLPQCNTNHADEGSNDRATNVSTQCNEELRSALEDAIREYRFMSPEHRPRLPRLPMHNKNRALVAALDSQLSNYFDDCEDLTDTHSILYCAAVAVCRVAHVKFANDSRATRPKPAIPAWQCRIERRIGGARALIGKLICFREGNTRPRVMRFVRRAFLGTDISPQDYMSCVTERIDFLKQKVYAWANRIRRYKRRVERYTQNRTFQSDERWVYRSWERPDQSVADTCLPDDEAMCSFWRNIWSVPVSHTEGDWAREVERACDPIPEMGAITICPQDVARAVRPLPNWKSPGPDGLHNFWIKWFLRSHARLASQFQTVLESGSLPQFLTTGITHLLHKSGSTTEPKNYRPITCLPTVYKVLTSILRAKIDKHINTNSIMSVSQNGCKNGSRGTKELLLIDMAISQQVRRSRKDLSTCWIDYKKAYDSVPHTWLMRVLELYKIDATLRTFLMSCMGQWRTVLRYPGCRNIQRNSEPIRIERGIFQGDSLSPLWFCLALNPLSTLLEDSGLGYRLRRGGQVISHLLYMDDLKLFAPNNLQLMELLKVTQTFSSAIRMEFGVDKCAVMHVKRGEIVESVGTQLSDSTNLRALSASETYKYLGMSEALGINVTDMKQSLKERFFGRLKKVLNSLLSGGNKVRAFNGWVMPVLMYSFGILKWTQTELDALDRRVRTLLTANRMHHPRSSVMRLYIPRKCGGRGFLNAKTLHNREICSLREYFLETDVGMHRDVVAVDKGLTPLSLAKENWRKPVVLDTNDRMEVWQSKELHGRFFRALHGPDVDLLASVAWLRFGDLFGETEGFVCAIMDEVMMTNNYRRFIVKDGTVDICRACHRPGESIRHIISGCSRLANGEYLHRHNLVARIIHQQLALKYSLVESEVPYYRYVPDPVLENGNISLYWDRSIITDRTIVANKPDIVVVDRSERRAMIVDITVPHDENLVKAEKDKQIKYLDLAREVVDMWDVDSAIIVPIVVTTNGLIAKSLDQHLRRLSLGSWIKGLIQKAVLLDTARIVRRFLSLEP

SEQ ID NO: 12695 - protein, 868 aa, Mesoligia furuncula
MRFVRRAFSGTDISPQDYMSCVTERIDFLKQKVYAWANRIRRYRRRVERHTQNRTFQSDERWVYRGWERPDQGVAETCLPDDDAMCSFWRNIWSVPVSHTEGDWAREVERACDPIPEMGAITICPQDVARAVRPLPNWKSPGPDGLHNFWIKWFPRSHARLASQFQTALKSGSLPQSLTTGITHLLHKSGSTAEPKNYRPITCLPTVYKVLTSILRTKINKHIDTNSIMSASQNGCRNGSRGTKELLLIDMAISQQVRRFRKDLSTCWIDYKKAYDSVPHTWLMRVLELYKVDTTLRTFLMSCMGQWRTVLRYPGCRNIQRNSEPIRIERGIFQGDSLSPLWFCLALNPLSTLLEDSGLGYRLRRGGQVISHLLYMDDLKLFAPNNLQLMELLKITETFSSAIRMEFGVDKCAVMHVKRGEIVESVGTQLSDSTNLRALSASETYKYLGMSEALGINVTDMKQSVKERFFGRLKKVLNSLLSGGNKVRAFNGWVMPVLMYSFGILKWTQIELDALDRRVRTLLTANRMHHPRSSVMRLYIPRKCGGRGFLNAKTLHNREICSLREYFLETDVGMHRDVVIVDKGLTPLSLAKENWRKPVVLDTNDRMEVWQSKELHGRFLRALRGPDVDLQASVAWLRFGNLFGETEGFVCAIMDEVMMTNNYRRFIVKDGTVDICRACHRPGESIRHIISGCSRLANGEYLHRHNLVARIIHQQLALKYNLVESEVPYYRYVPDPVLENGNITLYWDRSIITDRTIVANKPDIVVVDRSERRAMIVDITVPHDENLVKAEKDKQIKYLDLAREVVDMWDVDTAIIVPIVVTANGLIAKSLDQHLRRHSLGSWIKGLIQRAVLLDTARIVRRFLSLEP

SEQ ID NO: 12696 - protein, 1207 aa, Mesoligia furuncula
MLTRSRARQLNKTTHPTSSGSSLSSASPLPEPAPDRGPETPAAAVASSSSDEYFSPPTTPPPPVCRRGRGRPPASLGLRGPPASDRVPAPGGSVQRMRWTQTVNENVMRAYFGATEGGSNLTAYRGRMLSLFQVLEPAINVSAQRLSDQVRVILRNHMLDNVVLDRLRLESRNSHVTSASSSVAVQLQNLPNVSQRPDRVDVEDGDEAISVSPQCNARLRSALEDAFCEYRSVPPGLRPRLPRLPMHKKNKALVCALDSQLSNYFNDSKDLTDTHSILYCAAVAACRVAHVKFPNSDRAPRPKPAVPAWQCRIECRIGEARALIGKLICFREGNTRPRVMRFVRRAFSGTDISSRDYLSRVTERIDFLKQKICAWANRIRRYRRRVERYTQNRTFQSDERWVYRTWERPDHGVTDTRLPDDDAMCSFWRNIWSVPVSHTEGDWTRKIERTCDLLPEMGVLTISPQDVARAVRPLPNWKSPGPDGLHNFWIKWFQGSHARLASQFQSALESGSLPKFLTTGITHLLHKSGSTADPKNYRPITCLPTVYKVLTSILRAKINKHIDTNSIMSVSQNGCGNGSRGTKELLLIDMTISQQVRRFRKDLSTCWIDYKKAYDSVPHTWLMRVLELYKVDTTLRTFLMSCMGQWRTVLRYPGCRNIQRNSEPIRIERGIFQGDSLSPLWFCLALNPLSTLLEDSGLGYRLRRGGQVISHLLYMDDLKLFAPNNLQLMELLKITETFSSAIRMEFGVDKCAVMHVKRGEIVESVGTQLSDSTNLRALSASETYKYLGMSEALGINVTDMKQSLKERFFGRLKKVFNSLLSGGNKVRAFNGWVMPVLMYSFGILKWTQTELDALDRKVRTLLTANRMHHPRSSVMRLYIPRKCGGRGFLNAKNLHNREICSLREYFLETDVGMHRDVVAVDKGLTPLSLGKENWRKPVVLDTNDRMEVWQSKELHGRFFRALHGPDVDLIASVAWLRFGDLFGETEGFVCAIMDEVMMTNNYRRFIVKDGTVDICRACHRPGESIRHIISGCSRLANGEYLHRHNLVARIIHQQLALKYSLVESEVPYYRYVPDPVLENGNITLYWDRSIITDRTIVANKPDIVVVDRSERRAMIVDITVPHDENLVKAEKDKQVKYLDLAREVVDMWDVDSAIIVPIVVTANGLIAKSLDQHLKRLSLGSWIKGLIQKAVLLDTARIVRRFLSLEP

SEQ ID NO: 12697 - protein, 902 aa, Spilarctia lutea
MPAWQYRIERRIAVTRTLIGKLIAFKTGNTRPRVMRFVKQAFLGTTISPQQYMSSVTERIDFLKQKVCAWANRIRRYKKRGDRFNQNRMFQTNEKWVYRKWEAPNPCDRDGHLPDENATNTFWRNIWSVPVTHTDGDWMRDVKRSCESITNMEPVSIDREDVSCAVRSLPNWKAPGPDGLHNFWLKWFRSSHGCLASQFQAALDSGSLPQFLTTGITHLLYKFGSTMDPKNFKPITCLPTLCKLLTSILRLKITTHINHNSILSISQNGCRSGTRGTKELLIIDMTISQQVRRNRKSLATCWIDYKKAYDSVPHTWLLKVLELYKIDTTLCTFLKSCMGQWRTVLRYPGCRQSAMNDVLIKIERGIFQGDSLSPLWFCLALNPLSTLLEGSELGYGLRKDDRVISHLLYMDDLKLFAPTKLQLTALLKITENFSNSIKMEFGVDKCAVMYVKKGLIVESEGVELSNSTKLRSLSATQDYKYLGFSQSLGMPESNMKQELRECFFGRLKKVLNSLLSGGNKVRAYNCWVMPVLMNSFGILRWTQTELDALDRRVRTLLTAFRMHHPRSSVMRLYIPRKCGGRGLLNIKTLHNREIYNLREYFLHTDVGMHRSVVAVDTGLTPLALAKENWRKPVVLSTTDRREVWKGKELHGRFYRALNGPDIDFKTSTSWLRYGDLFGETEGFVCAIMDEVIMTNNYRKYILKDGTVDICRACHRPGESIRHIISGCSRLANGEYLHRHNQVARIVHQQLALKYHLVNSEVPYYRYVPDPVLENGRATLYWDRSIITDRTIVANKPDIVVIDRLERRAIIIDIAVPHDENLVKVEKEKQIKYLDLSHEIVDMWNVDSVIIVPIVVSAHGLIAKSLDQHIKRLTLEGWLKGLIQKAVLLDTARIVRRFLSLEP

SEQ ID NO: 12698 - protein, 1199 aa, Spilarctia lutea
MLTRARRRAQLSPPDSSLRSALPSPEEAIEVPAGAEASSSSSSDEFFSPPTSPIPVRRQGRGRPPTSLGSRGPLTSNRAPAAGGDVRRMKWTHSINENVMRAYFRATELGTNLTAYRVRLVSLFQELEPAVNVSAQRLSDQVRAIQRCHLLDDAALERIRSDIRNSLTVPSSSHVLNVVTNSTPQVPQNDDISELVDSEIISVSTQYNDRIRSTLEDAIREYRYVNLNNRPRLSRLPIHKRNLALVSALDSILPKYFSNSEDLSDTHSILYCAAIAVYRVAGVKFAEYTTTTRQENTLPAWQYRIERRIAEARTLIGKLMSFRSGNTRPRVMRFVKRAFLGTTISPQEYMSCVTERIDFLKQKVYAWANRIRRYRKRVDRYNQNRMFQRNEKWVYRKWENLSPCMSDGQVPDENATNSFWRNMWSVPVTHTEGDWYRDVERSCESLLPMEPISIDEEDVSCAVRSLPNWKAPGPDGLHNFWLKWFRSSHACLASQFQTALDSGSLPQFLTTGITHLLYKSGDAMDPKNFRPITCLPTLYKLLTSILRLKITTHINHNSILSISQNGCRSGTRGTKELLIIDMTISQQVRRNRKSLATCWIDYKKAFDSVPHTWLLKVLELYKIDTTLCTFLKVCMGQWRTALRYPGCRQSAMNDVLIKIERGIFQGDSLSPLWFCLALNPLSTLLEGSGLGYRLQKDDRVISHLFYMDDLKLLAPTKLQLTALLKVTENFSNSIKMEFGVDKCAVMYVKKGEIVESEGIELSDSTKLRSLSATETYKYLGFSQSLGMPESDMKQTLRERFFSRLKKVLKSLLSGGNKVRACNGWVMPVLMYSFGVLRWTQTELDAIDRRVRTLLTAFRMHHPRSSVMRLYIPRRLGGRGLLNIKTLHNREVYNLREYFLQTDVGVHRSVVTVDTGLTPLALAKENWRKPVVLSTNDRREVWKGKELHGRFYRALHGPDIDFKTSTSWLRYGDLFGETEGFVCAIMDEVIMTNNYRKYILKDGTVDICRACHRPGESIRHIISGCSRLANGEYLHRHNQVARIVHQQLALKYHLVNSEVPYYRYVPDPVLENGRATLYWDRSIITDRTIVANKPDIVVIDRLERRAIIIDIAVPHDENLVKVEKEKQIKYLDLSHEIVDMWNVDSVIIVPIVVSAHGLIAKSLDQHLKRLMLEGWIKGLIQKAVLLDTARIVRRFLSLEP

SEQ ID NO: 12699 - protein, 1199 aa, Spilarctia lutea
MLTRARRRAQLSPPDSSLRSALPSPEEAIEVPAGAEASSSSSSDEFFSPPTSPIPVRRQGRGRPPTSLGSRGPLTSNRAPAAGGDVRRMKWTHSINENVMRAYFRATELGTNLTAYRVRLVSLFRELEPAVNVSAQRLSDQVRAIQRCHLLDDAALERIRSDIRNSLTVPSSSHVLNVVTNSTPQVPQNDDISELVDSEIISVSTQYNDRIRSTLEDAIREYRYVNLNNRPRLSRLPIHKRNLALVSALDSLLPKYFSNSEDLSDTHSILYCAAIAVCRVAGVKFAEYTTTTRQENTLPAWQYRIERRIAEARTLIGKLMSFRSGNTRPRVMRFVKRAFLGTTISPQEYMSCVTERIDFLKQKVYAWANRIRRYRKRVDRYNQNRMFQRNEKWVYRKWENLSPCMSDGQVPDENATNSFWRNMWSVPVTHTEGDWYRDVERSCESLLPMEPISIDEEDVSCAVRSLPNWKAPGPDGLHNFWLEWFRSSHACLASQFQTALDSGSLPQFLTTGITHLLYKSGDAMDPKNFRPITCLPTLYKLLTSILRLKITTHINHNSILSISQNGCRSGTRGTKELLIIDMTISQQVRRNRKSLATCWIDYKKAFDSVPHTWLLKVLELYKIDTTLCTFLKVCMGQWRTALRYPGCRQSAMNDVLIKIERGIFQGDSLSPLWFCLALNPLSTLLEGSGLGYRLQKDDRVISHLFYMDDLKLLAPTKLQLTALLKVTENFSNSIKMEFGVDKCAVMYVKKGEIMESEGIELSDSTKLRSLSATETYKYLGFSQSLGMPESDMKQTLRERFFSRLKKVLKSLLSGGNKVRACNGWVMPVLMYSFGVLRWTQTELDAIDRRVRTLLTAFRMHHPRSSVMRLYIPRRLGGRGLLNIKTLHNREVYNLREYFLQTDVGVHRSVVTVDTGLTPLALAKENWRKPVVLSTNDRREVWKGKELHGRFYRALHGPDIDFKTSTSWLRYGDLFGETEGFVCAIMDEVIMTNNYRKYILKDGTVDICRACHRPGESIRHIISGCSRLANGEYLHRHNQVARIVHQQLALKYHLVNSEVPYYRYVPDPVLENGRATLYWDRSIITDRTIVANKPDIVVIDRLERRAIIIDIAVPHDENLVKVEKEKQIKYLDLSHEIVDMWNVDSVIIVPIVVSAHGLIAKSLDQHLKRLTLEGWIKGLIQKAVLLDTARIVRRFLSLEP

SEQ ID NO: 12700 - protein, 880 aa, Spilarctia lutea
MSFRSGNTRPRVMRFVKQAFLGTTISPQEYMSCVTERIDFLKQKVYAWANRIRRYRKRVDRYNQNRMFQKNERWVYRKWENLSPCMSDGQVPDENATNSFWHSIWSVPVTHTEGDWYRDVERSCESLLPMEPISIDEEDVSCAVRSLPNWKAPGPDGLHNFWLKWFRSSHACLASQFQTALDSGSLPQFLTTGITHLLYKSGDAMDSKNFRPITCLPTLYKLLTSILRLKITTHINHNSILSISQNGCRSGTRGTKELLIIDMTISQQVRRNRKSLATCWIDYKKAFDSVPHTWLLKVLELYKIDTTLCTFLKVCMGQWRTALRDPGCRQSAMNDVLIKIERGIFQGDSLSPLWFCLALNPLSTLLEGSGLGYRLQKDDRVISHLLYMDDLKLLAPTKLQLTALLKVTDNFSNSIKMEFGVDKCAVMYVKKGEIVESEGIELSDSTKLRSLSATEAYKYLDFSQSLGIPESDVKQTLRERFFSRLKKVLKSLLSGGNKVRACNGWVMPVLMYSFGVLRWTQTELNAIDRRVRTLLTAFRMHHPRSSVMRLYIPRRLGGRGLLNIKTLHNREVYNLREYFLQTDVGVHRSVVTVDTGLTPLALAKENWRKPVVLSTNDRREVWKGKVLHGRFYRALNGPDIDFKASTSWLRYSDLFGETEGFICAIMDEVIMTNNYRKYILKDGTVDICRACHRPGESIRHIISGCSRLANDEYLHRHNQVARIVHQQLALKYNLVISEVPYYRYVPDPVLENGRATLYWDRSIITDRTIVANKPDIVVIDRLERRAMIVDIAVPHDENLMKVEKEKQIKYLDLSHEIVDMWNVDSVIIVPIVVSAHGLIAKSLDQHLKRLTLGGWIKGLIQKAVLLDTARIVRRFLSLEP

SEQ ID NO: 12701 - protein, 1199 aa, Spilarctia lutea
MLTRARRRAQLSPPDSSLRSALPSPEEAIEVPAGAEASSSSSSDEFFSPPTSPIPVRRQGRGRPPTSLGSRGPLTSNRAPAAGGDVRRMKWTHSINENVMRAYFRATELGTNLTAYRVRLVSLFQELEPAVNVSAQRLSDQVRAIQRCHLLDDAALERIRSDIRNSLTVPSSSHVLNVVTNSTPQVPQNDDISELVDSEIISVSTQYNDRIRSTLEDAIREYRYVNLNNRPRLSRLPIHKRNLALVSALDSLLPKYFSNSEDLSDTHSILYCAAIAVCRVAGVKFAEYTTTTRQENTLPAWQYRIERRIAEARTLIGKLMSFRSGNTRPRVMRFVKRAFLGTTISPQEYMSCVTERIDFLKQKVYAWANRIRRYRKRVDRYNQNRMFQRNEKWVYRKWENLSPCMSDGQVPDENATNSFWRNMWSVPVTHTEGDWYRDVERSCESLLPMEPISIDEEDVSCAVRSLPNWKAPGPDGLHNFWLKWFRSSHACLASQFQTALDSGSLPQFLTTGITHLLYKSGDAMDPKNFRPITCLPTLYKLLTSILRLKITTHINHNSILSISQNGCRSGTRGTKELLIIDMTISQQVRRNRKSLATCWIDYKKAFDSVPHTWLLKVLELYKIDTTLCTFLKVCMGQWRTALRYPGCRQSAMNDVLIKIERGIFQGDSLSPLWFCLALNPLSTLLEGSGLGYRLQKDDRVISHLFYMDDLKLLAPTRLQLTALLKVTENFSNSIKMEFGVDKCAVMYVKKGEIVESEGIELSDSTKLRSLSATETYKYLGFSQSLGMPESDMKQTLRERFFSRLKKVLKSLLSGGNKVRACNGWVMPVLMYSFGVLRWTQTELDAIDRRVRTLLTAFRMHHPRSSVMRLYIPRRLGGRGLLNIKTLHNREVYNLREYFLQTDVGVHRSVVTVDTGLTPLALAKENWRKPVVLSTNDRREVWKGKELHGRFYRALHGPDIDFKTSTSWLRYGDLFGETEGFVCAIMDEVIMTNNYRRYILKDGTVDICRACHRPGESIRHIISGCSRLANGEYLHRHNQVARIVHQQLALKYHLVNSEVPYYRYVPDPVLENGRATLYWDRSIITDRTIVANKPDIVVIDRLERRAIIIDIAVPHDENLVKVEKEKQIKYLDLSHEIVDMWNVDSVIIVPIVVSAHGLIAKSLDQHLKRLTLEGWIKGLIQKAVLLDTARIVRRFLSLEP

SEQ ID NO: 12702 - protein, 1111 aa, Spilarctia lutea
MKWTHSINENVMRAYFRATELGTNLTAYRVRLVSLFQELEPAVNVSAQRLSDQVRAIQRCHLLDDAALERIRSDIRNSLTVPSSSHVLNVVTNSTPQVPQNDDISELVDSEIISVSTQYNDRIRSTLEDAIREYRYVNLNNRPRLSRLPIHKRNLALVSALDSLLPKYFSNSEDLSDTHSILYCAAIAVCRVAGVKFAEYTTTTRQENTLPAWQYRIERRIAEARTLIGKLMSFRSGNTRPRVMRFVKRAFLGTTISPQEYMSCVTERIDFLKQKVYAWANRIRRYRKRVDRYNQNRMFQRNEKWVYRKWENLSPCMSDGQVPDENATNSFWRNMWSVPVTHTEGDWYRDVERSCESLLPMEPISIDEEDVSCAVRSLPNWKAPGPDGLHNFWLKWFRSSHACLASQFQTALDSGSLPQFLTTGITHLLYKSGDAMDPKNFRPITCLPTLYKLLTAILRLKITTHINHNSILSISQNGCRSGTRGTKELLIIDMTISQQVRRNRKSLATCWIDYKKAFDSVPHTWLLRVLELYKIDTTLCTFLKVCMGQWRTALRYPGCRQSAMNDVLIKIERGIFQGDSLSPLWFCLALNPLSTLLEGSGLGYRLQKDDRVISHLFYMDDLKLLAPTKLQLTALLKVTENFSNSIKMEFGVDKCAVMYVKKGEIVESEGIELSDSTKLRSLSATETYKYLGFSQSLGMPESDMKQTLRERFFSRLKKVLKSLLSGGNKVRACNGWVMPVLMYSFGVLRWTQTELDAIDRRVRTLLTAFRMHHPRSSVMRLYIPRRLGGRGLLNIKTLHNREVYNLREYFLQTDVGVHRSVVTVDTGLTPLALAKENWRKPVVLSTNDRREVWKGKELHGRFYRALHGPDIDFKTSTSWLRYGDLFGETEGFVCAIMDEVIMTNNYRKYILKDGTVDICRACHRPGESIRHIISGCSRLANGEYLHRHNQVARIVHQQLALKYHLVNSEVPYYRYVPDPVLENGRATLYWDRSIITDRTIVANKPDIVVIDRLERRAIIIDIAVPHDENLVKVEKEKQIKYLDLSHEIVDMWNLDSVIIVPIVVSAHGLIAKSLDQHLKRLTLEGWIKGLIQKAVLLGTARIVRRFLSLEP

SEQ ID NO: 12703 - protein, 1000 aa, Xestia c-nigrum
MITNVGTQYSEDMRSALEGAIREYRFMTPELRPRLPRLPMHNKNRMLVAVLDSQLSNYFDNCEDLTDVHSILYCAAVAACRVARVKFSDDRATRPKPAVPAWQYRIEQRIGGARALIGKLICFREGNTRPRVMRFVRRAFLGTDINPRDYMSRVTERIDFLKQKVYAWASRIRRYKRRVDRYTQNRTFQRDERWVYRAWERPDQGVADTRLPDDDAMCSFWRSIWSVPVGHAEGEWTRVIERACDPVPEMGAITISPQDVACAVRPLPNWKSPGPDGLHNFWIKWFTRSHARLATLFQSALESGSLPEFLTTGITHLLHKSGSTAEPKNYRPITCLPTVYKVLTSILRTKICKHVDDNSVMSASQNGCRNGSRGTKELLLIDMAISQQVRRSRKDLSTCWIDYKKAYDSVPHTWLMRVLELYKVDATLRTFLMSCMGQWRTVLRYPGCRQIQRNSEPIRIERGIFQGDSLSPLWFCLALNPLSTLLEDSGLGYQLRKDGRVISHLLYLDDLKLFAPNDLQLMELLKVTETFSSAIRMEFGVDKCAVMHVKRGEIVESVGTQLSDSINLRSLSATETYKYLGMSEALGINVADMKQSLKERFFGRLKKVFNSLLSGGNKVRAFNGWVMPVLMYSFGILKWTQTELDALDTKVRKLLTAFQMHHPRSSVMRLYIPRKCGGRGFLNAKTLHNREICSLRDYFLEADVGMHRDVVAMDKGLTPLSLAKENWRKPIILTTDDRRKEWQGKELHGRFYRALHGPDVDFLASVSWLRSGDLFGETEGFVCAIMDEVMMTNNYRRFIVKDGTVDICRACHRPGESIRHIISGCSRLANGEYLHRHNLVARIIHQQLALKYNLVESEVPYYRYVPDPVLVNGSITLYWDQSIITDRTVIANRPDIVVMDRSERRAMIVDITVPHDENLVKAEKDKQIKYLDLAREVVDMWEVDSAIIVPIVVSAHGLIAKSLDQHLRRLSLGSWIKGLIQKAVLLDTARIVRRFLSLEP

SEQ ID NO: 12704 - protein, 1198 aa, Griposia aprilina
MLTRSAARRARPPPPDSSLSSASLPPVSSPTVSAVTTPAAVVASSSSDEYFSPPTTPPPVRRRGGHRPPDGLGPRGPRASDRVPAPGGSVQRMRWTRSINENVMRSYYGATEGGNNLTAYRVRMLSLFQVLEPAVNVSAQRLSDQVRVIQRNHMLDDTVLDRLRSEMQSSHVIAPPSQTVVVLPQSNTSQADEESDGRATNVSTQCNDELRSALEDAIREYRFISPQLRPRLPRLPMHNKNRVLVAALDAQLSNYFDDCVDLTDTHSILYCAAVAACRVAHVKFANDSRATRPKPAVPAWQCRIERRIGGARALIGKLICFREGNTRPRVMRFVRRAFAGTNISPQDYMHCVTERIDFLKQKVYAWANRIRRYKRRMERYTQNRTFQRDERWVYRDWERPDQGVADTCLPDDDAMCSFWRNIWSVPVSHTEGDWAREVERACDPIPEMGAISICPQDVTRAVRPLPNWKSPGPDGLHNFWIKWFGRSHARLAAQYQVALESGSLPQFLTTGVTHLLHKSGSTAEPKNYRPITCLPTVYKVLTSILRAKINNHIDTNSIMSPSQNGCRNGSRGTKELLLIDMAISQQVRRSRKDLSTCWIDYKKAYDSVPHTWLVRVLELYKVDATLRTFLKSCMGQWRTVLHYPGCRNIQRNNEPIRIERGIFQGDSLSPLWFCLALNPLSTLLEDSGLGYRLRRGGQVISHLLYMDDLKLFAPNNLQLMELLKVTETFSSAIRMEFGVDKCAVMHVKRGAIVESVGTQLSDSINLRALSAFETYKYLGMSEALGINGTDMKQLLKERFFGRLKKVFNSLLSGGNKVRAFNGWVMPVLMYSFGILKWTQTELDALDRKVRTLLTANRMHHPRSSVMRLYIPRKCGGRGFLNTKTLHNREICSLREYFLEADVGMHRDVVTVDKGLTPLSLAKENWRKPVVLDTNDRMEVWQSKELHGRFFRALHGPDVDQLASVAWLRFGDLFGETEGFVCAIMDEVILTNKYRRHIMKDGTVDVCRACHRPGESIRHIISGCSRLANEEYLHRHNLVARIIHQQLALKYSLVESEVPYYRYVPDPVLENGHITLYWDRSIITDRTIVANKPDIVVVDRLERRAMIVDITVPHDGNLVKAEKDKQIKYLDLAREVVDMWDVDSAIIVPIVVTANGLIAKSLDQHLRRLSLGSWIKGLIQKAVLLDTARIVRRFLSLEP

SEQ ID NO: 12705 - protein, 1198 aa, Griposia aprilina
MLTRSAARRARPPPPDSSLSSASLPPVSSPTVSAVTTPAAVVASSSSDEYFSPPTTPPPVRRRGGHRPPDGLGPRGPPASDRVPAPGGSVQRMRWTRSINENVMRSYYGATEGGNNLTAYRVRMLSLFQVLEPAVNVSAQRLSDQVRVIQRNHMLDDTVLDRLRNEMQSSHVIAPPSQTVVVLPQSNTSQADKESDDRATNVSTQCNDELRSALEDAIREYRFTSPELRPRLPRLPMHNKNRVLVAALDAQLSNYFDDCVDLTDTHSILYCAAVAACRVARVKFANDSRATRPKPAVPAWQCRIERRIGGARALIGKLICFREGNTRPRVMRFVRRAFAGTNISPQDYMSCVTERIDFLKQKVYAWANRIRRYKRRVERYTQNRTFQRDERWVYRGWERPDQGVADTCLPDDDAMCSFWRNIWSVPVSHTEGDWIREVERACDPIPEMGAITICPQDVTRAVRPLPNWKSPGPDGLHNFWIKWFGRSHARLAAQYQVALESGSLPQFLTTGVTHLLHKSGSTAEPKNYRPIACLPTVYKVLTSILRDKINKHIDTNYIMSPSQNGCRNGSRGTKELLLIDMAISQQVRRSRKDLSTCWIDYKKAYDSVPHTWLMRVLELYKVEATLRTFLMSCMGQWRTVLRYPACRNTQRNSEPIRIERGIFQGDSLSPLWFCLALNPLSTLLEDSGLGYRLRRGGQVISHLLYMDDLKLFAPNNSQLMDLLKVTETFSSAIRMEFGVDKCAVMHVKRGEIVESVGTQLSDSINLRALSASETYKYLGMSEALGINGTDMKQSLKDRFFGRLKKVFNSLLSGGNKVRAFNGWVMPVLMYSFGILKWTQTELDALDRKVRTLLTANRMHHPRSSVMRLYIPRKCGGRGFLNAKTLHNREICSLREYFLEADVGMHRDVVTVDKGLTPLSLGKENWRKPVVLDTNDRMEVWQSKELHGRFFRALHGPDVDQLASVAWLRFGDLFGETEGFVCAIMDEVMMTNNYRRFIVKDGTVDICRACHRPGESIRHIISGCSRLANEEYLHRHNLVARIIHQQLALKYSLVESEVPYYRYVPDPVLENGHITLYWDRSIITDRTIVANKPDIVMVDRLERRAMIVDITVPHDGNLVKAEKDKQIKYLDLAREVVDMWDVDSAIIVPIVVTANGLIAKSLDQHLRRLSLGSWIKGLIQKAVLLDTARIVRRFLSLEP

SEQ ID NO: 12706 - protein, 962 aa, Griposia aprilina
MHNKNRALVAALDTQLSNYFDDCVDLTDTHSILYCAAVAACRVAHVKFANDSRATRPKPVVPAWQCRIERRIGGARALIGKLICFREGNTRPRVMRFVRRAFAGTDISPQDYMSCVTERIDFLKQKVYAWANRIRRYKRRVERYTQNRTFQRDERWVYRGWERPDQGVADTYLPDDDAMCSFWRNIWSVPVSHSEGDWTREVERACEPLPEMGAITICPQDVTRAVRPLPNWKSPGPDGLHNFWIKWFLRSHARLAAQFQVALESGLLPQFLTTGVTHLLHKSGSTAEPKNYRPITCLPTVYKVLTSILRAKINNHIDTNSIMSPSQNGCRNGSRGTKELLLIDMTISQQVRRSRKDLSTCWIDYKKAYDSVPHTWLMRVLELYKVDSTLRTFLKSCMGQWRTVLHYPGCRNVQRNSEPIRIERGIFQGDSLSPLWFCLALNPLSTLLENSGLGYRLRRGGQVIYHLLYMDDLKLFAPNNLQLMELLKVTETFSSAIRMEFGVDKCAVMHVKRGEIVESVGTQLSDSINLRALSASETYKYLGISEALGINGTDMKQSLKERFFGRLKKVFNSLLSGGNKVRAFNGWVMPVLMYSFGILKWTQTELDALDKKVRSLLTANRMHHPRSSVMRLYIPRKCGGRGFLNAKTLHNREICSLREYFLEADVGMHRDVVTVDKGLTPLSLAKENWRKPVVLDTNDRMEVWQSKELHGRFFRALHGPDVDQLASVAWLRFGDLFGETEGFVCAIMDEVMMTKNYRRFIVKDGTVDICRACHRPGESIRHIISGCSRLANEEYLHRHNLVARIIHQQLALKYSLVESEVPYYRYVPDPVLENGHITLYWDRSIITDRTIVANKPDIVVVDRIERRAVIVDITIPHDGNLVKAEKDKQIKYLDLAREVVDMWDVDSAIIVPIVVTANGLIAKSLDQHLRRLSLGSWIKGLIQKAVLLDTARIVRRFLSLEP

SEQ ID NO: 12707 - protein, 1198 aa, Griposia aprilina
MLTRSATRRARPPPPDSSLSSASLPPVSSPTVSAVTTPAAVVASSSSDEYFSPPTTPPPVRRRGGHRPPDGLGPRGPPASDRVPAPGGSVQRMRWTRSINENLMRSYYGATEGGNNLTAYRVRMLSLFQVLEPAVNVSAQRLSDQVRVIQRNHMLDDTVLDRLRNEMQSSHVIAPPSQTVVVLPQSNTSQADEESDDRATNVSTQCNDELRSALEDAIREYRFISPELRPRLPRLPMHNKNRVLVAALDAQLSNYFDDCVDRTDTHSILYCAAVAACRVAHVKFANDSRATRPKPAVPAWQCRIERRIGGATTLIGKLICFREGNTRPRVMRFVRRAFTGTNISPQDYMSCVTERIDFLKQKVYAWANRIRRYKRRVERYTQNRTFQRDERWVYRDWERPDQGVADTCLPDDDAMCSFWRNIWSVPVSHTEGDWAREVERACDPIPEMGAISICPQDVTRAVRPLPNWKSPGPDGLHNFWIKWFGRSHARLAAQYQVALESGSLPQFLTTGVTHLLHKSGSTAEPKNYRPITCLPTVYKVLTSILRAKINKHIDTNSIMSPSQNGCRNGSRGTKELLLIDMAISQQVRRSRKDLSTCWIDYKKAYDSVPHTWLVRVLELYKVDATLRTFLKSCMGQWRTVLHYPGCPNIQRNNEPIRIERGIFQGDSLSPLWFCLALNPLSTLLEDSGLGYRLRRGGQVISHLLYMDDLKLFAPNNLQLMELLKVTETFSSAIRMEFGVDKCAVMHVKRGEIVESVGTQLSDSINLRALSAFETYKYLGMSEALGINGTDMKQLLKERFFGRLKKVFNSLLSGGNRVRAFNGWVMPVLMYSFGILKWTQTELDALDRKVRTLLTANRMHHPRSSVMRLYIPRKCGGRGFLNAKTLHNREICSLREYFLEADVGMHRDVVTVDKGLTPLSLAKENWRKPVVLDTNDRMEVWQSKELHGRFFRALHGPDVDQLASVAWLRFGDLFGETEGFVCAIMDEVILTNNYRRHIMKDGTVDVCRACHRPGESIRHIISGCSRLANEEYLHRHNLVARIIHQQLALKYSLVESEVPYYRYVPDPVLENGHITLYWDRSIITDRTIVANKPDIVMVDRLERRAMIVDITVPHDGNLVKAEKDKQIKYLDLAREVVDMWDVDSAIIVPIVVTANGLIAKSLDQHLRRLSLGSWIKGLIQKAVLLDTARIVRRFLSLEP

SEQ ID NO: 12708 - protein, 1075 aa, Griposia aprilina
MLSLFQVLEPAVNVSAQRLSDQVRIIQRNHMLDDTVLDRLRNEMQSSHVIAPPSQTVIVLPQSNTSQADEGSYDRATNVSTQCNDELRSALEDAIREYQFISPELRPRLPRLLMHNKNRVLVAALDAQLSNYFDDCVDLTDTHSILYCAAVAACRVAHVKFANDSRTTRPKPAVPAWQCRIKRRIGGARALIGKLICFREGNTRPRVMRFVRRAFAGTNISPQDYMSYVTERIDFLKQKVYAWANRIRRYKRRVERYTQNRTFQRDERWVYRGWERLDQGVADTCLPDDDAMCSFWRNIWSVPVSHTEGDWVREVERACDPIPEMEAISICPQDVTRAVRPLPNWKSPGPDGLHNFWIKWFGRSHARLAAQYQVALESGSLPQFLTTGDTHLLHKSGCTAEPENYRPITSLPTVYKVLTSILRAKINKHIDTNSIMSPSQNGCRNGSRGTKELLLIDMAISQQVHHSRKDLSTCWIDYKKAYDSVPHTWLVRVLELYKVDATLRTFLKSCMGQWRTVLHYPRCRIIQRNNEPIRIERGIFQGDSLSPLWFCLALNSLSTLLEDSGLGFRLRRGGRVISHLLYMDDLKLFAPNNLQLMELLKVTETFSSAIRMEFGLDKCAVMHVKRGEIVESVGTQPSDSMNLRALSASETYKYLGMSEALGVNNTDMKQSLKERFFGRLKKVFNSLLSGGNKVRAFNGWVMPVLMYSFGILKWTQTELDTLDRRVRMLLTANQMHHSRSSVMRLYIPRKCGGRGFLNAKTLHNREISSLREYFLEADVGMHRDVVAVDKGLTPLSLAKENWRKPVVLDTNDRMEVWQSKELHGRFFRALYGPDVDVQASVAWLRFGYLFGETEGFVCAIMDEVMMTNNYRRFIVKDGTFDICRACHRPGETIRHTISGCSRLANEEYLHRHNLVARIIHQQLALKYSFVESEVPYYRYVPDPVLENGTITLYWDRSIITHRTINANKPDIVLVDRRERRAMIVDITIPHDGNLMKAEKDKQIKYLDLAREVVDMWDVDSAIIVPIVVTANGLIAKSLDQHLRRLSLSSWIKGLIQKAVLLDTARIVRRFLSLEP

SEQ ID NO: 12709 - protein, 1198 aa, Griposia aprilina
MLTRSAARRARPPPPDSSLSSASLPPVSSPTVSAVTTPAAVVASSSSDEYFSPPTTPPPVRRRGGHRPPDGLGPRGPPASDRVPAPGGSVQRMRWTRSINENVMRSYYGATEGGNNLTAYRVRMLSLFQVLEPAVNVSAQRLSDQVRVIQRNHMLDDTVLDRLRNEMQSSHVIAPPSQTVVVLPQSNTSQADEESDDRATNVSTQCNDELRSALEDAIREYRFISPELRPRLPRLPMHNKNRVLVAALDAQLSNYFDDCVDLTDTHSILYCAAVAACRVAHVKFANDSRATRPKPAVPARQCRIERRIGEARALIGKLICFREGNTRPRVMRFVRRAFAGTNISPQDYMSCVTERIDFLKQKVYAWANRIRRYKRRVERYTQNRTFQRNERWVYRGWERPDQGVADTCLPDDDAMCSFWRNIWSVPVSHTEGDWTREVERACDPIPEMGAITICPQDVTRAVRPLPNWKSPGPDGLHNFWIKWFGRSHARLAAQYQVALESGSLPQFLTTGVTHLLHKSGSTAEPKNYRPIACLPTVYKVLTSILRDKINKHIDTNYIMSPSQNGCRNGSRGTKELLLIDMAISQQVRRSRKDLSTCWIDYKKAYDSVPHTWLMRVLELYKVEATLRTFLMSCMGQWRTVLHYPACRNTQRNSEPIRIERGIFQGDSLSPLWFCLALNPLSTLLEDSGLGYRLRRGGQVISHLLYMDDLKLFAPNNSQLMDLLKVTETFSSAIRMEFGVDKCAVMHVKRGEIVESVGTQLSDSINLRALSASETYKYLGMSEALGINGTDMKQSLKDRFFGRLKKVFNSLLSGGNKVRAFNGWVMPVLMYSFGILKWTQTELDALDRKVRTLLTANRMHHPRSSVMRLYIPRKCGGRGFLNAKTLHNREICSLREYFLEADVGMHRDMVTVDKGLTPLSLAKENWRKPVVLDTNDRMEVWQSKELHGRFFRALHGPDVDQLASVAWLRFGDLFGETEGFVCAIMDEVMMTNNYRRFIVKDGTVDICRACHRPGESIRHIISGCSRLANEEYLHRHNLVARIIHQQLALKYSLVESEVPYYRYVPDPVLENGHITLYWDRSIITDRTIVANKPDIVMVDRLERRAMIVDITVPHDGNLVKAEKDKQIKYLDLAREVVDMWDVDSAIIVPIVVTANGLIAKSLDQHLRRLSLGSWIKGLIQKAVLLDTARIVRRFLSLEP

SEQ ID NO: 12710 - protein, 1107 aa, Griposia aprilina
MSKMIIIIIINVMRSYYGATEGGNNLTAYRVRMLSLFQVLEPAVNVSAQRLSDQVRVIQRNHMLDDTVLDRLRNEMQSSHVIAPPSQTVVVLPQSNTSQADEESDDRATNVSTQCNDELRSALEDAIREYRFISPELRPRLPRLPMHNKNRVLVAALDAQLSNYFDDCVDLTDTHSILYCAAVAACRVAHVKFANDSRATRPKPAVPAWQCRIERRIGEARALIGKLICFREGNTRPRVMRFVRRAFAGTNISPQDYMSCVTERIDFLKQKVYAWANRIRRYKRRVERYTQNRTFQRDERWVYRGWERPDQGVADTCLPDDDAMCSFWRNIWSVPVSHTEGDWTREVERACDPIPEMGAITICPQDVTRAVRPLPNWKSPGPDGLHNFWIKWFGRSHARLAAQYQVALESGSLPQFLTTGVTHLLHKSGSTAEPKNYRPIACLPTVYKVLTSILRDKINKHIDTNYIMSPSQNGCRNGSRGTKELLLIDMAISQQVRRSRKDLSTCWIDYKKAYDSVPHTWLMRVLELYKVEATLRTFLMSCMGQWRTVLHYPACRNTQRNSEPIRIERGIFQGDSLSPLWFCLALNPLSTLLEDSGLGYRLRRGGQVISHLLYMDDLKLFAPNNSQLMDLLKVTETFSSAIRMEFGVDKCAVMHVNRGEIVESVGTQLSDSINLRALSASETYKYLGMSEALGINGTDMKQSLKDRFFGRLKKVFNSLLSGGNKVRAFNGWVMPVLMYSFGILKWIQTELDALDRKVRTLLTANRMHHPRSSVMRLYIPRKCGGRGFLNAKTLHNREICSLREYFLEADVGMHRDVVTVDKGLTPLSLAKENWRKPVVLDTNDRMEVWQSKELHGRFFRALHGPDVDQLASVAWLRFGDLFGETEGFVCAIMDEVMMTNNYRRFIVKDGTVDICRACHRPGESIRHIISGCSRLANEEYLHRHNLVARIIHQQLALKYSLVESEVPYYRYVPDPVLKNGHITLYWDRSIITDRTIVANKPDIVMVDRLERRAMIVDITVPHDGNLVKAEKDKQIKYLDLAREVVDMWDVDSAIIVPIVVTANGLIAKSLDQHLRRLSLGSWIKGLIQKAVLLDTARIVRRFLSLEP

SEQ ID NO: 12711 - protein, 1075 aa, Griposia aprilina
MLSLFQVLEPAVNVSAQRLSDQVRVIQRNHMLDDTVLDRLRNEIQSSHVIAPPSQTVVVLPQSNTSQADEESDDRATNVSTQCNDELRSALEDAIREYRFISPELRPRLPRLPMHNKNRVLVAALDAQLSNYFDDCVDLTDTHSILYCAAVAACRVAHVKFANDSRATRPKPAVPAWQCRIERRIGEARALIGKLICFREGNTRPRVMRFVRRAFAGTNISPQDYMSCVTERIDFLKQKVYAWANRIRRYKRRVERYTQNRTFQRDERWVYRGWERPDQGVADTCLPDDDAMCSFWRNIWSVPVSHTEGDWTREVERACDPIPEMGAITICPQDVTRAVRPLPNWKSPGPDGLHNFWIKWFGRSHARLAAQYQVALGSGSLPQFLTTGVTHLLHKSGSTAEPKNYRPIACLPTVYKVLTSILRDKINKHIDTNYIMSPSQNGCRNGSRGTKELLLIDMAISQQVRRSRKDLSTCWIDYKKAYDSVPHTWLMRVLELYKVEATLRTFLMSCMGQWRTVLHYPACRNTQRNSEPIRIERGIFQGDSLSPLWFCLALNPLSTLLEDSGLGYRLRRGGQVISHLLYMDDLKLFAPNNSQLMDLLKVTETFSSAIRMEFGVDKCAVMHVKRGEIVESVGTQLSDSINLRALSASETYKYLGMSEALGINGTEMKQSLKDRFFGRLKKVFNSLLSGGNKVRAFNGWVMPVLMYSFGILKWTQTELDALDRKVRTLLTANRMHHPRSSVMRLYIPRKCGGRGFLNAKTLHNREICSLREYFLEADVGMHRDVVTVDKGLTPLSLAKENWRKPVVLDTNDRIEVWQSKELHGRFFRALHGPDVDQLASVAWLRFGDLFGETEGFVCAIMDEVMMTNNYRRFIVKDGTVDICRACHRPGESIRHIISGCSRLANEEYLHRHNLVARIIHQQLALKYSLVESEVPYYRYVPDPVLENGHITLYWDRSIITDRTIVANKPDIVMVDRLERRAMIVDITVPHDGNLVKAEKDKQIKYLDLAREVVDMWDVDSAIVVPIVVTANGLIAKSLDQHLRRLSLGSWIKGLIQKAVLLDTARIVRRFLSLEP

SEQ ID NO: 12712 - protein, 1201 aa, Omphaloscelis lunosa
MLTRLAARRARLPPPDSPLSSASSPPVRSPTVNAVMTPAAAVASSSSDEYFSPPTTPPPARRRGRRRPPDGLGPRGPPASDRVPAPGGSVQRMRWTRSINENVMRSYYGATEGGNNLTAYRVRMLSLFQVLEPAVNVSAQRLSDQVRVIQRNHMLDDTVLDRLRSEMQSSHVIAPPLRSVIIPSQMSSVITSQADERIDDRATNVSTQCNEDLRSALEGAIQEYRFMSPELRPRLPRLPMHNKNKALVAVLDSQLSNYFDDCEDLTDTHSILYCAAVAVCRVAHLKFSNDSRATRPKPAAPAWQCRIERRISGARTLIGKLICFREGNTRPRVMRFVRRAFLGTDISPQDYMNRVTERIDFLKQKVYAWANRIRRYKRRVERYTQNRTFQSDERWVYRAWERPDQGVADTHLPDDDAMCSFWRSIWSVPVSHTEGDWTREVERACDPIPEMGAITICPQDVARAVRPLPNWKSPGPDGLHNFWIKWFVRSHARLAAQYQTALESGLLPQFLTTGVTHLLHKSGSTAEPKNYRPITCLPTVYKVLTSILRAKINKHIDTNSIMSVSQNGCRNGSRGTKELLLIDMAISQQVRRSRKDLSTCWIDYKKAYDSVPHTWLMRVLELYKVHTTLRTFLMSCMGQWRTVFRYPGCRNIQRNSEPIRIERGIFQGDSLSPLWFCLALNPLSTLLEDSGLGYRLRRGGQVISHLLYMDDLKLFAPNNLQLMELLKVTETFSSAIRMEFGVDKCAVMHVKRGEIMESVGTQLSDSINLRALSASETYKYLGMSEALGINVTDMKQSLKERFFGRLKKVLNSLLSGGNKVRAFNGWVMPVLMYSFGILKWTQTELDALDRRVRTLLTAYRMHHPRSSVMRLYIPRKCGGRGFLNAKTLHNREICSLREYFLGVDVGMHRDVVVVDKGLTPLSLAKENWRKPVVLDTKDRMEIWQSKELHGRYFRALHGPDVDLPASVTWLRFGDLFGETEGFVCAIMDEVMMTNNYRRFIVKDGTVDICRACHRPGESIRHIISGCSRLANEEYLHRHNLVARIIHQQLALKYNLVESEVPYYRYVPDPVLENGNITLYWDRSIITDRTIAANKPDIVVVDRGERRTMIIDITVPHDENLVKAEKDKQIKYLDLAREVVDMWDVDSAIIVPIVVTANGLIAKSLDQHLRRLSLGSWIKGLIQRAVLLDTARIVRRFLSLEP

SEQ ID NO: 12713 - protein, 1085 aa, Omphaloscelis lunosa
MNNNIIIIIIKRWQLEPAVNVSAQRLSDQVRVIQRNHMLDDTVLDRLRSEMQSSHVIAPPLRSVIIPSQMSSVITSQADERIDDRATNVSTQCNEDLRSALEGAIQEYRFMSPELRPRLPRLPMHNKNKALVAVLDSQLSNYFDDCEDLTDTHSILYCAAVAVCRVAHLKFSNDSRATRPKPAAPAWQYRIERRISGARTLIGKLICFREGNTRPRVMRFVRRAFLGTDISPQDYMTRVTERIDFLKQKVYAWANRIRRYKRRVERYTQNRTFQSDERWVYRAWERPDQGVADTHLPDDDAMCSFWRSIWSVPVSHTEGDWTREVERACDPIPEMGAITICPQDVARAVRPLPNWKSPGPDGLHNFWIKWFVRSHARLAAQYQTALESGSLPQFLTTGVTHLLHKSGSTAEPKNYRPITCLPTVYKVLTSILRAKINKHIDTNSIMSVSQNGCRNGSRGTKELLLIDMAISQQVRRSRKDLSTCWLDYKKAYDSVPHTWLMRVLELYKVHTTLRTFLMSCMGQWRTVLRYPGCRNIQRNSEPIRIERGIFQGDSLSPLWFCLALNPLSTLLEDSGLGYRLRRGGQVISHLLYMDDLKLFAPNNLQLMELLKVTETFSSAIRMEFGVDKCAVMHVKRGEIMESVGTQLSDSINLRALSASETYKYLGMSEALGINVTDMKQSLKERFFGRLKKVLNSLLSGGNKVRAFNGWVMPVLMYSFGILKWTQTELDALDRRVRTLLTAYRMHHPRSSVMRLYIPRKCGGRGFLNAKTLHNREICSLREYFLGVDVGMHRDVVVVDKGLTPLSLAKENWRKPVVLDTKDRMEIWQSKELHGRYFRALHGPDVDLPASVTWLRFGDLFGETEGFVCAIMDEVMMTNNYRRFIVKDGTVDICRACHRPGESIRHIISGCSRLANEEYLHRHNLVARIIHQQLALKYSLVESEVPYYRYVPDPVLENGNITLYWDRSIITDRTIAANKPDIVVVDRGERRTMIIDITVPHDENLVKSEKDKQIKYLDLAREVVDMWDVDSAIIVPIVVTANGLIAKSLDQHLRRLSLGSWIKGLVQRAVLLDTARIVRRFLSLEP

SEQ ID NO: 12714 - protein, 1204 aa, Omphaloscelis lunosa
MLTRSATRRAHPPPPDSSLSSASPPSIPNPTVNVVTTPAAAVASSSSDEYFSPPTSPTPVRRQGRGRPPAGLGPRGQQAPNRVPAAGGNVSRIRWTQSMNENVMRAYYGATEGGINLTAYRSRMLSLFQVLEPTINVSAQRLSDQVRVIQHNHRLDNATLDRLRLEMQNSFASNPPPSQNVVQAPAAVPLQANQHEEEEDGRAIPADNLCNVELRSALEDAIREYRFTSPDLRPRLPRLPMNKRNRALVCALDALLPNFIESSANLCDTHSILYCTAVAACRIARVKFPNTDRSVRPKPVAPAWQCRIECRINEARVLIGKLICFREGNTRPRVMRFVRRAFSGTSISPREYVSHVTERIDFLKQKVYAWANRIRRYRRRVDRYTQNRMFQNDERWVYRTWERPTPNQGVTDTRLPNSDAMKAFWQSIWSVPVNHTEGDWMRVVEQACDPIPHMEAISITPLDVARAVRPLPNWKSPGPDGLHNFWLKWLQRSHTCLATQFQSSLDTGSLPLFFTTGVTHLLHKSDSTAEPKNYRPITCLPTIYKVLTSILRAKISHHINNNLIMSVSQNGCKNGSRGTKELLLIDMTISQQVRKSRKDLSTCWIDYKKAYDSVPHTWLMRVLELYKIDATLRTFLMSCMRQWRTVLLYPGCRQIRGIDEPIRIERGIFQGDSLSPLWFCLALNPLSTLLEDSGLGYRLRRGGQVISHLLYMDDLKLFAPNNLRLMELLKITETFSSAIRMEFGVDKCAVMHVKRGEIMESVGTQLADSIHFRYLSSTETYKYLGMSEALGINVTDMKQSLKERFFGRLNKVLNSLLSGGNKVRAFNGWVMPVLMYSFGILKWTQTELDALDRKVRTLLTTNRMHHPRSSVLRLYIPRKCGGRGFLNAKTLHNREIYSLREYFLQTNVGMHRDVVAVDKGLTPLSLAKENWRKPTVLDTNDRKEIWQGKELHGRFFRALHGPDVDFLTSVSWLRFGDLFGETEGFVCAIMDEVIMTNNYRKYIVKDGTVDICRACHQPGESIRHIVSGCSRLANGEYLHRHNLVARIIHQQLALQYNLIESEVPYYRYVPDPVLENGHTTLYWDRSIITDRTIVANKPDIVVIDRRERRAMIVDIAVPHDENLVKAEKDKKIKYLDLAHEVVDMWDVDSAIIVPIIVTVNGLIAKSLDQHLRRLSLRGWIKGLIQKAVLLDTARIVRRFLSLEP

SEQ ID NO: 12715 - protein, 868 aa, Omphaloscelis lunosa
MRFVKRAFSGTDISFQDYLTRVTERIDFLKQKIYAWANRIRRYRRRVERYTQNRTFQSDERWVYRAWERPDQGVIDTRLPDDDAMCSFWRSIWSAPVSHTEGDWTREIERACDPIPEMGAITICPQDVARAVRPLPNWKSPGPDGLHNFWIKWFQRSHARLASQFQSALESGSLPQFLTTGITHLLHKSGSTAEPKNYRPITCLPTVYKVFTSILRTKINKHIDTNSIMSASQNGCRNGSRGTKELLLIDMAINQQVRRSRRDLSTCWIDYKKAYDSVPHTWLMRVLELYKVNATLRTFLMSCMGQWRTVLRYPGCRQILRNSEPIRIERGIFQGDSLSPLWFCLALNPLSTLLEDSGLGYRLRRGGQVISHLLYMDDLKLFAPNNLQLLELLKVTETFSSAIRMEFGVDKCAVMHVKRGEIVESVGTQLSDSIQLRSLSSIETYKYLGMSEALGVNAADMKQSLKERFFNRLNKVLNSLLSGGNKVRAFNGWVMPVLMYSFGILKWTQTELDALDRRVRTLLTANRMHHPRSSVMRLYIPRKCGGRGFLNAKTLHNREVCSLREYFLEADVGMHRDVVTVDKGLTPLSLANENWRKPIVLDTNDRREVWQSKELHGRFYRALHGPDVDLLASVSWLRFGDLFGETEGFVFAIMDEVMMTTNYRKYIVKDGTVDICRACHRPGESIRHIISGCSRLANGDYLHRHNLVARIIHQQLALKYSLVESEVPYYRYVPDPVLENGNITLYWDRSIITDRTIVANKPDIVVIDRLERRTMIIDIAVPHDENLVKAEKDKQIKYLDLAREVVDMWDVDTAIIVPIVVTANGIIAKSLDQHLKRLSLGSWIKGLIQKAVLLDTARIVRRFLSQEP

SEQ ID NO: 12716 - protein, 914 aa, Sesamia nonagrioides
MSNSQTVTEPHDQNQLASAVERRIGETRALIGKLISFREGNTRPRVMRFVRRAFSGTDVSTRDYLLRVTERIDFLKQKIYAWANRIRRYRRRVERYSQNRNFQSDERWVYRAWERSDQGVTDTCLPDDDATRSFWRNIWSVPVSHTEGGWTRDVERACDPVPEMGAITICPQDVARAVRPLPNWKSPGPDGLHNFWIKWFSGSHACLASQFQTALESGSLPQFLTTGITHLLHKSGSTAEPKNYRPITCLPTVYKVLTSILKAKINTHIDSNSIMSASQNGCRNGSRGTKELLLIDMAISQQVRRSRKDLSTCWIDYKKAYDSVPHTWLMRVLELYKVDATLRTFLMTCMSQWRTVLRYPGCRNIQRNSEPIRIERGIFQGDSLSPLWFCLALNPLSTLLEDSGLGYRLRRGGQVISHLLYMDDLKLFAHTNSQLKELLKITETFSSAIRMEFGVDKCAVMHVQRGEIVESVGTQLTGSINLRSLSASETYKYLGMSEALGINVTDMKQSLKERFFGRLKKVLNSLLSGGNKVRAFNGWVMPVLMYSFGILKWTQTELDALDQRVRTLLTANRLHHPRSSVMRLYIPRKCGGRGFLNAKTLHNREVCSLREYFLKTDVGMHRDVVAVDKGLTPLSLAKENWRKPVVLETNDRMEVWQSKELHGRFFRALRGPDVDFQASVAWLRYGDLFGETEGFVCAIMDEVMMTNNYRKFIVKDGTVDICRACHRPGESIRHIISGCSRLANGEYLHRHNLVARIIHQQLALKYNLVESEVPYYRYMPDPVLENGHITLYWDRSIITDRTIVANKPDIVMVDRSERRAMIVDITIPHDENLVKAEKDKQIKYLDLAHEVVDMWEVDSAIIVPIVVTANGLIAKSLDQHLRRLSLGGWIKGLIQKAVLLDTARIVRKFLSLEP

SEQ ID NO: 12717 - protein, 1044 aa, Sesamia nonagrioides
MLDDTVLDRLRNEMQSSRVIAHQSQTAEIPPQSTNYADEGSNDRATNVSTQCNEELINALETAIREYRSTSAELRPRLPRLPMHNRNRALMAALDAQLSNYFDTCEDLTDTHSILYCAAVAACRVAHVKFPSDSRDTRPKPVVPAWQHRIERRIGGARALIGKLICFREGNTRPRVMRFVRRAFAGTNISPQNYMARVTERIDFLKQKVYAWANRIRRYKRRVERYTQNRTFQSNERWVYRDWERPEQGVTDTCLPDDDLMCSFWRSIWSVPVSHTEGDWARDVERACDPIPEMGAITICPQDVACAVRPLPNWKSPGPDGLHNFWIKWFPRSHARLASQFQTALVSGTLPQFLTTGITHLLHKSGSTAEPKNYRPITCLPTVYKVLTSILKTKINKHIDSNSIMSASQNGCKSGSRGTKELLLIDMAISQQVRRSRKDLSTCWIDYRKAYDSVPHTWLMRVLELYKVDATLRTFLMSCMRTWRTVLRYPGCRNIQRNSEPIRIERGIFQGDSLSPLWFCLALNPLSTLLEDSGLGYRLRRGGQVISHLLYMDDLKLFAPNNSQLRELLKITETFSSSIRMEFGVDKCAVMHVKRGEIMESVGTQLTGSINLRALSASEIYKYLGMSEALGINVTDMKQSLKERFFGRLKKVFNSLLSGGNKVRAFNGWVMPVLMYSFGILKWTQTELDALDQRVRTLLTANRLHHPRSSVMRLYIPRKCAGRGFLNAKTLHNREVCSLREYFLETDVGMHRDVVAADKGLTPLSLAKENWRKPVVLDTNDRLEVWKSKELHGRFFRALHGPDVDFQASVAWLRFGDLFGETEGFVFAIMDEVMMTNNYRRFIVKDGTVDICRACHRPGESIRHIISGCSRLSNGEYLHRHNLVARIIHQQLALKYKLVESEVSYYRYMPDSVLENGHITLYWDRSIITDRTIVANKPDIVLVDRSERRAMIVDITIPHDENLVKAEKDKQIKYLDLAHEVVDMWEVDSAIIVPIVVTANGLIAKSLDQHLRRLSLVSWIKGLIQKAVLLDTARIVRKFLSLEP

SEQ ID NO: 12718 - protein, 1197 aa, Sesamia nonagrioides
MLTRSAARRARPPSPDSLLSSASPPPASSATVSAVTTPAAAVASSSSDEYFSPPTTPPPVRRRGGRRPPDCLGPRGPSASDRVPAPGGSVQRMRWTQSINENVMRSYYGATEGGTNLTAYRVRMLSLFQVLEPVVNVSAQRLSDQVRVIQRNHMLDDTVLDRLRNEMQSSRVIAHQSQSAEIPPQPTNYADEGSNDRATNVSTQCNEELRNALEAAIREYRSISAELRPRLPRLPMHNRNRALMAALDAQLSNYFDTCEDLTDTHSILYCADVAACRVAHVKFPSDSRATRPKPVVPAWQHRIERRIGGARALIGKLICFREGNTRPRVMRFVRRAFSGTNTSPQNYMARVTERIDFLKQKVYAWANRIRRYKRRVERYTQNRTFQSNERRVYRDWERPEQGVTDTCLPDADAICSFWRSIWSVPVSHTEGYWARDVKRTCDPIPEMGAITICPQDVAHAVRPLPNWKSPGPDGLHNFWIKWFPRSHARLASQFQTALLSGSLPQFLTTGITHLLYKSVSTAEPKNYRPITCLPTVYKVLTSILKTKINKHIDSNSILSASQNGCKSGSRGTKEQLLIDMAISQQVRRSRKDLSTCWIDYKKAYDSVPHTWLMRVLELYKVDATLRTFLMTCMRTWRTVLRYPGCRNIQRNSEPIRIERGIFQGDSLSPLWFCLALNPLSTLLEDSGLGYRLRRGGQVISHLLYMDDLKLFAHTNSQLKELLKITETFSSAIRMEFGVDKCAVMHVQRGEIVESVGTQLTGSINLRSLSASETYKYLGMSEALGINVTDMKQSLKERFFGRLKKVLNSLLSGGNKVRAFNGWVMPVLMYSFGILKWTQTELDALDQRVRTLLTANRLHHPRSSVMRLYIPRKCGGRGFLNAKTLHNREVCSLREYFLKTDVGMHRDVVAVDKGLTPLSLAKENWRKPVVLETNDRMEVWQSKELHGRFFRALRGPDVDFQASVAWLRYGDLFGETEGFVCAIMDEVMMTNNYRKFIVKDGTVDICRACHRPGESIRHIISGCSRLANGEYLHRHNLVARIIHQQLALKYNLVESEVPYYRYMPDPVLENCHITLYWDRSIITDRTIVANKPDIVLVDRSERRAMIVDITIPHDENLVKAEKDKQIKYLDLAHEVVDMWEVDSAIIVPIVVTANGLIAKSLDQHLRRLSLGSWIKGLIQRAVLLDTARIVRKFLSLEP

SEQ ID NO: 12719 - protein, 868 aa, Sesamia nonagrioides
MRFVRRAFSGTDTSTRDYLFRVTERIDFFKQKIYAWANRIRRYRRRVERCSQNRNFQSDERRVYRAWERSDQGVTDTCLPDDDATCSFWRNIWSVPVSHTEGSWTRVVERACDPVPEMGAFTICPQDVARAVRPLPNWKSPGPDGLHNFWIKWFSGSHARLASQFQTALESGSLPQFLTTGVTHLLHKSGSTAEPRNYRPITCLPTVYKVLTSILKSKINTHIDSNSIMSASQNGCRSGSRGTKELLLIDMAISQQVRRSRKDLSTCWLDYKKAYDSVPHTWLMRVLELYKADATLRTFLMTCMRTWRTVLRYPGCRNIQRNSEPIRIERGIFQGDSLSPLWFCLALNPLSTLLEDSGLGYRLRRGGQVISHLLYMDDLKLFAHTDSQLKELLKITETFSSSIRMEFGVDKCAVMHVKRGEIMESVGTQLTSSINLRAVSASETYKYLGMSEALGINVTDMKQSLKERFFGRLKKVLNSLLSGGNKVRAFNGWVMPVLMYSFGILKWTQTEIDALDRRVRTLLTANRLHHPRSSVMRLYIPRKCGGRGFLNAKTLHNREICSLREYFLTTDVGMHRDVVAVDKGLTSLSLAKENWRKPVVLDSNDRMEVWKSKELHGRFFKALHGPDVDLQASVAWLRFGDLFGETEGFVCTITDEVMMTNNYRRFIVKDGTVDICRACHRPGESIRHIISGCSRLANGEYLHRHNLAARIIHQQLALKYNLVESEVPYYRYTPDPVLENYHITLYWDRSIITDRTIIANKPDIVLVDRSERRAMIVDITIPHDENLVKAEKDKQIKYLDLAHEVVDMWEVDSAIIVPIVVTANGFIAKSLDQHLRRLSLGSWIKGLIQKAVLLDTARIVRKFLSLES

SEQ ID NO: 12720 - protein, 1137 aa, Sesamia nonagrioides
MLTRSAARRARPPSPDSLLGSASPPPVSSATASAVTTPAAAVASSSSDEYFSPPTTPPPARRRGGRRPPDRLGPRGPSASDRVPAPGGSVQRMRWTQSINENVMRSYYGATEGGNNLTAYRVRMLSLFQVLEPAVNVSAQRLSDQVRVIQRNHMLDDTVLDRLRNEMQSNRIIAHQSQTAEIPPQPTNYADEGSNDRATNVSTQCNEELINALEAAIREYRFTPAELRPRLPRLPMHNRNRALMAALDAQLSDYFDTCEDLTDTHSILYCAAVAACRVAHVKFPSDSRATRPKPVVPAWQHRIERRISGARALIGKLICFREGNTRPRVMRFVRRAFSGTNTSPQNYMARVTERIDFLKQKVYAWANRIRRYKRRVERYTQNRTFQSNERWVYRAWERSDQGVTDTCLPDDDATCSFWCNIWSVPVSHTEGSWTRVVERACDPVPEMGAITICPQDVARAVRPLPNWKSPGPDGLHNFWIKWFSRSHARLASQFQTALESGSLPQFLTTGVTHLLHKSGSTAEPKNYRPITCLSTVYKVLTSILKSKINTHIDSNSIMSASQNGCRSGSRGTKELLLIDMAISQQVRRSRKDLSTCWIDYKKAYDSVPHTWLMRVLELYKVDATLRTFLMTCMRTWRTVLRYPGCRNIQRNSEPIRIERGIFQGDSLSPLWFCLALNPLSTLLEDSGLGYRLRRGGQVISHLLYMDDLKLFAHTDSQLKELLKITETFSSSIRMEFGVDKCAVMHVKRGEIMESVGTQLTSSINLRALSASETYKYLGMSEALGINVTDMKQSLKERFFGRLKKVLNSLLSGGNKVRAFNGWVMPVLMHSFGILKWTQTELDALDQRVRTLLTANRLHHPRSSVMRLYIPRKCGGRGFLNAKTLHNREVCSLREYFLETDVGMHRDVVAADKGLTPLSLAKENWRKPVVLDTNDRLEVWKSKELHGRFFRALHGPDVDFQASVAWLRFGDLFGETEGFVFAIMDEVMMTNNYRRFIVKDGTVDICRACHRPGESIRHIISGCSRLANGEYLHRHNLVARIIHQQLALKYKLVESEVPYYRYMPDPVLENGHITLYWDRSIITDRTILANKPDIVLVDRTERRAMIVDITIPHDENLVKAEKDKQIKYLDLAHEVVDM

SEQ ID NO: 12721 - protein, 1200 aa, Sesamia nonagrioides
MLTRSAARHARPPSPDSLLGSASSPPVSSATASAVTTPAAAVASSSSDEYFSPPTTPPPARRRGGRRPPDRLGPRGPSASDRVPAPGGSVQRMRWTQSINENVMRSYYGATEGGNNLTAYRVRMLSLFQVLEPAVNVSAQRLSDQVRVIQRNHMLDDVVLDRLRLESRNSHVTPASSLVAVQLNSVSPRPNHVDEEDDDRAISVSPQCIEKLRSALEDAFCEYRSTPPELRPRLPRLPMHKKNKALVCALDSQLSYYLKDSKDLTDTHSILYCGAVAICRVAHVKFPDSDRATRPKSAVPAWQCRIERRIGETRALIGKLTSFREGNTRPRVMRFVRRAFSGTDTSTRDYLFRVTERIDFFKQKIYAWANRIRRYKRRVERYSQNRNFQSDERRVYRAWERSDQGVTDTCLPDDDATCSFWRNIWSVPVSHTEGSWTRVVERACDPVPEMGAITICPQDVARAVRPLPNWKSPGPDGLHNFWIKWFSRSHARLASQFQTALESGSLPQFLTTGVTHLLHKSGSTAEPKNYRPITCLPTVYKVLTSILKSKINTHIDSNSIMSASQNGCRSGSRGTKELLLIDMAISQQVRRSRKDLSTCWIDYKKAYDSVPHTWLMRVLELYKVDATLRTFLMTCMRTWRTVLRYPGCRNIQRNSEPIRIERGIFQGDSLSPLWFCLALNPLSTLLEDLGLGYRLRRGGQVISHLLYMDDLKLFAHTDSQLKELLKITETFSSSIRMEFGVDKCAVMHVKRGEIMESVGTQFTSSINLRALSASETYKYLGMSEALGINVTDMKQSLKERFFGRLKKVLNNLLSGGNKVRAFNGWVMPVLMYSFGILKWTQTELDALDQRVRTLLTANRLHHPRSSVMRLYIPRKCGGRGFLNAKTLHNREVCSLREYFLETDVGMHRDVVAADKGLTPLSLAKENWRKPVVLDTNDRLEVWKSKELHGRFFRALHGPDIDFQASVAWLRFGDLFGETEGFVFAIMDEVMMTNNYRRFIVKDGTVDICRACHRPGESIRHIISGCSRLANGEYLHRHNLVARIIHQQLALKYNLVESEVPYYRYMPDPVLEHGHITLYWDRSIITDRTIVANKPDIVLVDRSERRAMIVDITIPHDENLVKAEKDKQIKYLDLAHEVVDMWEVDSAIIVPIVVTANGLIAKSLDQHLRRLSLGSWIKGLIQKAVLLDTARIVRKFLSLEP

SEQ ID NO: 12722 - protein, 1200 aa, Sesamia nonagrioides
MLTRSAARRARSPPPDSSPSSASPPPVSSPTVNAVMTPAAAVALSSSDEYFSPPTTPPPVRRRGGRRPPDCLGPRGPPASDRAPATGGNVQRMKWTQSINENVMRAYFGATEGGSNLTAYRGRMLSLFQVLEPAVNVSAQRLSDQVRVIQRNHMLDDVVLDRLRLESRNSHVTPASSLVAVQLNSVPSRPNLVDEEDDDKAISVTPQCNEKVRSALEDAFREYRSTPPELRPRLPRLPMHKKNKALVCALDSQLSNYLKDSKDLADTHSILYCGAVAICRVAHVKFPDSDRATRPKPAVPAWQCRIERRIGETRALIGKLISFREGNTRPRVMRFVRRAFSGTDVSTRDYLLRVTERIDFLKQKIYAWANRIRRYRRRVERYSQNRNFQSDERWVYRAWERSDQGVTDTCLPDDDATRSFWRNIWSVPVSHTEGGWTRDVERACDPVPEMGAITICPQDVARAVRPLPNWKSPGPDGLHNFWIKWFSGSHACLASQFQTALESGSLPQFLTTGITHLLHKSGSTAEPKNYRPITCLPTVYKVLTSILKAKINTHIDSNSIMSASQNGCRNGSRGTKELLLIDMAISQQVRRSRKDLSTCWIDYKKAYDSVPHTWLMRVLELYKVDATLRTFLMTCMSQWRTVLRYPGCRNIQRNSEPIRIERGIFQGDSLSPLWFCLALNPLSTLLEDSGLGYRLRRGGQVISHLLYMDDLKLFAHTNSQLKELLKITETFSSAIRMEFGVDKCAVMHVQRGEIVESVGTQLTGSINLRSLSASETYKYLGMSEALGINVTDMKQSLKERFFGRLKKVLNSLLSGGNKVRAFNGWVMPVLMYSFGILKWTQTELDALDQRVRTLLTANRLHHPRSSVMRLYIPRKCGGRGFLNAKTLHNREVCSLREYFLKTDVGMHRDVVAVDKGLTPLSLAKENWRKPVVLETNDRMEVWQSKELHGRFFRALRGPDVDFQASVAWLRYGDLFGETEGFVCAIMDEVMMTNNYRKFIVKDGTVDICRACHRPGESIRHIISGCSRLANGEYLHRHNLVARIIHQQLALKYNLVESEVPYYRYMPDPVLENGHITLYWDRSIITDRTIVANKPDIVMVDRSERRAMIVDITIPHDENLVKAEKDKQIKYLDLAHEVVDMWEVDSAIIVPIVVTANGLIAKSLDQYLRRLSLGGWIKGLIQKAVLLDTARIVRKFLSLEP

SEQ ID NO: 12723 - protein, 1085 aa, Sesamia nonagrioides
MLDDVVLDRLRLESRNSHVTPASSLVAVQLNSVSPRPNHVDEEDDDRAISVSPQCNEKLRSALEDAFREYRSIPPELRPRLPRLPMHKKNKALVCALDSQLSNYLKDSKDLNDTHSILYCGAVAICRVAHVKFPDSDRATRPKSAVPAWQCRIERRIGETRALIGKLISFREGNTRPRVMRFVRRAFSGTDISTRDYLFRVTERIDFFKQKIYAWANRIRRYRRRVERYSQNRNFHSDERRVYRAWERSDQGVTDTCLPDDDAMSSFWRNIWSVPVSHTEGVWTRDVERACDPIPEMGAITICPQDVARAVRPLPNWKSPGPDGLHNFWIKWFSRSHALLASQFQTALESGSLPQFLTTGITHLLHKSGSTAEPKNYRPITCLPTVYKVLTSILKAKINTHIDSNSIMSASQNGCGNGSRGTKELLLIDMVISQQVRRSRKDLSTCWIDYKKAYDSVPHTWLMRVLELYKVHATLRTFLLTCMAQWRTVLLYPGCRNIQRNSEPIRIERGIFQGDSLSPLWFCLALNPLSTLLENSGLGYRLKRDGQVISHLLYMDDLKLFAPNDLQLRELLKITQTFSSAIRMEFGVDKCAVMHVQRGEIVESVGTQLTGSINLRSLSAAETYKYLGMSEALGINVTDMKQSLKERFFGRLKKVLNSLLSGGNKVRAFNGWVMPVLMYSFGILKWTQTELDALDQRVRTLLTANRLHHPLSSVMRLYIPRKCGGRGFLNAKALHNREICSLREYFLKTDVGMHRDVVAVDKGLTPLSLAKENWRKPVVLETNDRMEVWQSKELHGRFFRALHGPDVDFQASVAWLRFGDLFGETEGFVCAIMDEVMMTNNYRRFIVKDGTVDICRACHRPGESIRHIISGCSRLANGEYLHRHNLVARIIHQQLALKYNLVESEVPYYRYVPDPVLENGHITLYWDRSIITDRTIVANKPDIVMVDRSERRAMIVDITIPHDENLVKAEKDKQIKYLDLAHEVVDMWEVDSAIIVPIVVTANGLIAKSLDQHLRRLSLGSWIKGLIQKAVLLDTARIVRKFLSALTAGSLDPVPDTGGLLFFIFLNVFVFFVQIFKNVNYMLEK

SEQ ID NO: 12724 - protein, 975 aa, Apamea monoglypha
MSPELRPRLPRLPMHNKNRALVAVLDAQLSSHFDVCEDLTDTHSILYCAAVAACRVAHVKFASDSEATRPKPAIPAWQCRIERRIGGARALIGKLICFREGNTRPRVMRFVRRAFLGTDISSQDYLSRVTERIDFLKQKVYAWANRIRRYKRRVERYTQNRTFQNDERWVYRGWERPDQSVADTCLPDDDAVCSFWRSIWSAPVSHTEGDWTGKIERACELIPEMGAITICPQDVARAVRPLPNWKSPGPDGLHNFWIKWFQRSHAPLAAQFQSALESGLLPQFITTGITHLLHKSGSTADPKNYRPITCLPTIYKVLTSILRAKINKHIDSNSIMSVSQNGCRNGSRGTKELLLIDMAISQQVRRSRKDLSTCWIDYKKAYDSVPHTWLMRVLELYKVDTTLRTFLMTCMGQWRTVLRYPGCRNIQRNSEPIRIERGIFQGDSLSPLWFCLALNPLSTLLDDSGLGYRLRRGGQVISHLLYMDDLKLFAPNNLQLMELLKITETFSSAIRMEFGVDKCAVMHVKRGEIVESVGTQLSDSTNLRALSASETYKYLGMSEALGINVTDMKQSLKERFFGRLKKVLNSLLSGGNKVRAFNSWVMPVLMYSFGILKWTQTELDALDRRVRTLLTANRLHHPRSSVMRLYIPRKCGGRGFLNAKTLHNREICSLREYFLETDVGMHRDVVAVDKGLTPLSLAKENWRKPVVLDTNDRMEVWQSKELHGRFYRALHGPDVDLLASVAWLRFGDLFGETEGFVCAIMDEVMMTNNYRRFIVKDGTVDICRACHRPGESIRHIISGCSRLANGEYLHRHNLVARIIHQQLALKYNLVESEVPYYRYVPDPVLENGNITLYWDRSIITDRTIVANKPDIVVVDRSERRAMIVDITVPHDENLVKAEKDKQIKYLDLAREVVDMWHVDSAIIVPIVVTANGLIAKSLDQHLRRLSLGSWIKGLIQKAVLLDTARIVRRFLSLEP

SEQ ID NO: 12725 - protein, 1200 aa, Apamea monoglypha
MMMLTRSAARRARPPPPDSSLSSASPPPVPSLTVSAVTTPAAVVASSSSDEYFSPPTTPPPARRRGGRRPPDGLGPRGPPASDRVPALGGSVQRMRWTQSINENVMRSYYGATEGGNNLTAYRVRMLSLFQVLEPAVNVTAQRLSDQVRVIQRNHMLDDTVLDRLRNEMQSSHVIAPQSQTAAVLPQSNTSHADEGSNDRATNVSIQCNEELRNALEGAIREYRFMSPELRPRLPRLPMHNKNRALVAVLDAQLSSYFDACEDLTDTHSILYCAAVAACRVAHVKFASDSRATRPKPAIPPWQCRIERRIGGARALIGKLICFREGNTRPRVMRFVRRAFSGTDISSQDYLSHVTERIDFLKQKVYAWANRIRRYKRRVDRYTQNRTFQSDERWVYRGWERPDQGVADTCLPDDDAMYSFWRSIWSVPVSHTEGDWAREVERACDPIPEMEANTICAQDVARAVRPLPNWKSPGPDGLHNFWIKWFTRSHARLASQFQIALESGSLPQFLTTGVTHLLHKSASTAEPKNYRPITCLPTVYKVLTSILRAKINKHIDTNSIMSASQNGCKNGSRGTKELLLIDMAISQQVRRSRKDLSTCWIDYKKAYDSVPHTWLMRVLELYKVDTTLRTFLMTCMGQWRTVLRYPGCRNIQRNSEPIRIERGIFQGDSLSPLWFCLALNPLSTLLEDSGLGYRLRRGGQVISHLLYMDDLKLFAPNNLQLMELLKITETFSSAIRMEFGVDKCAVMHVKRGEIVESVGTQLSDSTNLRALSASETYKYLGMSEALGINVTDMKQSLKERFFGRLKKVLNSLLSGGNKVRAFNSWVMPVLMYSFGILKWTQTELDALDRRVRTLLTANRMHHPRSSVMRLYIPRKCGGRGFLNAKTLHNREICSLREYFLETDVGMHRDVVAVDKGLTPLSLAKENWRKPVVLDTNDRLEVWQSKELHGRFYRALHGPDVDLLASVAWLRFGDLFGETEGFVCAIMDEVMMTNNYRRFIVKDGTVDICRACHRPGESIRHIISGCSRLANGEYLHRHNLVARIIHQQLALKYSLVESEVPYYRYVPDPVLENGHITLYWDRSIITDRTIVANKPDIVVVDRSERRAMIVDITVPHDENLVKAEKDKQIKYLDLAREVVDMWDVDSAIIVPIVVTANGLIAKSLDQHLRRLSLGSWIKGLIQKAVLLDTARIVRRFLSLEP

SEQ ID NO: 12726 - protein, 1016 aa, Apamea monoglypha
MLTSNTSHADEGSNDMATNVSIQCNEELRNALEGAIREYRFMSPELRPRLPRLPMHNKNRALVAVLDAQLSSHFDVCEDLTDTHSILYCAAVAACRVAHVKFASDSEATRPKPAIPAWQCRIERRIGGARALIGKLICFREGNTRPRVMRFVRRAFLGTDISSQDYLSRVTERIDFLKQKVYAWANRIRRYKRRVERYTQNRTFQSDERWVYRGWERPDQSVADTCLPDDDAMCSFWRSIWSAPVSHTEGDWTGKIERACELIPEMGAITICPQDVARAVRPLPNWKSPGPDGLHNFWIKWFQRSHAPLAAQFQSALESGLLPQFITTGITHLLHKSGSTADPKNYRPITCLPTIYKVLTSILRAKINKHIDSNSIMSVSQNGCRNGSRGTKELLLIDMAISQQVRRSRKDLSTCWIDYKKAYDSVPHTWLMRVLELYKVDTTLRTFLMTCMGQWRTVLRYPGCRNIQRNSEPIRIERGIFQGDSLSPLWFCLALNPLSTLLDDSGLGYRLRRGGQVISHLLYMDDLKLFAPNNLQLMELLKITETFSSAIRMEFGVDKCAVMHVKRGEIVESVGTQLSNSTNLRALSASETYKYLGMSEALGINVTDMKQSLKERFFGRLKKVLNSLLSGGNKVRAFNSWVMPVLMYSFGILKWTQTELDALDRRVRTLLTANRLHHPRSSVMRLYIPRKCGGRGFLNAKTLHNREICSLREYFLETDVGMHRDVVAVDKGLTPLSLAKENWRKPVVLDTNDRMEVWQSKELHGRFYRALHGPDVDLLASVAWLRFGDLFGETEGFVCAIMDEVMMTNNYRRFIVKDGTVDICRACHRPGESIRHIISGCSRLANGEYLHRHNLVARIIHQQLALKYNLVESEVPYYRYVPDPVLENGNITLYWDRSIITDRTIVANKPDIVVVDRSERRAMIVDITVPHDENLVKAEKDKQIKYLDLAREVVDMWHVDSAIIVPIVVTANGLIAKSLDQHLRRLSLGSWIKGLIQKAVLLDTARIVRRFLSLEP

SEQ ID NO: 12727 - protein, 975 aa, Apamea monoglypha
MSPELRPRLPRLPMHNKNRALVAVLDAQLSSYFDVCEDLTDTHSILYCAAVAACRVAHVKFVSDSRATRPKPAIPPWQCRIERRIGGARALIGKLICFREGNTRPRVMRFVRRAFSGTDISSQDYLSRVTERIDFLKQKVYAWANRIRRYKRRVDRYTQNRTFQSDERWVYRGWERPDQGVADTCLPDDDAMYSFWRSIWSVPVSHTEGDWAREVERACDPIPEMEAITICAQDVARAVRPLPNWKSPGPDGLHNFWVKWLTRSHARLASQFQIALESGSLPQFLTTGVTHLLHKSASTAEPKNYRPITCLPTVYKVLTSILRAKINKHIDTNSIMSASQNGCKNGSRGTKELLLIDMAISQQVRRSRKDLSTCWIDYKKAYDSVPHTWLMRVLELYKVDTTLRTFLMTCMGQWRTVLRYPGCRNIQRNSEPIRIERGIFQGDSLSPLWFCLALNPLSTLLEDSGLGYRLRRGGQVISHLLYMDDLKLFDPNNLQLMQLLKITETFSSAIRMEFGVDKCAVMHVKRGEIVESVGTQLSDSTNLRALSASETYKYLGMSEALGINVTDMKQSLKERFFGRLKKVLNSLLSGGNKVRAFNSWVMPVLMYSFGILKWTQTELDALDRRVRTLLTANRLHHPRSSVMRLYIPRKCGGRGFLNAKTLHNREICSLREYFLETDVGMHRDVVAVDKGLTPLSLAKENWRKPVVLDTNDRMEVWQSKELHGRFYRALHGPDVDLLASVAWLRFGDLFGETEGFVCAIMDEVMMTNNYRRFIVKDGTVDICRACHRPGESIRHIISGCSRLANGEYLHRHNLVARIIHQQLALKYNLVESEVPYYRYVPDPVLENGNITLYWDRSIITDRTIVANKPDIVVVDRSERRAMIVDITVPHDENLVKAEKDKQIKYLDLAREVVDMWHVDSAIIVPIVVTANGLIAKSLDQHLRRLSLGSWIKGLIQKAVLLDTARIVRRFLSLEP

SEQ ID NO: 12728 - protein, 1197 aa, Furcula furcula
MLTRSKVAQLRPPDSSPCSASQPPAPSTDGTPPAAVASSESDEYFSPPSSPPPVRRRRGRPPRELGRLGQPAPNRVLAPGGVVRRMKWTSSINESVMRAYYEATEGGTNLTAYRDRMLSLFQVLEPAVNVSAQRLSDQVRAIQRGHMLDDTVHDRLRSVVQGSRVAPCIPSQAVAPVVDTAPAPRLAANSDDDRDDTTTNVSTQYINLLRSTLEDVVREYRTMPQSLRPRLPRLPMHKRNRALVCALDSLLSSYFDSSEDLADAHSLLYCAAMTACRVARVKLPNTDAATRPRPAVPAWQCRIERRIGEARVLIGKLTCFREGNTRPRVMRFVRRAFSGTGIGPREYVSRVTERIDFLKQKVCAWANRIRRYRARVDRYSQNNMFQRDQRWVYISWERPSQTGGEAQRPDDDAMIRFWRNIWSVPVTHSEGDWIRDVEQVCEPIPEMGAITIRPQDVADAVRQLPNWKAPGPDGLHNFWLKWLRSSHACLASLFQSAVESGSLPDFLTTGITHLLHKTNSTTDPKNYRPITCLPTVYKTLTSILRAKIYRHVEGNSIMSASQNGCKSGARGTKELLLIDMAICQQARRNRKDLSTCWIDYKKAYDSVPHTWLMRVLELYKVNTTLRTFLASCMRQWRTVLLYPGSRQTLGDGEPIRIERGIFQGDSLSPLWFCLALNPLSTLLKSSGLGCRLRRGGQVISHLLYMDDLKLFAPTELQLMGLLKVTETFSNSIRMEFGVDKCAVMHVKRGRLVESRSVQLSDSTDLRTLSAIETYKYLGMSQALGINETDMKQSLRERFLGRLRKVLKSLLSGGNRVRAYNGWVMPVLMYSFGILKWTQTELDTLDRTVRTLLTTYRMHHPRSSVMRLYIPRKCGGRDFLNAKTLHNREICNLREYFLHCGGEMQTDVVAVDNGLTPLSLAKGNWRKPVVLTTGDREAVWQSKELHGRFYRALHGPDVDFSASVAWLRFGDLFGETEGFVCAIMDEVVMTNNYRKYILRDGTIDICRACHRPGESLRHIISGCSRLANGEYLHRHNQVARIIHQQLALKYRLVTSEVPYYRYVPEPVLEDGHITLYWDRSIITDRTIVANKPDIVLIDRTERRAMIVDVTVPHDENLVKAEKDKECKYLDLAHEVVDMWDIDRAIIVPIVVSVHGLMAKSLDKHLKRLTLDGWIKGQMQKAVLLETARIVRKFLSLEP

SEQ ID NO: 12729 - protein, 1089 aa, Amphipyra berbera
MNSTAYRGRMLSLFQVLEPAVNVSAQRLSDQVRVIQRDHRLTDAALDRLRSEVQSNRIISPQSQTAAQPQAPTVVLPPPIHADEESDDRVTNVSTQCNERLRSALELAIREYRFTPPNLRPRIPRLPMNKKNRALMCALDSLLSSYFDNSESLKDTHSILYCAAVAACRVAHAKFDNNDRATRPKPAVPAWQCRIERRINEARALIGKLICFREGNTRPRVMRFVRRAFSGTDINPRDYLSRVTERIDFLKQKVYAWANRIRRYKRRVERYTQNRMFHSDERWVYRTWERPDHDVSDTHLPDNDVMNTFWRNIWSMPVTHIEGDWMQEVQRACEPIEEMGDITIVPQDVTSAVRPMANWKSPGPDGLHNFWLKWLRSSHARLASQFQSSLESGSFPEFLTTGVTHLLHKSGSTAEPKNYRPITCLPTVYKLLTSILRAKINSHIINNSIMSVSQNGCKNGSRGTKELLLIDMAISQQVRRSRKDLSTCWIDYKKAYDSVPHTWLMRVLELYKVNTTLCAFLTSCMGQWRTVLHYPGCRQIQGRGEPIRIERGIFQGDSLSPLWFCLALNPLSTLLEGSGLGYRLRRGGQVISHLLYMDDLKLFAPNNLQLVKLLKVTETFSNSIRMEFGVDKCAVMHVKRGGIMESVGTQLSDSIHLRSLSSTETYKYLGMTEALGINETDMKQSLRERFYGRLKKVLKSLLSGGNKVRAFNGWVMPVLMYSFGILKWTQTELDALDRRVRTLLTAYRMHHPRSSVMRLYIPRKCGGRGFLNAKTLHNREVCSLREYFLHADVGMHRDVVAVDKGFTPLSLAKENWRKPVVLDTNGRREVWQSKELHGRFYRALHGPDVDFLASVAWLRFGDLFGETEGFVCAIMDEVILTNNYRKYIVKDGTVDICRACHCPGESIRHIISGCSRLANGEYLHRHNLVARIIHQQLALKYNLVDAELPYYKYVPDPVLENGHITLYWDRSIITDRTIVANKPDIVVIDRSKRLAMIVDITVPHDENLVKAEKDKEIKYQDLAHEVVDMWEVDSAVIVPIVVTANGLIAKSLDQHLTRLALGSWIKGLIQKAVLLDTARIVRKFLSLRP

SEQ ID NO: 12730 - protein, 1212 aa, Amphipyra berbera
MLTRSRTKTQDTRTRPSPSASSLSSASQPPDSSIVSDVTPAAAVASSSSDEFYSPPTSPPPPPPPPPRRGRRGRGRPPACMGPRGPPASDRVPAPGGSVQRMRWTLTMNENCMRAYFGATEGGTNLTAYRGRMLSLFQVLEPTVNVSAQRLSDQVRVIQRDHRLTDAALDRLRSEVQSNRIISLQSQTAAQPQTPTVVPPLPIHADEESDDRVTNVSTQCNEQLRSALELAIREYRFTPPNIRPRIPRLPMHRKNRALMCALDSLLSSYFDNSENLEDTHSILYCAAVAACRVAHAKFDNNDRATRPKPAVPAWQCRIERRINEARALIGKLICFREGNTRPRVMRFVRRAFSGTDINPRDYLSRVTERIDFLKQKVYAWANRIRRYKRRVERYTQNRMFHSDERWVYRTWERPDHDVSDTHLPDNDVMNTFWRNIWSMPVTHTEGDWMQEVQRACEPIEEMGDITIVPQDVTSAVRPMANWKSPGPDGLHNFWLKWLRSSHARLASQFQSSLESGSLPEFLTTGVTHLLHKSGSTAEPKNYRPITCLPTVYKLLTSILRAKINSHIINNSIMSVSQNGCKNGSRGTKELLLIDMAISQQVRRSRKDLSTCWIDYKKAYDSVPHTWLMRVLELYKVNTTLCAFLTSCMGQWRTVLHYPGCRQIQGRGEPIRIERGIFQGDSLSPLWFCLALNPLSTLLEGSGLGYRLRRGGQVISHLLYMDDLKLFAPNNLQLMKLLKVTETFSNSIRMEFGVDKCAVMHVKRGGIMESVGTQLSDSIHLRPLSSTETYKYLGMSEALGINETDMKQSLRERFYGRLKKVLKSLLSGGNKVRAFNGWVMPVLMYSFGILKWTQTELDALDRRVRTLLTAYRMHHPRSSVMRLYIPRKCGGRGFLNAKILHNREVCSLREYFLQADVGMHRDVVAVDKGFTPLSLAKENWRKPVVLDTNGRREVWQSKELHGRFYRALYGPDVDFLASVAWLRFGDLFGETEGFVCAIMDEVMMTNNYRKYIVKDGTVDICRACHCPGESIRHIISGCSRLANGEYLHRHNLVARIIHQQLALKYNLVDAEVPYYKYVPDPVLENGHITLYWDRSIITDRTIVANKPDIVVIDRSERLTMIVDITVPHDENLVKAEKDKEIKYQDLAHEVVDMWEVDSAVIVPIVVTANGLIAKSLDQHLTRLALGSWVKGLIQKAVLLDTARIVRKFLSLRP

SEQ ID NO: 12731 - protein, 851 aa, Amphipyra berbera
MSRVTERIDFLKQKVYAWANRIRRYKRRVERYTQNRMFHSDERWVYRTWERPDHDVNDAVDAPDNDVMNTFWRNIWSMPVTHTEGDWMQEVQRACEPIKEMGDITIVPQDVTSAVRPMANWKSPGPDGLHNFWIKWLRSSHARLASQFQSSLESGSLPEFLTTGVTHLLHKSGSTAEPKNYRPITCLPTVYKLLTSILRAKINSHILYNSIMSVSQNGCKNGSRGTKELLLIDMAISQQVRRSRKDLSTCWIDYKKAYDSVPHTWLMRVLELYKVNTTLCAFLTSCMGQWRTVLHYPGCRQIQGRGEPIRIERGIFQGDSLSPLWFCLALNPLSTLLEGSGLGYRLRRGGQVISHLLYMDDLKLFAPNNLQLMKLLKVTETFSNSIRMEFGVDKCAVMHVKRGGIMESVGTQLSDSIHLRSLSSTETYKYLGMSEALGINETDMKQSLRERFYGRLKKVLKSLLSGGNKVRAFNGWVMPVLMYSFGILKWTQTELDALDRRVRTLLTAYRMHHPRSSVMRLYIPRKCGGRGFLNAKTLHNREVCSLREYFLQADVGMHRDVVAVDKGFTPLSLAKENWRKPVVLDTNGRREVWQSKELHGRFYRALHGPDVDFLASVAWLRFGDLFGETEGFVCAIMDEVMMTNNYRKYIVKDGTVDICRACHCPGESIRHIISGCSRLANGEYLHRHNLVTRIIHQQLALKYNLVDAEVPYYKYVPDPVLENGHITLYWDRSIITDRTIVANKPDIVVIDRTERLTMIVDITVPHDENLVKAEKDKEIKYQDLAHEVVDMWEVDSAVIVPIVVTANGLITKSLDHHLTRFSLGSWVKGLIQKAVLLDTARIVRKFLSLRP

SEQ ID NO: 12732 - protein, 868 aa, Amphipyra berbera
MRFVRRAFSGTDINPRDYMSRVTERIDFLKQKVYAWANRIRRYKRRVERYTQNRMFHSDERWVYRTWERPDHDVSDAHPPDNDVMNTFWRNIWSMPVTHTEGDWMQEVQRACEPIKEMGDITIVPQDVTSAVRPMANWKSPGPDGLHNFWIKWLRSSHARLASQFQSSLESGSLPEFLTTGVTHLLHKSGSTAEPKNYRPITCLPTVYKLLTSILRAKINSHILYNSIMSVSQNGCKNGSRGTKELLLIDMAISQQVRRSRKDLSTCWIDYKKAYDSVPHTWLMRVLELYKVNTTLCAFLTSCMGQWRTVLHYPGCRQIQGRGEPIRIERGIFQGDSLSPLWFCLALNPLSTLLEGSGLGYRLRRGGQIISHLLYMDDLKLFAPNNLQLMKLLKVTETFSNSIRMEFGVDKCAVMHVKRGGIMESVGTQLSDSIHLRSLSSTETYKYLGMSEALGINETDMKQSLRERFYGRLKKVLKSLLSGGNKVRAFNGWVMPVLMYSFGILKWTQTELDALDRRVRTLLTAYRMHHPRSSVMRLYIPRKCGGRGFLNAKTLHNREVCSLREYFLQADVGMHRDVVTVDKGFTPLSLAKENWRKPVVLDTNGRREVWQSKELHGRFYRALHGPDVDFLASVAWLRFGDLFGETEGFVCAIMDEVMMTNNYRKYIVKDGTVDICRACHCPGESIRHIISGCSRLANGEYLHRHNLVARIIHQQLALKYNLVDAEVPYYKYVPDPVLENGHITLYWDRSIITDRTIVANKPDIVVIDRTERLTMIVDITVPHDENLVKAEKDKEIKYQDLAHEVVDMWEVDSAVIVPIVVTANGLIAKSLDHHLTRLSLGSWVKGLIQKAVLLDTARIVRKFLSLRP

SEQ ID NO: 12733 - protein, 1205 aa, Amphipyra berbera
MLTRSRAKALTETTRPRSSAPSLSSASQPPDSSIVSDVTPAAAVASSSSDEYFSPPTSPPPARRRGRGRPPDSLRPRGPLASDRVPAAGGSVQRMRWTPTMNENCMRAYFGATEGGTNLTAYRGRMLSLFQVLEPTVNVSAQRLSDQVRVIQRDHRLTDAVLDRLRSEVQSNAIISLQSQTAAQPRTPTVVPSLPTHGNEESDDRVTNVSTQCNEQLRSALELAIQEYRFTPPNIRPRIPRLPMHRKNRALMCALDSLLSSYFDNSENLEDTHSILYCAAVAACRVAHAKFDNSDKATRPKRAVPAWQCRIERRINEARALIGKLICFREGNTRPRVMRFVRRAFSGTDINPRDYMSRVTERIDFLKQKVYAWANRIRRYKRRVERYTQNRMFHSDERWVYRTWERPDHDVNDTHPPDNDVMNTFWRNIWSMPVTHTEGDWMQEVQRACEPIEEMGDITIVPQDVTSAVRPMANWKSPGPDGLHNFWIKWLRSSHARLASQFQSSLESGSLPEFLTTGVTHLLHKSGSTAEPKNYRPITCLPTVYKLLTSILRAKINSHIINNSIMSASQNGCKNGSRGTKELLLIDMAISQQVRRSRKDLSTCWIDYKKAYDSVPHTWLMRVLELYKVNTTLCAFLTSCMGQWRTVLHYPGCRQIQGRGEPIRIERGIFQGDSLSPLWFCLALNPLSTLLEGSGLGYRLRRGGQVISHLLYMDDLKLFAPNNLQLMKLLKVTETFSNSIRMEFGVDKCAVMHVKRGGIMESVGTQLSDSIHLRSLSSAETYKYLGMSEALGINETDMKQSLRERFYGRLKKVLKSLLSGGNKVRAFNGWVMPVLMYSFGILKWTQTELDALDRRVRTLLTAYRMHHPRSSVMRLYIPRKCGGRGFLNAKTLHNREVCSLREYFLQADVGMHRDVVAVDKGFTPLSLAKENWRKPVVLDTNGRREVWQSKELHGRFYRALHGPDVDFLASVAWLRFGDLFGETEGFVCAIMDEVILTNNYRKYIVKDGTVDICRACHCPGESIRHIISGCSRLANGEYLHRHNLVARIIHQQLALKYNLVDAEVPYYKYVPDPVLENGHITLYWDRSIITDRTIVANKPDIVVIDRSERLAMIVDITVPHDENLVKAEKDKEIKYQDMAHEVVDMWEVDSAVIVPIVVTANGLIAKSLDQHLTRLALGSWIKGLMQKAVLLDTARIVRKFLSLRP

SEQ ID NO: 12734 - protein, 1202 aa, Amphipyra berbera
MLTRSRTRTTEQRSARPPPPDSPLSSASQPPELGLPVTPAAAASSSSSDEYFSPPTSPRPVRRQGRGRPPNSLGPRGPPAPSRVLAAGGYVQRMKWTQSINENVMRAYYGSTEGGTNLTAYRVRMLTLFQELEPAINVSAQRLSDQVRVIQRNHRLDDAALDRLRLEVQNSRAIPVPSQTAVHQLINVAPPRSDRVDGDEDDGAVTVSSQYNDRLRSALEDAIRECRANPESRPRLPRLPMHNKNRALVCALDSLLASYFESSEDLGDTHSILYCAAVAACRVANVKFNNSERATRPKLAVPAWQCRIERRIDETRALIGKLICFREGNTRPRVMRFVRRAFSGTGISPREYTSRATERIDFLKQKVCAWASRIRRYKRRVERYTQNRMFQCDQRWVYRAWERPDQSVSGGRLPDDDAMSSFWRSIWSVPVIHTEGDWMRDIERTCESIEEMGEIVISPQDVAGAVRPLPNWKSPGPDGLHNFWIKWLRSSHARLASQFQSSLESGSLPQFLTTGVTHLLHKSGSTAEPKNYRPITCLPTVYKLLTSILRSKINTHIGNNSVLSSSQNGCGNGSRGTKELLLIDTAISQQVRRSQKSLSTCWIDYKKAYDSVPHTWLMRVLELYKINTTLRTFLRSCMGQWRTVLRYPACQPIRRSGEPIRIERGIFQGDSLSPLWFCLALNPLSTLLEGSGLGYPLRRGGQVVSHLLYMDDLKLFAPTKLQLVDLLKVTETFSNSIRMEFGVDKCAVMHVRRGRIMESEGLQLSDSIHLSPLSANDTYKYLGMSEGLGISEADMKQSLRERFFGRLKKVLKSLLSGGNKVRAFNGWVMPVLMYSFGILKWTQTELDALDRRVRTLLTANRMHHPRSSVMRLYIPRKCGGRGLLNAKTLHNREVCSLREFFLHADAGMHRDVVAVDKGLTPLSLARENWRKPVVLSTNDRREIWQSKELHGRFYRALHGPDVDFLASVSWLRFGDLFGETEGFVCAIMDEVIMTNNYRKYIVKDGTVDICRACHCPGESLRHIISGCSRLANGEYLHRHNQVARIIHQQLALKYNLVESEVPYYRYVPDPVLENGRITLYWDRSIITDRTIVANKPDIVVIDRSERRTMIVDVTIPHDGNLVKAEKDKQIKYLDLAHEVVNMWDVESATIVPIVVTANGLMAKSLDKHLMRLSLGGWIKGLIQKAVLLDTARIVRRFLSLEP

SEQ ID NO: 12735 - protein, 1197 aa, Noctua janthe
MLTRSAARRARLSPPDPSLSSASPPPESRPVVSAVTPAVAVASSSSDEYFSPPTTPPPVRRRGGRRPPDGLGPRGPPASDRVPAPGGSVPRMRWTQSINANVMRAYYGATEGGNNLTAYRVRMLSLFQVLEPAVNVSAQRLSDQVRVIQRNGMLDDTVLDRLRTEMQSSHVIATPPQTVVPPQSTIIPNHDNNVSNDMVTNVSTQCNEEMRCALEGAIREYRFMQPDLRPRVPRLPMHNKHRVLVAVLDSQLSNYFDNCEDLTDAHSILYCAAVAACRVAHVKFSDDRATRPKPAVPSWQYRIERRIGEARALVGKLICFREGSTRPRVMRFVRRAFSGTDISARDYMSRVTERIDFLKQKVYAWANRIRRYKRRVNRYTQNRTFQRDERWIYRAWERPDQGVADTRLPDDDAMCSFWRSIWSVPVSHTEGEWTREVERACDLVPEMGAITISPQDVVRAVSPLPNWKSPGPDGLHNFWIKWFTRSHARLAILFQSALESGSLPEFLTTGITHLLHKSGSTAEPKNYRPITCLPTVYKVLTSILRAKINKHIDDNSVISASQNGCRNGSRGTKELLLIDMAISQQVRRSRRDLSTCWIDYKKAYDSVPHTWLMRVLELYKVDSTLRIFLMSCMGQWRTVLRYPGCRQIQRNSEPIRIERGIFQGDSLSPLWFCLALNPLSTLLEDSGLGYRLRRGGQVISHLLYMDDLKLFAPNDLQLMELLKVTETFSSAIRMLFGVDTCAVMHVKRGEIVESVGTQLSDSINLRSLSATETYKYLGMSEALGINVADMKQSLKERFFSRLKKVFNSLLSGGNKVRAFNGWVMPVLMYSFGILKWTQTELDALDRRVRTLLTTYRMHHPRSSVMRLYIPRRCGGRGFLNAKTLHNREICSLREYFLETDVGMHPDVVAVDKGLTPLSLAKENWRKPLVLDTNDRMEVWQSKELHGRFFRALHGPDVDLSASVAWLRSGDLFGETEGFVCAIMDKVMMTNNYRRFIVKDGTVDICRACHRPGESIRHIISGCSRLANGEYLHRHNLVARIIHQQLALKYNLVESEVPYYKYVPDPVLENGRITLYWDRSIVTDRTIVANKPDIVVVDRSERRAMIVDITVPHDGNLVKAEKDKQIKYLDLAHEVVDMWDVDSAIIVPIVVSAHGLIAKSLDQYLRRLSLGSWIKGLIQKAVLLDTARIVRRFLSLEP

SEQ ID NO: 12736 - protein, 1197 aa, Noctua janthe
MLTRSATRRARLSPPDPSLSSASPPPESSPIVSAVTPAVAVASSSSDEYFSPPTTPPPVRRRGGRRPPDGLGPRGPPASDRVPAPGGSVPRMRWTQSINANVMRAYYGATEGGNNLTAYRVRMLSLFQVLEPAVNVSAQRLSDQVRVIQRNGMLDDTVLDRLRTEMQSSHVIATPPQTVVPPQSTIIPTHDNNVSNDMVTNVSTQCNEEMRCALEGAIREYRFMQPDLRQRVPRLPMHNKNKVLVAVLDSQLSNYFDNCEELTDAHSVLYCAAVAACRVAHVKFSDDRATRPKPAVPSWQYRIERRIGEARALIGKLICFREGNTRPRVMRFVRRAFSGTDISARDYMSRVTERIDFLKQKVYAWANRIRRYKRRVDRYTQNRTFQRDERWVYRAWERPDQGVADTHLPDDDAMCSFWHSIWSVPVSHTEGEWTREVERACDLVPEMGAITISPQDVVRAVHPLPNWKSPGPDGLHNFWIKWFTRSHARLAILFQSALESGSLPEFLTTGITHLLHKSGSTAEPKNYRPIACLPTVYKVLTSILRAKINKHIDDNSVMSASQNGCRNGSRGTKELLLIDMAISQQVRRSRRDLSTCWIDYKKAYDSVPHTWLMRVLELYKVDSTLRIFLMSCMGQWRTVLRYPGCRQIQRNSEPIRIERGIFQGDSLSPLWFCLALNPLSTLLEDSGLGYRLRRGGQVISHLLYMDDLKLFAPNDLQLMELLKVTETFSSAIRMEFGVDKCAVMHVKRGEIVESVGTQLSDSINLRSLSATETYKYLGMSEALGINVADMKQSLKERFFGRLKKVFNSLLSGGNKVRAFNGWVMPVLMYSFGILKWTQTELDALDRRVRTLLTTYRMHHPRSSVMRLYIPRRCGGRSFLNAKTLHNREICSLREYFLETDVGMHRDVVAVDKGLTPLSLAKENWRKPVVLDTNDRMEVWQSKELHGRFFRALHGPDVDLPASVAWLRSGDLFGETEGFVCAIMDEVMMTNNYRRFIVKDGTVDICRACHRPGESIRHIISGCSRLANGEYLHRHNLVARIIHQQLALKYNLVESEVPYYKYVPDPVLENGNITLYWDRSIVTDRTIVANKPDIVVVDRSERRAMIVDITVPHDGNLVKAEKDKQIKYLDLAHEVVDMWDVDSAIIVPIVVSAHGLIAKSLDQYLRRLSLGSWIKGLIQKAVLLDTARIVRRFLSLEP

SEQ ID NO: 12737 - protein, 1200 aa, Mythimna ferrago
MLTRAAARRARPPPPASSLSSASPPPEPSPIVSAVTPAVAAASSSSDEYYSPPTTPPPTRRRGGRRPPDCLGPRGPPASDRVPAPGGSVQRMRWTQSINENVMRSYYGATEGGNNLTAYRVLMLSLFQVLEPAVNVSAQRLSDQVRVILRNHMLDDTALDRLRTEMSDRVITPPSQPVVPAVVPPSNYISFHTDEVSSDTVTNVSNQCNSELRSALECAIREYRNIPPELRPRIPRLPMCNKNRALVAALDSQLSNYFDDCEDLTDTHSIMYCAAVAACRVAHVKFPNSDVATRPKPAVPAWQCRIERRIGGARALIGKLICFREGNTRPRVMRFVRRAFSGTDISPRDYMSRVTERIDFLKQKVYAWANRIRRYKRRVERYTQNRTFRSNERWVYRAWERPDQGVTDARLPDDDAMSSFWRSIWSVPVSHTEGDWTREVERACDPIPQMGAIDISPQDVARAVRPLPNWKSPGPDGLHNFWIKWFTRSHARLAYQFQSALESGSLPQFLTTGITHLLHKSGSTAEPKNYRPITCLPTVYKVLTSILRSKINSHIDENSIMSPSQNGCRNGSRGTKELLLIDMTISQQVRRSRKDLSTCWIDYRKAYDSVPHTWLMRVLELYKIDTTLRTFLMSCMRQWSTVLRYPGCRNIQRNSEPVRIERGIFQGDSLSPLWFCLALNPLSTLLENSGLGYRLKRGGQVISHLLYMDDLKLFAPNNLQLMELLKVTEIFSSAIKMEFGVDKCAVMHVKRGEVVESVSTQLTDSINLRSLSPTETYKYLGMSEALGISITGMKQSLRERFFGRLKRVFNSLLSGGNKVRAFNGWVMPVLMYSFGVLKWTQTELDALDRRVRTLLTAYRMHHPRSSVMRLYIPRKCGGRGFLNAKTLHNREVCSLREYFLAADVGMHRDVVAVDKGLTPLSLANENWRKPIVLDTNDRREVWQSKELHGRFFRALHGPDVDQLASVAWLRFGDLFGETEGFVCAIMDEVIMTNNYRRFIVKDGTVDICRACHRPGESIRHIISGCSRLANGEYLHRHNLVARIIHQQLALKYSLVESEVPYYRYEPDPVLDNGHITLYWDRPIITDRTIVANKPDIVVVDRSERRAMIVDISVPHDENLVKAEKDKQIKYIDLAREVVDMWEVDSAVIVPIVVSANGLIAKSLDQHLRRLSLGDWIKGLIQKAVLLDTARIVRRFLSLEP

SEQ ID NO: 12738 - protein, 1200 aa, Mythimna ferrago
MLTRSRARQQQTHPTSSDSSFSSASQPPGPAPAVSPVIPVAAVASSSSDEYFSPPTTPPPARRRGRGRPPACLGPRGPPASGGVPAAGGSVQRMRWTQSINENVMRSYFGATEGGTNLTAYRGRMLSLFQVLEPAVNVSAQRLSDQVRVIQRNRMLDDAVLDRLRLESRNGRVSPVSPPAVVQLQPSVSPRPDHVGEDDDDGAISVSTQCNARLRSALEDAFREYRSIPPELRPRLPRLPMHRKNRALVCALDSQLSNCFDSSEDLTDTHSILYCAAAAACRVAHVKIPNSDRATRPVKPAWQCRIERRIGEARALIGKLICFREGNTRPRVMRFVRRAFSGTDVSPRDYLPRITERIDFLRQKVYAWANRIRRYKRRVERYTQNRAFQSNERWVYRAWERPDQSVIDTRLPDDDAMYSFWRSIWSVPVSHTEGDWTRGVERECELIPEMGAITISPQDVARAVRPLPNWKSPGPDGLHNFWLKWFKSSHARLASQFQSALESGSLPQFLTTGITHLLHKSGSTAEPKNYRPITCLPTVYKVLTSILRAKINSHIETNSIMSASQNGCRNGSRGTKELLLIDVAISQQVRRSRRDLSTCWIDYKKAYDSVPHTWLMRVLELYKIDVTLRTFLMSCMGQWRTVLHYPGCRRVSENSEPLRIERGIFQGDSLSPLWFCLALNPLSTLLEGSGLGYRLRRESQVISHLLYMDDLKLFASNNLQLMELLKVTETFSSAIRMEFGLDKCAVMHVKRGEIMESVGTQLSDSIHLRSLSSTETYKYLGMSEALGINAADVKESLRERFFCRLNKVLKSLLSGGNKVRAFNGWVMPVLMYSFGILKWTQTELDALDRRVRTLLTANRMHHPRSSVMRLYIPRKCGGRGFLNTKTLHNREVCSLREYFLETDVGMHRDVVAVDKGLTPLSLASENWRKPIVMDTNERKEVWKGKELHGRFYRALHGPDVDLLTSVSWLRFGNLFGETEGFVFAIMDEVMMTNNYRKYIVKDGTVDICRACHRPGESIRHIISGCSHLANGDYLHRHNLVARIIHQQLALKYNLVESEVPYYRYVPDPVLENGSVTLYWDRSIITDRTIVANKPDIVVIDRLERRTMIVDIAVPHDENLVKAEKDKQTKYLDLAREVVDMWEVDRAIIVPIVVTANGLIAKSLDQHLRRLSLGSWIKGLIQKAVLLDTARIVRRFLSQEP

SEQ ID NO: 12739 - protein, 1200 aa, Mythimna ferrago
MLTRSRAQQLNTQLTTSGSSLSSASQPPGPAPAVSPEIPVAAVASSSSDEYFSPPTTPPPARRRGRGRPPACLGPRGPPASDRVPAAGGSVQRMRWTQSMNENVMRSYFGATEGGTNLTAYRGRMLSLFQVLEPAVNVSAQRLSDQVRVIQRNRMLDDAVLDRLRLESRNGRVSPVSPPAAVQRQPSVSPRPDHVGEDDDDGAISVSTQCNVRLRSALEDAFREYRSIPPELRPRLPRLPMHRKNRALVCALDLQLSNCFDSSEDLTDTHSILYCAAAAACRVAHVKIPNSDRATRPAKPAWQCRIERRIGEARALIGKLICFREGNTRPRVMRFVRRAFSGTDISPQDYLPRITERIDFLRQKVYAWANRIRRYKRRVERYTQNRAFQSNERWVYRAWERPDQSVIDTRLPDDDAMYSFWRSIWSVPVNHTEGDWTRKVERECELLPEMGAVTISPQDVARAVRPLPNWKSPGPDGLHNFWLKWFKSSHARLASQFQSALESGSLPQFLTTGITHLLHKSGSTAEPKNYRPITCLPTVYKVLTSILRAKINSHIETNSIMSASQNGCRNGSRGTKELLLIDVAISQQVRRSRRDLSTCWIDYKKAYDSVPHTWLMRVLELYKIDVTLRTFLMSCMGQWRTVLHYPGCRRVSENSEPLRIERGIFQGDSLSPLWFCLALNPLSTLLEGSGVGYRLRREGQVISHLLYMDDLKLFASNNLQLMELLKVTETFSSAIRMEFGLDKCAVMHVKRGEIMESVGTQLSDSIHLRSLCSTETYKYLGMSEALGINAADVKQSLRERFFGRLNKVLKSLLSGGNKVRAFNGWVMPVLMYSFGILKWTQTELDALDRRVRTLLTANRMHHPRSSVMRLYIPRKCGGRGFLNAKTLHNREVCSLREYFLETDVGMHRDVVAVDKGLTPLSLANENWRKPIVMDTNERKEVWKGKELHGRFYRALHGPDVDLLASVSWLRFGDLFGETEGFVFAIMDEVMMTNNYRKYIVKDGTVDICRACHRPGESIRHIISGCSHLANGDYLHRHNLVARIIHQQLALKYNLVESEVPYYRYVPDPVLENGSVTLYWDRSIITDRTIVANKPDIVVINRLERRTMIVDIAVPHDENLVKAEKDKQTKYLDLAREVVDMWEVDRAIIVPIVVTANGLIAKSLNQHLRRLSLGSWIKGLIQKAVLLDTARIVRRFLSQEP

SEQ ID NO: 12740 - protein, 1200 aa, Mythimna ferrago
MLTRSRAQQLNTQLTTSGPSLSSASQPPGPAPAVSPEIPVAAVASSSSDEYFSPPTTPPPARRRGRGRPPACLGPRGPPASDRVPAAGGSVQRMRWTQSINENVMRSYFGATEGGTNLTAYRGRMLSLFQVLEPAVNVSAQRLSDQVRVIQRNRMLDDAVLDRLRLESRNGRVSPVSPPAAVQRQPSVSPRPDHVGEDDDDGAISVSTQCNVRLRSALEDAFREYRSIPPELRPRLPRLPMHRKNRALVCALDSQLSNCFDSSEDLIDTHSILYCAAAAACRVAHVKIPNSDRATRPAKPAWQCRIERRIGEARALIGKLICFREGNTRPRVMRFVRRAFSGTDISPRDYLPRITERIDFLRQKVYAWANRIRRYKRRVERYTQNRAFQSNERWVYRAWERPDQSVIDTRLPDDDAMYSFWRSIWSVPVNHTEGDWTRKVERECELLPEMGAVTISPQDVARAVRPLPNWKSPGPDGLHNFWLKWFKSSHARLASQFQSALELGSLPQFLTTGITHLLHKSGSTAEPKNYRPITCLPTVYKVLTSILRAKINSHIETNSIMSASQNGCRNGSRGTKELLLIDVAISQQVRRSRRDLSTCWIDYKKAYDSVPHTWLMRVLELYKIDVTLRTFLMSCMGQWRTVLHYPGCRRVSENSEPLRIERGIFQGDSLSPLWFCLALNPLSTLLEGSGVGYRLRREGQVISHLLYMDDLKLFASNNLQLMELLKVTETFSSAIRMEFGLDKCAVMHVKRGEIMESVGTQLSDSIHLRSLCSTETYKYLGMSEALGINAADVKQSLRERFFGRLNKVLKSLLSGGNKVRAFNGWVMPVLMYSFGILKWTQTELDALDRRVRTLLTANRMHHPRSSVMRLYIPRKCGGRGFLNAKPLHNREVCSLREYFLETDVGMHRDVVAVDKGLTPLSLANENWRKPIVMDTNERKEVWKGKELHGRFYRALHGPDVDLLASVSWLRFGDLFGETEGFVFAIMDEVMMTNNYRKYIVKDGTVDICRACHRPGESIRHIISGCSHLANGDYLHRHNLVARIIHQQLALKYNLVESEVPYYRYVPDPVLENGSVTLYWDRSIITDRTIVANKPDIVVIDRLERRTMIVDIAVPHDENLVKAEKDKQTKYLDLAREVVDMWEVDRAIIVPIVVTANGLIAKSLDQHLRRLSLGSWIKGLIQKAVLLDTARIVRRFLSQEP

SEQ ID NO: 12741 - protein, 1200 aa, Mythimna ferrago
MLTRAAARRARPPPPASSLSSASPPPEPSPIVSAVTPAVAAASSSSDEYYSPPTTPPLTRRRGGRRPPDCLGPRGPPASDRVPAPGGSVQRMRWTQSINENVMRSYYGATEGGNNLTAYRVRMLSLFQVLEPAVNVSAQRLSDQVRVILRNHMLDDTVLDRLRTEMSDRVITPPSQPVVPAVVPPSSYISFHTDEVSSDTVTNVSNQCNSELRSALECAIREYRNIPPELRPRIPRLPMCNKNRALVAALDSQLSNYFDDCEDLTDTHSIMYCAAVAACRVAHVKFPNSDVATRPKPAVPAWQCRIERRIGGARALIGKLICFREGNTRPRVMRFVRRAFSGTDISPRDYMSRVTERIDFLKQKVYAWANRIRRYKRRVERYTQNRTFRSNERWVYRAWERPDQGVTDARLPDDDTMSSFWRSIWSVPVSHTEGDWTWEVERACDPIPQMGAIDISPQDVARAVRPLPNWKSPGPDGLHNFWIKWFTRSHARLAYQFQSALESGSLPQFLTTGITHLLHKSGSTAEPKNYRPITCLPTVYKVLTSILRSKINSHIDENSIMSPSQNGCRNGSRGTKELLLIDMTISQQVRRSRKDLSTCWIDYRKAYDSVPHTWLLRVLELYKIDATLRTFLMSCMRQWSTVLRYPGCRNIQRNSEPVRIERGIFQGDSLSPLWFCLALNPLSTLLENSGLGYRLKRGGQVISHLLNMDDLKLFAPNNLQLMELLKVTEIFSSAIRMEFGVDKCAVMHVKRGEVVESVSTQLTDSINLRSLSPTETYKYLGMSEALGISITGMKQSLRERFFGRLKKVFNSLLSGGNKVRAFNGWVMPVLMYSFGVLKWTQTELDALDRRVRTLLTAYRMHHPRSSVMRLYIPRKCGGRGFLNAKTLHNREVCSLREYFLAADVGMHRDVVAVDKGLTPLSLANENWRKPIVLDTNDRREVWQSKELHGRFFRALHGPDVDQLASVAWLRFGDLFGETEGFVCAIMDEVIMTNNYRRFIVKDGTVDICRACHRPGESIRHIISGCSRLANGEYLHRHNLVARIIHQQLALKYSLVESEEPYYRYEPDPVLDNGHITLYWDRPIITDRTIVANKPDIVVVDRSERRAMIVDISVPHDENLVKAEKDKQIKYIDLAREVVDMWEVDSAVIVPIVVSANGLKAKSLDQHLRRLSLGDWIKGLIQKAVLLDTARIVRRFLSLEP

SEQ ID NO: 12742 - protein, 868 aa, Mythimna ferrago
MRFVRRAFSGTDVSPRDYLPRITERIDFLRQKVYAWANRIRRYKRRVERYTQNRAFQSNERWVYRAWERPDQSVIDTRLPDDDPMYSFWRSIWSVPVSHTEGDWTRGVERECELIPEMGAITISPQDVARAVRPLPNWKSPGPDELHNFWLKWFKSSHARLASQFQSALESGSLPQFLTTGITHLLHKSGSTAEPKNYRPITCLPTVYKVLTSILRAKINSHIETNSTMSASQNGCRNGSRGTKELLLIDVAISQQVRRSRRDLSTCWIDYKKAYDSVPHTWLMRVLELYKIDVTLRTFLMSCMGQWRTVLHYPGCRRVSENSEPLRIERGIFQGDSLSPLWFCLALNPLSTLLEGSGLGYRLRREGQVISHLLYMDDLKLFASNNLQLMELLKVTETFSSAIRMEFGLDKCAVMHVKRGEIMESVGTQLSDSIHLRSLSSTETYKYLGMLEALGINAADVKQSLRERFFCRLNKVLKSLLSGGNKVRAFNGWVMPVLMYSFGILKWAQTELDALDRRVRTLLTANRMHHPRSSVMRLYIPRKCGGRGFLNAKTLHNREVCSLREYFLETDVGMHRDVVAVDKGLTPLSLANENWRKPIVMDTNERKEVWKGKELHGRFYRALHGPDVDLLASVSWLRFGDLFGETEGFVFAIMDEVMMTNNYRKYIVKDGTVDICRACHRPGESIRHIISGCSHLANGDYLHRHNLVARIIHQQLALKYNLVESEVPYYRYVPDPVLENGSVTLYWDRSIITDRTIVANKPDIVMIDRLERRTMIVDIAVPHDENLVKAEKDKQTKYLDLAREVVDMWEVDRAIIVPIVVTANGLIAKSLDQHLRRLSLGSWIKGLIQKAVLLDTARIVRRFLSQEP

SEQ ID NO: 12743 - protein, 1200 aa, Mythimna ferrago
MLTRAAARRARPPPPASSLSSASPPSEPSLTESAVTPAVAAASSSSDEYYSPPTTPPPTRRRGGRRPPACLGPRGPPASDRVPAAGGSVPRMRWTQSTNENVMRAYYGATEGGNNLTAYRVRMLSLFQVLEPAVNVSAQRLSDQVRVIQRNHMLDDTVLDRLRTEMSDRVITAPSQPLVPVVAPPPSHISFHTDEVSTDTVTNVSTQCNNELRSALECAIREYRNMPLEFRPRLPRLPMRNKNKALVAALDSQLSNYFDDCEDLTDTHSIMYCAAVAACRVAHVKFPNSDVATRPKPAVPAWQCRIERRIGGARALIGKLICFREGNTRPRVMRFVRRAFSGTDINPRDYMSRVTERIDFLKQKVYAWANRIRRYKRRVERYTQNSTFRSNVRWVYRAWERPDQGVTDTRLPDDDAMCLFWRNIWSVPVSHTEGGWTREVERACESITEMGAITISPQDVARAVRPLPNWKSPGPDGLHNFWIKWLQRSHARLASQYQAALESGSLPEFLTTGVTHLLHKSGSTAEPKNYRPITCLPTVYKVLTSILRAKINHHVDNNAIMSASQNGCRNGSRGTKELLLIDMAISQQVRRSRKDLSTCWIDYKKAYDSVPHTWLMRVLELYKVDATLRTFLMSCMRQWRTVLRYPGCRNIQRNSEPVRIERGIFQGDSLSPLWFCLALNPLSTLLENSGLGYRLKRGGQAISHLLYMDDLKLFAPNNLQLMELLKVTETFSSAIRMEFGVDKCAVMHIKRGEIVESVGIQLSDSIHLRSLSPTETYKYLGISEALGINATDMKQSLKERFFGRLKKVLNSLLSGGNKVRAFNGWVMPVLMYAFGVLKWTHTELDALDRRVRTLLTAYRMHHPRSSVMRLYILRKCGGRGFLNAKTLHNREVCSLREYFLAADGGMHRAVVAVDNGLTPLSLANENWRKPVVLDTNVRKEVWQSKELHGRFFRALHGPDVDQLASVAWLRVGDLFGETEGFVCAIMDEVIMTNNYRRFIVKDGTVDICRACHRPGESIRHIISGCSRLANGEYLHRHNLVARIIHQQLALKYSLVESEVPYYRYVPDPVLDSGDITLYWDRYIITDRTIVANKPDIVVVDRRERRAMIVDISVPHDENLVKAEKDKQIKYIDLAREVVDMWNVDSAIIVPIVVSANGLIAKSLDQHLRRLSLSGWIKGLIQKAVLLDTARIVRRFLSLEP

SEQ ID NO: 12744 - protein, 1200 aa, Mythimna ferrago
MLTRAAARRARPPPPASSLSSASPPPEPSLNASAVTPAATVASSSSDEFYSPPTSPPPARRRRGRRPPSSLGPRGPPASDRVPAPGGSVQRMRWTQSINENVMRSYYGATEGGNNLTAYRVRMLSLFQVLEPAVNVSAQRLSDQVRVILRNHMLDDSVLDRLRTEMSDRVITPPSQPVVPVVVPPSSHISFHTDEVSTDMVTNVSTQCNNELRSALECAIREYRNIPPELRPRIPRLPMCNKNRALVAALDSQLSNHFDDCEDLTETHSIMYCAAVAACRVAHVKFPDSDEATRPKSAVPAWQCRIERRIGGARALIGKLICFREGNTRPRVMRFVRRAFSGTNISPRDYMSRVTERIDFLKQKVYAWANRIRRYKRRVERYTQNRTFRSNERWVYRAWERPDQGVTGAHLPEDDAMCSFWRSIWSVPVSHTEGDWTREVERACDPIPQMGAIDISPQDVARAVRPLPNWKSPGPDGLHNFWIKWFTRSHARLAYQFQSALESGSLPQFLTTGITHLLHKSGSTAEPKNYRPITCLPTVYKVLTSILRSKINSHIDENSIMSPSQNGCRNGSHGTKELLLIDMTISQQVRRSRKDLSTCWIDYKKAYDSVPHTWLMRVLELYKVDATLCTFLMSCMRQWRTVLRYPGCRNIQRNSEPVRIERGIFQGDSLSPLWFCLALNPLSTLLENSGLGYRLKRGGQVISHLLYMDDLKLFAPNNLQLMELLKVTETFSSAIRMEFGVDKCAVMHIKRGEIVESVGTQLSDSIHLRSLSPTETYKYLGMSEALGINATDMKQSLRERFFGRLKKVLNSLLSGGNKVRAFNGWVMPVLMYAFGVLKWTQTELDALDRKVRTLLTAYRMHHPRSSVIRLYIPRKCGGRGFLNAKTLHNREVCSLREYFLAADVGMHRDVVAVDKGLTPLSLANENWRKPVVLDTNVRKEVWQSKELHGRFFRALHGPDVDQLASVAWLRVGDLFGETEGFVCAIMDEVIMTNNYRRFIVKDGTVDICRACHRPGESIRHIISGCSRLANGEYLHRHNLVARIIHQQLALKYSLVESEVPYYRYVPDPVLDSGDITLYWDRSIITDRTIVANKPDIVVVDRSERRAMIVDISVPHDENLVKAEKDKQIKYIDLAREVVDMWEVDSAIIVPIVVSANGLIAKSLDQHLRRLSLGDWIKGLIQKAVLLDTARIVRRFLSLEP

SEQ ID NO: 12745 - protein, 1200 aa, Mythimna ferrago
MLTRSRAQQLNTHLTTSGSSLSSASQPPGPAPAVSPEIPEAAVASSSSDEYFSPPTTPPPTRRRGRGRPPACLGPRGPPASDRVPAAGGSVQRMRWTQSINENVMRSYFGATEGGTNLTAYRGRMLSLFQVLEPAVNVSAQRLSDQVRVIQRNRMLDDAVLDRLRLESRNGRVSPVSPPAAVQRQLSVSPRPDYVGEDDDDEAISVSTQCNARLRSALEDAFREYRSIPPELRPRLPRLPMHRKNRALVCALDSQLSNCFDTSEDLTDTHSILYCAAAAACRVAHVKIPNSDRATRPAKPAWQCRIERRIGEARALIGKLICFREGNSRPRVMRFVRRAFSGTDISPRDYLPRITERIDFLRQKVYAWANRIRRYKRRVERYTQNRAFQSNERWVYRAWERPDQSMIDTHLPDDDAMYSFWRSIWSVPVSHTEGDWTREVERECELIPEMGAITISPQDVARAVRPLPNWKSPGPEGLHNFWLKWFKSSHARLASQFQSALASGSLPQFLTTGITHLLYKSGSTAEPKNYRPITCLPTVYKVLTSILRAKINSHIETNSIMSASQNGCRNGSRGTKELLLIDVAISQQVRRSRRDLSTCWIDYKKAYDSVPLTWFMRVLELYKIDVTLRTFLMSCMGQWRTVLHYPGCRRVSENSEPLRIERGIFQGDSLSPLWFCLALNPLSTLLEGSGLGYRLRREGQVISHLLYMDDLKLFASNNLQLMELLKVTETFSSAIRMEFGLDKCAVMHVKRGEIMESVGTQLSDSIHLRSFCSTETYKYLGMSEALGINAADVKQSLRERFFGHLNKVLKSLLSGGNKVRAFNGWVMPVLMYSLGILKWTQTELDALDRRVRTLLTANRMHHPRSSVMRLYIPRKCGGRGFLNAKTLHNREVCSLREYFLETDVGMHRDVVAVDKGLTPLSLANENWRKPIVMDTNERKEVWKGKELHGRFYRALHGPDVDLLASVSWLRFGDLFGETEGFVFAIMDEVMMTNNYRKYIVKDGTVDICRACHRPGESIRHIISGCSHLANGDYLHRHNLVARIIHQQLALKYNLVESEVPYYRYVPDPVLENGSVTLYWDRSIITDRTIVANKPDIVVIDRLERRTMIVDIAVPHDENLVKAEKDKQTKYLDLAREVVDMWEVDRAIIVPIVVTANGLIAKSLDQHLRRLSLGSWIKGLIQKAVLLDTARIVRRFLSQEP

SEQ ID NO: 12746 - protein, 1199 aa, Acronicta aceris
MLTRARARYIEHHTRLTTPDSSPSSALQQPQHGRTSPNAAATASSSSDEYYSPPTSPPPVRRRGGRRPPDRLGPRGPLASGGIPASGGSVQRMRWTRSLNENVMRAYYGATEGGTNLTAYRGRMLSLFQALEPTIDVSTQRLSDQVRVIQRNHMLDDSVLDQLRSEVQSSRAIAHPSQSVAPSATLPQTNLAEVGSDDRVTNVSTQYNEKLRSALEGAFREYRSSPPELRPRLPRLPMNNKNLALVCALDSLLSDYFDSSEDLADTHSILYCAAVAACRVAHVKFPESDRATRPKPMIPAWQSRIEQRIGEARALIGKLICFREGNTRPRVMRFVRRAFSGTNIDPRDYASCVTERIDFLKQKVYAWANRIRRYKRRAERYSLNRTFQGDQRWVYRTWDRPDNGVSDVCRPNDDAMNSFWRNIWSVPVNHTEDDWICDVERACESLPAMDEINISPQDVACAVHSVPNWKAPGPDGLHNFWIKWLRSSHARLASQFQSSLESGTLPQFLTTGITHLLHKSGDTADPKNYRPITCLPTVYKLLTSILRAKICYHIDESSIMSASQNGCRNGSRGTKELLLIDMTISQQVRRLRKNLSTCWIDYKKAYDSVPHTWLMRVLELYKVDVSLRTFLRSCMGQWRTVLHYPGCRQIQRISEPIRIERGIFQGDSLSPLWFCLALNPLSTLLEESRLGYRLWRGGQVISHLLYMDDLKLFASSDLHLMELLKITENFSNSIRMEFGVEKCAVMHVKRGGIVESVGIQLSDSTQLRSLAATETYKYLGMAEALGINVADMKQSLQVRFFGRLTKVLKSLLSGGNKVRAFNGWVMPVLMYSFGVLKWTQTELETLDRKVRTLLTAYRMHHPRSSVMRLYIPRKCGGRGFLNAKNLHNREVCSLREHFLKTEMGMHRDVVAVDNGLTPLSMAKENWRKPVVLSTNDRRNVWQGKELHGRYYRALHEPGVDTLASVSWLRFGDLFGETEGFVCAIMDEVMMTNNYRKFIVKDGTVDICRACHRPGESIRHIISGCSRLANGEYLHRHNLVARIIHQQLALKYNLVESEVPYYKYVPDPVLENGHATLYWDRSIITDRTIIANKPDIVVIDRLERRAMIVDITVPHDENLFKAEKEKEIKYLDLAHEVVDMWGVDAAIIVPIVVSANGLIAKSLDRHLKRLSLGGWIKGLIQKVVLLDTARIVRRFLSLGP

SEQ ID NO: 12747 - protein, 1069 aa, Eilema sororculum
MGEHFKREAGIINNNNNNVIQRNHMLNETVLETLRQECLRNICVTPTPAPAPASTTALNEDSHDARDDTPIPVSIQYNEDIKEALEYALREYRSMPIHVRPRLPRLPLHRRNITLVSALDSLLPKYLENSENLGDTHSILYCTAVAACRMAGAKFPIKDPAIRPKPAIPAWQCRIERRVAEARVLIGKLICFRSGNTRPRVMRYVTRAFAGTNISPQDYTSRVTERIDFLKQKVCAWANRIRRYKKRVDRYTVNRMFQRDQRWVYRSWERTDESVDDLRRPDAEATNAFWRSIWSVPVSHTEGDWMREVERACETIPEMEEIYIDATDVDCAVRSLSNWKSPGPDGLHNFWLKWLRSSHVVLASQFQSAIESGTLPAFMTTGVTHLLHKTGSTLEPNNYRPITCLPTVYKLLTSILRAKINNHINNNSIMCASQNGCRNGARGTKELLLIDMTISQQARRNRKDLAACWIDYKKAFDSVPHTWLLRVLELYKVNTTLCTFLRSCMGQWRTVLLYPGCRQALGSGEPITIERGIFQGDSLSPLWFCLALNPLSTLLVNSGLGYRLRREGQMVSHLFYMDDLKLFAHTNPQLIALLKITETFSNSIKMAFGVDKCAVIHVKRGRVVESEGIQLSDSTNLRSLLVTETYKYLGMSQALCINEAGMKQMLQDRFFGRLKKVLNSLLSGGNKVRACNSWVMPLLMYSFGILKWTQTELDTIDRKVRAQLTAFRMHHPRSSVMRLYIPRKCGGRGFLNAKTLHNREVCNLRDYFLKSNVDMHRDVVNVDTGLTPLGLAKENWRRPTIVGTDSRREVWQSKELHGRFYRALHRPEVDLLASVSWLRFSDLFGETEGFVCAIADEVIKTNNYRKYIMRDGTIDICRACHQPGESLRHITSGCSRLANGEYLHRHNQVARIIHQRLALKYNLVEVEVPYYRYVPEPVLENSHITLYWDRSIITDRTVVANKPDIVVIDRSERRALIVDVTIPHDENLVKAEKDKQVKYLDLAHEIVDMWNVDSAIIVPIVVSVNGLIAKSLDQHLKRLGLDGWVKGQMQKAVLLDTARIVRKFLSLEP

SEQ ID NO: 12748 - protein, 1196 aa, Eilema sororculum
MLTRAKTKIIIQDAHLTPTDSSCSSASQAPGTTSPRPTPVEASSSDEYFSPPTSPTPVRRPGRGRPPTCLGPRRPPASNRAPAAGGNVHRMRWTNSINENVMRAYFAATEGGTNLSAYRSRMLPLFQALEPSVNTSAQRLSDQVRVIQRNHMLNETVLETLRQECLRNICVNPALAPAPASTTALNEDSHVRRDDTPIPVSIQYNEEIKEALEYALREYRSMPIHVRPRLPRLPIHRRNIALVSALDSLLPKYLENSENLGDTHSILYCTAVAACRMAGAKFHIKDPAIRPKPAIPAWQCRIERRVAEARVLIGKLICFRSGNTRPRVMRYVTRAFAGTNISPQDYTSRVTERIDFLKQKVCAWANRIRRYKKRVDRYTVNRMFQRDQRWVYRSWERTDESVDDLRRPDAEATNAFWRSIWSVPVSHTEGDWMREVERACETIPEMEEIYIDATDVDCAVRSLSNWKSPGPDGLHNFWLKWLRSSHVVLASQFQSAIESGTLPAFMTTGVTHLLHKTGSTLEPNNYRPITCLPTVYKLLTSILRAKINNHINNNSIMCTSQNGCRNGARGTKELLLIDMTISQQARRNRKDLVACWIDYKKAFDSVPHTWLLRVLELYKVNTTLCTFLRSCMGQWRTVLLYPGCRQALGSGEPITIERGIFQGDSLSPLWFCLALNPLSTLLVNSGLGYRLRREGQMVSHLFYMDDLKLFAHTNPQLIALLKVTETFSNSIKMAFGVDKCAVIHVKRGRVVESEGIQLSDSTNLRSLLVTETYKYLGMSQALCINEVGMKQMLQERFFGRLKKVLNSLLSGGNKVRACNSWVMPLLMYSFGILKWTQTELDTIDRKVRTQLTAFRMHHPRSSVMRFYIPRKCGGRGFLNAKTLHNREVCNLRDYFLKSNVDMHRDVVNVDTGLTPLGLAKENWRRPTIVGTDSRREVWQSKELHGRFYRALHRPEVDLLASVSWLRFSDLFGETEGFVCAIADEVIKTNNYRKYIMRDGTIDICRACHQPGESLRHITSGCSRLANGEYLHRHNQVARIIHQRLALKYNLVEVEVPYYRYVPEPVLENSHITLYWDRSIITDRTVVANKPDIVVIDRSERRALIVDVTIPHDENLVKAEKDKQVKYLDLAHEVVDMWNVDSAIIVPIVVSVNGLIAKSLDQHLKRLGLDGWVKGQMQKAVLLDTARIVRKFLSLEP

SEQ ID NO: 12749 - protein, 1192 aa, Eilema sororculum
MLTRAQAKRHRNAPTTSPDSSLSSAAQPPAVEPAASSSSSSDEFFSPPTSPTPVRRPGRGRPPTCLGPRRPPASSGAPATGGDVHRMRWTTSINENVMRAYFAATEGGTNLSAYRTRMLPLFQALEPSINTSAQRLSDQVRVIQRNRMLNETVLETLRLECLRNICVTPAPAPAPASTAEINDDTCVAPDDTPIPVSIQYNEEIKEALECALREYRSMPVHVRPRLPRLPIHRRNIALVSALDSLLPRYLENSENLGDTHSILYCTAVAACRMAGAKFPIKDPAIRPKFTIPAWQCRIERRVAEARVLIGKLICFRSGNTRPRVMRYVTRAFAGTDISPQDYTSRVTERIDFLKQKVCAWANRIRRYKKRVDRYTVNRMFQRDQRWVYRSWERTDESVDDVRRPDAEATNAFWRSIWSVPVSHTEGDWMREVERACETIPEMEDIYIDATDVDCAVRSLSNWKSPGPDGLHNFWLKWLRSSHVVLASQFQSAIESGTLPAFMTTGVTHLLHKTGNTLEPNNYRPITCLPTVYKLLTSILRAKINNHINNNSIMCASQNGCRNGARGTKELLLIDMAISQQARRNRKDLTACWIDYKKAFDSVPHTWLLRVLELYKVNTTLCTFLRSCMRQWRTVLFYPGCRQALGGGVPITIERGIFQGDSLSPLWFCLALNPLSALLVNSGLGYRLRREGQMVSHLFYMDDLKLFAHTNPQLIALLKVTETFSNSIKMAFGVDKCAVIHVKRGRVVESEGIQLSDSTNLRSLLVTETYKYLGMSQALCINEVDMKQLLQERFFGRLKKVLNSLLSGGNKVRACNSWVMPLLMYSFGILKWTQTELDTIDRKVRTQLTAFRMHHPRSSVMRLYIPRKCGGRGFLNAKTLHNREVCNLRDYFLKSNVDMHRDVVNVDTGLTPLGLAKENWRRPTIVGTDSRREVWQSKELHGRFYRALHRPEVDLLASVAWLRFSDLFGETEGFVCAIADEVIKTNNYRKYIMRDGTIDICRACHQPGESLRHITSGCSRLANGEYLHRHNQVARIIHQRLALKYNLVEVEVPYYRYVPEPVLENSHITLYWDRSIITDRTVIANKPDIVVIDRSERRALIVDVTIPHDENLVKAEKDKQVKYLDLAHEVVDMWNVDSAIIVPIVVSVNGLIAKSLDQHLKRLGLDGWVKGQMQKAVLLDTARIVRKFLSLEP

SEQ ID NO: 12750 - protein, 975 aa, Eilema sororculum
MPVHVRPRLPRLPIHRRNIALVSALDSLLPRYLENSENLGDTHSILYCTAVAACRMAGAKFPIKDPAIRPKFTIPAWQCRIERRVAEARVLIGKLICFRSGNTRPRVMRYVTRAFARTDISPQDYTSRVTERIDFLKQKVCAWANRIRRYKKRVDRYTVNRMFQRDQRWVYRSWERTDESVDDVRRPDAEATNAFWLSIWSVPVSHTEGDWMREVERACETIPEMEEIYIDATDVDCAVRSLSNWKSPGPDGLHNFWLKWLRSSHVVLASQFQSAIESGTLPAFMTTGVTHLLHKTGSTLEPNNYRPITCLPTVYKLLTSILRAKINNHINNNSIMCASQNGCRNGARGTKELLLIDMAISQQARRNRKDLTACWIDYKKAFDSVPHTWLLRVLELYKVNTTLCTFLRSCMRQWRTVLFYPGCRQALGGGVPITIERGIFQGDSLSPLWFCLALNPLSALLVNSGLGYRLRREGQVVSHLFYMDDLKLFAHTNPQLIALLKVTETFSNSIKMAFGVDKCAVIHVKRGRVVESEGIQLSDSTNLRSLLVTETYKYLGMSQALCINEVDMKQLLQERFFGRLKKVLNSLLSGGNKVHACNSWVMPLLMYSFGILKWTQTELDTIDRKVRTQLTAFRMHHPRSSVMRLYIPRKCGGRGFLNAKTLHNREVCNLRDYFLNSNVDMHRDVVNVDTGLTPLGLAKENWRRPTIVSTDSRREVWQSKELHGRFYRALHRPEVDLLASVAWLRFSDLFGETEGFVCAIADEVIKTNNYRKYIMRDGTIDICRACHQPGESLRHITSGCSRLANGEYLHRHNQVARIIHQRLALKYNLVEVEVPYYRYVPEPVQENSHITLYWDRSIITDRTVVANKPDIVVIDRSERRALIVDVTIPHDENLVKAETDKQVKYLDLAHEVVDMWNVNSAIIVPIVVSVNGLIAKSLDQHLKRLGLDGWVKGQMQKAVLLDTARIVRKFLSLEP

SEQ ID NO: 12751 - protein, 1102 aa, Ptilodon capucinus
MRAYYEATEGGTNLTAYRNRMLPLFQSLEPAVNVSAQRLSDQVRVIQRGNMLADTVLDRLRSEMQSRRVVPVASSQPAAQPVASATVTSRLAADSDVDRDNAPINVSNQYNELLRSTLEDVVRVYRSMPNHLRPRIPRLPMHKGNRALVGALDSLLSIYFDSSDNLADTHSILYCAAITVCRVARVKVFNTDTATRPKPAVPAWQCRIERRISEARALIGKLSCFREGNTRPRVMRFVKRAFAGTDVSPREYISRVTERIDFLKQKIYAWANRIRRYKVRVDRYSQNSMFQRDQRWVYRSWERPSEPVSELQRPDDNATTTFWRDIWSVPVTHYEGDWIGDVERMCEPIKEMEAISIGPLDVANAVRFLPNWKAPGPDGLHNFWLKWLRSSHVRLASQFQSALQSGSLPEFITTGVTHLLHKTGSTTDPKNYRPITCLPTIYKTLTSILRAKIARHVEDNSIMSASQNGCRSGSRGTKELLLIDMTICQQARRNRKDLSTCWIDYKKAYDSVPHTWLVRVLELYKIDTTLRTFLESCMRQWKTVLLCPGSRQILGNGEPIRIERGIFQGDSLSPLWFCLALNPLSTLLEESGFGFRLRRGCQVISHLLYMDDLKLFAPTALQLTGLLKVTETFSNSIRMEFGVDKCAVMHAKQGRLVESEGIQLSDSIQLRSLAATETYKYLGMSQGLGISETDMKQLLRDRFLGRLKKVLKSLLSGGNKVRAYNGWVMPVLMYSFGILKWTQTELDTLDRTVRTTLTSYRMHHPRSSVMRLYIPRKCGGRGFLNVKTLHNREICSLREYFLRADGEMHVDVVAVDNGLTPLSLAKENWRKPVVLTTDDRRLVWQGKELHGRYYRALHGPDVDLAASVAWLRFGDLFGETEGFVCAIMDEVVMTNNYRKYILRDGTIDICRACHRPGESLRHIISGCSRLANGQYLHRHNQVARIIHQQLALKYRLVTSEVPYYRYEPQPVLEEGHISLYWDRSIITDRTIVANKPDIVLIDRQERRAMIVDITVPHDENLVKAEKDKESKYLDLAHEVVDMWDIDAAIIVPIVVSAHGLLAKSLDKHLKRLALGGWIKGQIQKAVLLETARIVRKFLSLEP

SEQ ID NO: 12752 - protein, 975 aa, Ptilodon capucinus
MPNHLRPRIPRLPMHKGNRALVGALDSLLSIYFDSSDNLADTHSILYCAAITVCRVARVKVFNTDTATRPKPAVPAWQCRIERRISEARALIGKLSCFREGNTRPRVMRFVKRAFAGTDVSPREYISHVTERIDFLKQKIYAWANRIRRYKVRVDRYSQNSMFQRDQRWVYRSWERPSEPVSELQRPDDNATTTFWRDIWSVPVTHYEGDWIGDVERMCEPIKEMEAISIGPLDVANAVRSLPNWKAPGPDGLHNFWLKWLRSSHVRLASQFQSALQSGSLPEFITTGVTHLLHKTGSTTDPKNYRPITCLPTIYKTLTSILRAKIARHVEDNSIMSASQNGCRSGSRGTKELLLIDMTICQQARRNRKDLSTCWIDYKKAYDSVPHTWLVRVLELYKIDTTLRTFLESCMRQWKTVLLCPGSRQILGNGEPIRIERGIFQGDSLSPLWFCLALNPLSTLLEESGFGFRLRRGGQVISHLLYMDDLKLFAPTALQLTGLLKVTETFSNSIRMEFGVDKCAVMHAKQGRLVESEGIQLSDSIQLRTLAATETYKYLGMSQGLGISETDMKQLLRDRFLGRLKKVLKSLLSGGNKVRAYNGWVMPVLMYSFGILKWTQTELDTLDRTVRTTLTSYRMHHPRSSVMRLYIPRKCGGRGFLNVKTLHNREICSLREYFLRADGEMHVDVVAVDNGLTPLSLAKENWRKPVVLTTDDRRLVWQGKELHGRYYRALHGPDVDLAASVAWLRFGDLFGETEGFVCAIMAEVVMTNNYRKYILRDGTIDICRACHRPGVSLRHIISGCSRLANGQYLHRHNQVARIIHQQLALKYHLVTSEVPYYRYEPQPVLEEGHISLYWDRSIITDRTIVANKPDIVLIDRQERRAIIVDITVPHDENLVKAEKDKESKYLDLAHEVVDMWDIDAAIIVPIVVSAHGLLAKSLDKHLKRLALGGWIKGQIQKAVLLETARIVRKFLSLEP

SEQ ID NO: 12753 - protein, 934 aa, Hydraecia micacea
MSMSILYCAAVAACRVAHVKFPNSDRAPRPKPAVPAWQCRIECRIGEARALIGKLICFREGNTRPRVMRFVRRAFSGTDITRDYLSRVTERIDFLKQKICAWANRIRRYRRRVERYTQNRRFQSDERWVYRAWERPDQGVTDTRLPDDDAMCSFWRNIWSVPVSHTEGDWTGKIERACDLIPEMEALIISPQDVARAVRPLPNWKSPGPDGLHNFWIKWFKRSHVRLASQFQSALESGSLPQFLTTGITHLLYKSGSTADPKHYRPITCLPTVYKVLTSILRAKVNKHIDTNSIMSVSQNGCKNWSRGTKELLLIDMTINQQVRRSRKDLSTCWIDYKKAYDSVPYTWLMRVLELYKIDTTLCTFLMSCMGQWRTVLRYPGCRNIQRNSEPIRIERGIFQGDSLSPLWFRLALNPLSTLLEDSGLGYRLRRGGQVISHLLYMDDLKLFAPNNLQLMELLKITETFSSAIRMEFGVDKCAVMHVKRGEIVESVGNQLSDSTNLRALSASDTYKYLGMSEALGINVTDMKQSLKERFFGRLKKVFNSLLSGGNKVRAFNDWVMPVLMYSFGILKWTQTELDALDRKVRTLLTANRMHHPRSSVMRLYIPRKCGGRGFLNAKTLHNREICSLREYFLETDVGMHRDVVVVDNGLTPLSLGKENWRKPVVLDTNDRMEVWQSKELHGRFFRALHGPDVDLLASVAWLRFGDLFGETEGFVCAIMDEVMMTNNYRRFIVKDGTVDICRACHRPGESIRHIISGCSRLANGEYLHRHNLVARIIHQQLALKYSLVESEVPYYRYVPDPVLENGNITLYWDRSIITDRTIVANKPDIVVMDRLERRAMIVDITIPHDENLVKAEKDKQIKYLDLAREVVDMWDVDSAIIVPIVVTANGLIAKSLDQHLRRLSLASWIKGLIQKAVLLDTARIVRRFLSLEP

SEQ ID NO: 12754 - protein, 1098 aa, Hydraecia micacea
MRAYFGATEGGSNLTAYRGRMLSLFQVLEPAVNVSAQRLSDQVRVIQRNHMLDNVVLDRLRLESRNSHVTPASSLVAVQLQPSVPLRPDCVDVEDDDEAISVSSQCNARLRSALEDAFREYRSIPPGLRPRLPRLPMHKKNKALVCALDSQLSNCFNDSKDLADTHSILYCAAVAACRVAHVKFPNSDRAPRPKPAVPAWQCRIECRIGEARALIGKLICFREGNTRPRVMRFVRRAFSGTDISSRDYLSRVTERIDFLKQKICAWANRIRRYRRRVERYTQNRRFQSDERWVYRAWERPDQGVTDTRLPDDDAMCSFWRNIWSVPVSHTEGDWTGKIERACDLIPEMEALIISPQDVARAVRPLPNWKSPGPDGLHNFWIKWFKRSHDRLASQFQSALESGSLPQFLTTGITHLLYKSGSTADPKNYRPITCLPTVYKVLTSILRTKINKHIDTNSIMSVSQNGCKNGSRGTKELLLIDMTINQQVRRSRKDLSTCWIDYKKAYDSVPHTWLMRVLELYKVDTTLCTFLMSCMGQWRTVLRYPGCRNIQRNSEPIRIERGIFQGDSLSPLWFCLALNPLSTLLEDSGLGYRLRRGGQVISHLLYMDDLKLFAPNNLQLMELLKITETFSSAIRMEFGVDKCAVMHVKRGEIVESVGNQLSDSTNLRALSASDTYKYLGMSEALGINVTDMKQSLKERFFGRLKKVFNSLLSGGNKVRAFNDWVMPVLMYSFGILKWTQTELDALDRKVRTLLTANRMHHPRSSVMRLYIPRKCGGRGFLNAKTLHNREICSLREYFLETDVGMHRDVVVVDNGLTPLSLGKENWRKPVVLDTNDRMEVWQSKELHGRFFRALHGPDVDLLASVAWLRFGDLFGETEGFVCAIMDEVMMTNNYRRFIVKDGTVDICRACHRPGESIRHIISGCSRLANGEYLHRHNLVARIIHQQLALKYSLVESEVPYYRYVPDPVLENGNITLYWDRSIITDRTIVANKPDIVVMDRLERRAMIVDITIPHDENLVKAEKDKQIKYLDLAREVVDMWDVDSAIIVPIVVTANGLIAKSLDQHLRRLSLASWIKGLIQKAVLLDTARIVRRFLSLEP

SEQ ID NO: 12755 - protein, 1203 aa, Amphipyra tragopoginis
MLTRSRAKTQGTRLPSSASSLSSASQPPEPASTVSDVTPAAAVASSSSDEYFSPPTSPPPRRRGRGRPPASLGPRGPPASDRVPAAGGSVQRMRWTQSMNENCMRAYFGATEGGTNLTAYRGRMLSLFQALEPAVNVSAQRLSDQVRVIQRDHRLDDAALDRLRSEVQSSHVISLQSQTAVQLQVPTVVPPRSIFADEESDDRVTNVSTQCSDQLRSALELAIREYRSTPPDLRPRLPRLPMNKRNRALMCALDSLLSSYFDGSEDLADAHSILYCAAVAACRVARVKFDNNDRATRPKPAVPAWQCRIERRIGEARALIGKLICFREGNTRPRVMRFVRRAFSGTDTSPRDYMSRVTERIDFLKQKVYAWANRIRRYKRRVERYTQNRMFQRDQRWVYRAWERSDQGVGDAHLPDDDAMNSFWRSIWSVPVSHTEGGWMRDVERVCEPILDMGAISISPQDVASAVRPLPNWKSPGPDGLHNFWLKWLRSSHARLASHFQSSLETGTLPQFLTTGVTHLLHKSGSTAEPKNYRPITCLPTVYKLLTSILRRKISCHIENNSIMSASQNGCRNGSRGTKELLLIDMAISQQVRRSRKDLSTCWIDYKKAYDSVPHTWLMRVLELYKVNTTLCTFLTSCMGQWRTVLRYPGCRQIQGIGEPIRIERGIFQGDSLSPLWFCLALNPLSTLLEGSGLGYRLRRGGQVISHLLYMDDLKLFAPNNLQLLELLKVTETFSNAISMEFGVDKCAVMHVKRGRIMESVGTQLSDSINLRSLSSTETYKYLGMSEALGINEAGMKQSLRERFYGRLKKVLKSFLSGGNKVRAFNGWVMPVLMYSFGILKWTQTELDALDRRVRTLLTAYRMHHPRSSVMRLYIPRKCGGRGFLNAKTLHNREVCSLREYFSQADVGMHRDVVAVDKGFTPLSLAKENWRKPVVLDTNGRKEVWRSKELHGRFYRALHGPDVDFLASVAWLRFGDLFGETEGFVCAIMDEVMMTNNYRKYVVKDGTVDICRACHCPGESIRHVVSGCSRLANGEYLHRHNLVARIIHQQLALKYNLVDAEVPYYKYVPDPVLENGHVTLYWDRSIITDRTIVANKPDIVVIDRSERRAMIVDITVPHDENLVKAENEKKIKYLDLAREVVDMWEIDSAVIVPIVVTANGLIAKSLDQHLMRLSLGSWIKGLIQKAVLLDTARIVRKFFSLEP

SEQ ID NO: 12756 - protein, 1204 aa, Amphipyra tragopoginis
MITRSRAKTQSTQPPPSASSLSSAPQPPEPTSTVSDVTPAAAVASSSSDEYYSPPTSPPPARRRGRGRPPACLGPRGPPASDRVPASGGSVQRMRWTQSMNENCMRAYFGATEGGTNLTAYRGRMLSLFQALEPAVNVSAQRLSDQVRVIQRDHRLDGAALDRLRSEMQSSHVVPLQSQTAVQSEVPSVVAPRSIPADEESDDRVTNVSTQSNEQLRSALELAFREYRSTLPDLRPRLPRLPMNNKNKALMCALNSLLSSYFDGSEDLADTHSILYCAAVAACRVAHVKVDNNDRATRPKPAVPAWQCRIERRIGEARALIGKLICFREGNTRPRVMRFVRRAFSGTDTSPRDYMSRVAERIDFLKQKVYAWANRIRRYKRRVERYTQNRMFQRDQRWVYRAWERPDQGVRDVHLPDDDAMNSFWRSIWSVPVSHAEGDWMRDVERVCEPILDMGAISISPQDVASAVRPLPNWKSPGPDGLHNFWLKWLRSSHARLASQFQSSLETGTLPQFLTTGVTHLLHKSGSTAEPKNYRPITCLPTVYKLLTSILRCKISSHIENNSIMSASQNGCRNGSRGTKELLLIDMAISQQVRRSRKDLSTCWIDYKKAYDSVPHTWLLRVLELYKVNATLCAFLTSCMGQWRTVLRYPGCRQIQGRGEPIRIERGIFQGDSLSPLWFCLALNPLSTLLEGSGLGYRLRRGGQVISHLLYMDDLKLFAPNNLQLMELLKVTETFSNSMRMEFGVDKCAVMHVKRGRIMESVGTELSDSIHLRSLSSTETYKYLGMSEALGINEADMKQSLRERFYGRLKKVLKSLLSGGNKVRAFNGWVMPALMYSFGILKWTQTELDALDRRVRTLLTAYRMHHPRSSVMRLYISRKCGGRGFLNAKTLHNREVCSLREYFSQADVGMHRDVVAVDKGLTLLSLAKENWRMPVALDTNGRKDVWRSKELHGRFYRALHGPDVDFQASVAWLRFGDLFGETEGFVCAIMDEVMMTNNYRKYVVKDGTVDICRACHCPGESIRHIVSGCSRLANGEYLHRHNLVARIIHQQLALKYNLVDAEVPYYKYVPDPVLENGHVTLYWDRSIITDRTIVANKPDIVMIDRSERRAMIVDITVPHDENLVKAENDKKIKYLDLAHEVVDMWNVDSAVIVPIVVSANGLIAKSLNQHLMRLSLGSWIKGLIQKAVLLDTARIVRKFLSLGP

SEQ ID NO: 12757 - protein, 1111 aa, Amphipyra tragopoginis
MRWTQSMNENCMRAYFGATEGGTNLTAYRGRMLSLFQTLEPAVNVSAQRLSDQVRVIQRDHRLDDAALGRLRDEMQNSHATPPPSQIRTQPLVPPAVPLQPNHADEEEQDRAISAGTQYSEIMRSALEDALREFRSTPPELRPRLPRLPMHNKNRALVCALDSLLSNVLESSKDIGDAHSILYCAAVAACRVAHVKFPNDNRATRPKSTVPAWQCRIERRIDEARVLIGKLTCFREGNIRPRVMRFVRRAFSGTDVSPGEYVSRVTERIDFLKQKVYAWANRIRRYRRRVDRYTQNRIFQSDQRWVYRTWERPDQGVSDTHLPDNDVMNAFWRNIWSVPVTHTEGDWMQEVQRACEPIQEMGAVTIGPQDVTSAVRPMPNWKSPGPDGLHNFWIKWLRSSHARLASQFQSSLESGSLPSFLTTGVTHLLFKSGSTAEPKNYRPITCLPTVYKLLTSILRAKINNHIDNNAIMSDSQNGCRNGSRGTKELLLIDMAISQQVRRSRKDLSTCWIDYKKAYDSVPHTWLMRVLELYKINATLRTFLMSCMGQWRTVLHYPGCRQIQGNGELIRIERGIFQGDSLSPLWFCLALNPLSTLLEGSGLGYRLRRGGQVISHLLYMDDLKLFAPNNLQLVELLKVTETFSNSIRMEFGVDKCAVMHVKRGRIMESVGTQLSDAIHLRSLSSTETYKYLGMSEALGINEADMKQSLKERFFGRLIKVLKSLLSGGNKVRAFNGWVMPVLMYSFGILRWTQTELDALDRRVRTLLTAYRMHHPRSSVMRLYIPRKCGGRGFLNAKTLHNREVCSLREYFSQADVGMHRDVVAVDKGLTPLSLAKENWRKPVVLDTNGRREVWRSKELHGRFYRALHGPDVDFLASVAWLRFGDLFGETEGFVCAIMDEVMMTNNYRKYIVKDGTVDICRACHCPGESIRHIVSGCSRLANGEYLHRHNLVARIIHQQLALKYNLVDTEVPYYKYVPDPVLENGHVTLYWDRSIITDRTIVANKPDIVVIDRLERRTVIVDIAVPHDENLVKAENDKKIKYLDLAHEVVDMWDVDSAVIVPIVVTANGLIAKSLDQHLMRLSLGSWIKGLIQKAVLLDTARIVRKFLSLEL

SEQ ID NO: 12758 - protein, 1215 aa, Amphipyra tragopoginis
MLTRARTRQIAKKIMLTRARTREARPPPPDSPLSSASQPPESSPTVSAVTSAAAVASSSSDEYFSPPTSPTPVRRQGRRRPPNSLGPRGPPAPSRVLATGGCVQRMKWTQSINENVMRAYYGSTEGGTNLTAYRVRMLTLFQELEPAINVSAQRLSDQVRVIQRNHRLDDAALDRLRLEVQNSRVTPVPSQTAVHHININVVPPRSDCVDGDVDDRAVTVSSQYSDRLRSALEDAIREYRANPELRPRLPRLPMHNKNRALVCALDSLLSSYFESSEDLVDTHSILYCAAVAACRVANVKFNNSERATRPKPAIPAWQCRIERRIDGARALIGKLICFREGNTRPRVMRFVRRAFSGTGISPREYMSQVTERIDFLKQKVCAWASRIRRYKRRVERYAQNRMFQCDQRWVYRAWERPDQGVSDGRLPDDDAMSSFWRSIWSVPVTHTEGDWTRDIERACEPIEEMGEILISPQDVASAARPLPNWKSPGPDGLHNFWIKWLRSSHARLASQFQSSLESGSLPQFLTTGVTHLLHKSGSTAEPKNYRPITCLPTVYKLLTSILRTKINTHVENNSIMSPSQNGCRNGSRGTKELLLIDMAISQQVRRSRKNLSTCWIDYKKAYDSVPHTWLMRVLELYKINATLRTFLTSCMRQWRTVLRYPGCRPILGSGEPISIERGIFQGDSLSPLWFCLALNPLSTLLEGSGLGYPLRRGGQVVSHLLYMDGLKLFAPTKLQLVELLKVTETFSNSIRMEFGVDKCAVMHVRRGGIMESEGLQLSDSIHLRSLSANDTYKYLGMSEGLGISEADMKQSLRERFFGRLKKVLKSLLSGGNKVRAFNGWVMPVLMYSFGILKWTQTELDALDRRVRTLLTANRMHHPRSSVMRLYIPRKCGGRGLLNAKTLHNREVCSLREYFLHADAGMHRDVVAVDKGLTPLNLAKENWRKPVVLSTNDRREVWQSKELHGRFYRALHGPDVDFLASVSWLRFGDLFGETEGFVCAIMDEVIMTNNYRKYIVKDGTVDICRACHCPGESLRHIISGCSRLANGEYLHRHNQVARIIHQQLALRYNLVESEVPYYKYVPDPVLENGHITLYWDRSIITDRTIVANKPDIVVIDRSERRTMIVDVTIPHDENLVKAEKDKQIKYLDLAHEVVNMWDVDSATIVPIVVTANGLMAKSLDQHLKRLSLGGWIKGLIQKAVLLDTARIVRRFLSLEP

SEQ ID NO: 12759 - protein, 1205 aa, Amphipyra tragopoginis
MLTRSRAKTQQSTHLPPSASSLSSASQPPEPASIVSDVTPAAAVASSSSDEYFSPATTPPPARRRGRGRPPACLGPRGPPASDRVPAPGGSVQRMRWTQSMNENCMRAYFGATEGGTNLTAYRGRMLSLFQALEPAVNVSAQRLSDQVRVIQRDHRLDDAALDRLRNEMQNSHVTPLPAQIRTQPLVPLAVPLEPNHGDEEEEDRAISAGTQCSELMRSALEDALREFRSTPPELRPRLPRLPMHNKNRALVCALDLLLSNVFESSEDLGDTHSILYCAAVAACRVAHVKFPNDNRATRPKSAVPAWQCRIERRIDEARVLIGKLTCFREGNRRPRVMRFVRRAFSGTDIGPGEYVSRITERIDFLKQKVYAWANRIRRYRRRVDRYTQNRIFQSDQRWVYRTWERPDQGVSDAHLPDNDVMNAFWRNIWSVPVTHTEGDWMQEVQRACEPIQEMGAITIGPQDVASAVRPMPNWKSPGPDGLHNFWIKWLRSSHARLASQFQSSLESGSLPSFLTTGVTHLLFKSGSTAEPKNYRPITCLPTVYKLLTSILRAKLNHHIDSNAIMCATQNGCKNGSRGTKELLLIDMAISQQVRRSRKDLSTCWIDYKKAYDSVPHTWLMRVLELYKINATLRTFLMSCMGQWRTVLHYPGCRQIQGNGELIRIERGIFQGDSLSPLWFCLALNPLSTLLEGSGLGYRLRRGGQVISHLLYMDDLKLFAPNNLQLLELLKVTETFSNSIRMEFGVDKCAVMHVKRGRIMESVGTQLSDFIHLRSLSSTETYKYLGMSEALGINEADMKQSLRERFFGRLIKVLKSLLSGGNKVRAFNGWVMPVLMYSFGILRWTQTELDALDRRVRTLLTAYRMHHPRSSVMRLYIPRKCGGRGFLNAKTLHNREVCSLREYFSQADVGMHRDVVAVDKGLTPLSLAKENWRKPVVLDTNGRRDVWRSKELHGRFYRALHGPDVDFLASVAWLRFGDLFGETEGFVCAIMDEVMMTNNYRKYIVKDGTVDICRACHCPGESIRHIVSGCSRLANGEYLHRHNLVARIIHQQLALKYNLVDTEVPYYRYVPDPVLENGHVTLYWDRSIITDRTIVANKPDIVVIDRLERRTMIVDITVPHDENLVKAENDKKIKYLDLAHEVVDMWDVDSAVIVPIVVTANGLIAKSLDQHLMRLSLGSWIKGLIQKAVLLDTARIVRKFLSLES

SEQ ID NO: 12760 - protein, 1203 aa, Amphipyra tragopoginis
MLTRARAREKVARPRSPDPSLRSASQPPESSPSVSAVTPAAAVASSSSDEYFSPPSSPPPVRRRGGARPPACLGPQGQPASNRVPAAGGNVSRMRWTQSINENVMRAYYGATEGGINLTAYRDRMLLLFRVLEPAINVSTQRLSDQVRVIQRNRRLDDTVLERLRSEVQNNRAVTPPVQAVVQAQLPAVPPRPSHGDGEGDSEVIEVSNQCSDELRSALEGAILEYRATPPELRPRLPRLPMHKKNRALVCALDSLLSNYFDGSEDLADTHSILYCAAIAACRVAHVKFTDNERATRPKPAVPAWQCRIERRIGGARALIGKLICFREGNTRPRVMRFVRRAFSGTGISPRDYMSRITERIDFLKQKVYAWANRIRRYKRRVERYTLNRTFQSDQRRVYRTWERPDPCGSDVRLPDDEAMSSFWRSIWSVPVAHTEGGWMRDIERACESIPEMGAIIISPQDVAGAARPLPNWKSPGPDGLHNFWLKWLRSSHACLASQFQSSLESGSLPQFLTTGATHLLYKSGSTAEPKNYRPITCLPTVYKLLTSILRVKISNHIDNNSIMSASQNGCRNGSRGTKELLLIDMTISQQVRRSRKDLSTCWIDYKKAYDSVPHAWLMRVLELYKINATLRTFLMSCMRQWRTVLRYPGCREIRGRGEPVRIERGIFQGDSLSPLWFCLALNPLSTLLEGTRLGYRLRREGQVISHLLYMDDLKLFAPTDLRLMELLKVTENFSSSIRMEFGVDKCAVMHVKRGRIVESEGTQLSNSIQLRSLSPTETYKYLGMSEALGISEADVRQSLRERFFGRLNKVLRSLLSGGNKVRAFNGWVMPVLMYSFGILKWTQTDLDALDRRVRALLTTHRMHHPRSSVMRLYIPRKCGGRGFLNAKTLHNREVCSLREYFLQAEGEMHRDVVAVDKGLTPLALAKENWRKPAVLSTNDREEVWQSKELHGRFYRALHGPDVDFPASVSWLRFGDLFGETEGFVCAIMDEVMMTNNYRRYIVKDGTVDICRACHRPGESIRHIVSGCSRLANGEYLHRHNLVARIIHQQLALKYNLVESEVPYYRYVPDPVLENGHVTLYWDRSIITDRTIVANKPDIVVIDRSERRTMIVDITVPHDENLVKAEKDKQIKYLDLAHEVVGMWDVDSAVIVPIVVTANGLIAKSLDQHLKRLSLGGWIKGLMQKAVLLDTARIVRRFLSLEP

SEQ ID NO: 12761 - protein, 1206 aa, Amphipyra tragopoginis
MLTRSRAKAQNTRPPSSVSSLSSASQPPEPASIVSDVTPAAAVASSSSDEYFSPATSPSPPPARRRGRGRPPTCLGPRGPPASDRVPAPGGSVQRMRWTQSMNENCMRAYFGATEGGTNLTAYRGRMLSLFRALEPAVNVSAQRLSDQVRVIQRDHRLDDAALDRLRSEMQNSHAAPLPSQIRTQTLVPPAVPLESNYADEEGEDRAISAGTQYSEIMRSALEDALREFRSTPPELRPRLPRLPMHNKNRALVCALDSLLPNVFESSEDLGDTQSILYCAAVAACRVAHVKFPNDNRATRPKSAVPAWQCRIERRIDEARVLIGKLTCFREGNRRPRVMRFVRRAFSGTDIGPGEYATRVTERIDFLKQKVYAWANRIRRYRRRVDRYTQNRIFQSDQRWVYRTWERPDQGVSDTRLPDNDVMNAFWRNIWSVPVTHTEGDWMQEVQRACEPIQEMGAVTIGPQDVTSAVRPMPNWKSPGPDGLHNFWIKWLRSSHARLASQFQSSLESGSLPAFLTTGITHLLFKSGSTAEPKNYRPITCLPTVYKLLTSILRAKLNHHIDSNAIMCATQNGCKNGSRGTKELLLIDMAISQQVRRSRKDLSTCWIDYKKAYDSVPHTWLMRVMELYKVNATLRTFLMSCMGQWRTVLHYPGCRQIQGNGELIRIERGIFQGDSLSPLWFCLALNPLSTLLEGSGLGYRLRRGGQVISHLLYMDDLKLFAPNNLQLLELLKVTETFSNSIRMEFGVDKCAVMHVKRGRIMESVGTQLSDSIHLRSLSSTETYKYLGMSEALGINEADMKQSLRERFFGRLIKVLKSLLSGGNKVRAFNGWVMPVLMYSFGILRWTQTELDALDRRVRTLLTAYRMHHPRSSVMRLYIPRKCGGRGFLNAKTLHNREVCSLREYFSQADVGMHRDVVAVDKGLTPLSLAKENWRKPVVLDAKGRMEVWRSKELHGRFYRALHGPDVDFLASVAWLRFGDLFGETEGFVCAIMDEVMMTNNYRKYIVKDGTVDICRACHCPGESIRHIVSGCSRLANGEYLHRHNLVARIIHQQLALKYNLVDTEVPYYKYVPDPVLENGHVTLYWDRSIITDRTIVANKPDIVVIDRLERRTMIVDITVPHDENLVKAENDKKIKYLDLAHEVVDMWDVDSAVIVPIVVTANGLIAKSLDQHLMRLSLGSWIKGLIQKAVLLDTARIVRKFLSLEP

SEQ ID NO: 12762 - protein, 1112 aa, Amphipyra tragopoginis
MKWTQKINESVMRAYYGATEGGTNLTAYRGRMLSLFQVLEPAVNVSAQRLSDQVRVIQRGHMLDDTVLDRIRSEVQSSSVISPSPQVLEQSQNLAATLSRPNPADEEDDDRATNVSTQCNEELRSALEDALREYRYTRSDLRPRIPRLPMHRKNRALMSALDSLLSNYFDGSEDLDDTHSILYCAAVAACRVAHVKFMDNERVTRPKNAVPAWQCRIERRIAEARALIGKLVCFREGNTRPRVMRFVRRAFSGTDVSPREYNMSRVTERIDFLKQKVYAWANRIRRYRRRVDRYTQNRLFQSDERWVYRTWERPDQRVSDTHLPDNDVMNAFWRNIWSVPVTHTEGDWMQEVQRACEPIQEMGDIIISPQDVASAVRPMSNWKSPGPDGLHNFWLKWLRSSHARLASQFQSSLESESLPQFLTTGVTHLLHKSGSTAEPKNYRPITCLPTVFKLLTSILRSKINFHIENNCIMSPSQNGCRNGSRGTKELLLIDMAISQQVRRSRKDLSTCWIDYKKVYDSVPHTWLMRVLELYKVNTTLCAFLTSCMRQWRTVLRYPGCRQIQGIGEPIRIERGIFQGDSLSPLWFCLALNPLSTLLEGSRLGYRLRRGGQVLSHLLYMDDLKLFAPNKLQLLELLKVTETFSNSIRMEFGVDKCAVMHVKRGRIMESVGTQLTDSIHLRSLSSTETYKYLGMSEALGINETDMKQSLRERFYGRLKKVLKSLLSGGNKVRAFNGWVMPVLMYSFGILKWTQTELDALDRRVRSLLTANRMHHPRSSVMRLYIPRKCGGRGFLNAKTLHNREVCSLREYFSQADVGMHRDVVAVDKGFTPLSLAKENWRKPVVLDTNDRREVWRSKELHGRFYRALHGPDVDFLAFVAWLRFGDLFGETEGFVCAIMDEVMMTNNYRKYIVKDGTVDICRACHCPGESIRHIVSGCSRLANGEYLHRHNLVARIIHQQLALKYNLVNAEVPYYKYVPDPVLENGHVTLYWDRSIITDRTIVANKPDIVVIDRSERLTMIVDITVPHDENLVKAEKDKEIKYQDLAHEVVAMWDVDSAIIVPIVVTANGLIAKSLDQHLKRLSLGGWIKGLIQKAVLLDTARIVRRFLSLRP

SEQ ID NO: 12763 - protein, 1197 aa, Noctua pronuba
MLTRAAARRARLSPPDPSLSSASPLPESSPIVSAVTPTVAVASSSSDEYFSPPTTPPPVRRRRGRRPPDGLGPRGPPASDRVPALGGSVQRMRWTQSINENVMRSYYGATEGGNNRTAYRVRMLSLFQVLEPAVNVSAQRLSDQVRVIQRNRMLDDTVLDRLRTEMQSSHVITPSAQAVVLPQSNTIPNRANDESNDMVTNVSTQCNEEIRSALEGAIREYRSMQPDLRPRIPRLPMHNKNRALVAVLDSQLSNYFDNCEDLTDAHSILYCAAVAACRVAHVKFSDDRATRPKPAVPAWQYRIERRIGGARALIGKLICFREGNTRPRVMRFVRRAFSGTNISPRDYMSRVTERIDFLKQKVYAWANRIRRYKRRVDRYTQNRTFQRDERWVYRAWERPDQGVADTRLPDDNAMCSFWRSIWSVPVSHTEDEWTREVERACDPVQEMGAITISPQDVVCAVRPLPNWKSPGPDGLHNFWIKWFTRSHARLATLFQSALESGSRPEFLTTGITHLLHKSGSTAEPKNYRPITCLPTVYKVLTSILRTKISKHINDNSIMSPSQNGCRNGSRGTKELLLIDMAISQQVRRFRRDLSTCWIDYKKAYDSVPHTWLMRVLELYKVDTTLRTFLMSCMGQWRTVLRYPGCRQIQRDSEPIRIERGIFQGDSLSPLWFCLALNPLSTLLEDSGLGYRLRRGGQVISHLLYMDDLKLFAPNDLQLMELLKVTETFSSAIRMEFGVDKCAVMHVKRGEIVESVRTQLSDSINLRSLSATETYKYLGMSEALGINIADMKQSLKERFFGRLKKVFNSLLSGGNKVRAFNGWVMPVLMYSFGILKWTQTELDALDRRVRTLLTAYRMHHPRSSVMRLYIPRRCGGRGFLNAKTLHNREICSLREYFLETDVGMHRNVVAVDKGLTPLSLAKENWRKPVVLDTNDRREVWQSKELHGRFFRALHGPDVDLSASVAWLRSGDLFGETEGFVCAIMDEVMMTNNYRRFIVKDGTVDICRACHRPGESIRHIISGCSRLANGEYLHRHNLVARIIHQQLALKYNLVESEVPYYKYVPDPVLENGCVTLYWDRSIITDRTIVANKPDIVVVDRSERRAMIVDITVPHDENLVKAEKDKQIKYLDLAHEVVDLWDVDSAIIVPIVVSAHGLIAKSFDQHLRRLSLGSWIKGLIQKAVLLDTARIVRRFLSLEP

SEQ ID NO: 12764 - protein, 1204 aa, Noctua pronuba
MLTRRRAKLLETHPPSPGSSLSSASQPPGRATSVSAASPVAAVASSSSDEFFSPPSTPPSPRRRGRRPPAGLGPRGQQAPNRVPAAGGNVSRIRWTQSMNENVMRAYYGATEGGINLTAYRCRMLSLFRALEPAVNVSAQRLSDQVRVIQNNHRLDDATLDRLRSELRISPASNPLPSQNVTHVPAALPLRANQHAEEEDDRAVSAENLCNVELRSALEGAIREYRFMSPDLRPRLPRLPMNKKNRALVCALDALLPNFIESSANLCDTHSILYCTAVAACRVANVKFPKTDSATRPKSTVPVWQCRIERRINEARALIGKLICFREGNTRPRVIRFVRRAFSGTDISPREYMSRVTERIDFLKQKVYAWANRIRRYRRRVDRYTQNRMFQSDERWVYRTWERPVTIQGVTDAHLPANDAMSAFWRSIWSVPVSHTEGDWMRVVEQACDSIPEMEAISISPLDVARAVRPLPNWKSPGPDGLHNFWIKWLQRSHACLASQFQSSLETGSLPSFFTTGVTHLLHKSGSTAEPKNYRPITCLPTVYKVLTSILRAKIVRHIDSNSIMSVSQNGCRNGSRGTKELLLIDMAISQQVRRSRRDLSTCWIDYKKAYDSVPHTWLRRVLELYKIDATLRTFLVSCMGQWSTVLLYPGCRQVLGNDEPIRIERGIFQGDSLSPLWFCLALNPLSTLLEDSGLSYRLRRGGQVISHLLYMDDLKIFAPSNLQLMELLKVTETFSSAIRMEFGVDKCAVMHVKRGEIMESVGTQLSDSIYLRSLSSTETYKYLGMSEALGINAADMKQSLKERFFGRLNKVLKSLLSGGNKVRAFNGWVMPVLMYSFGILKWTQTELDALDRKVRTLLTANRMHHPRSSVMRLYIPRKCGGRGFLNAKTLHNREVCSLREYFLETDVGMHRDVVSVDKGLTPLSLANENWRKPVILDTNDRKEVWQSKELHGRFFRALHGPDVDLLASVSWLRFSDLFGETEGFVCAIMDEVIMTNNYRKYIVKDGTVDICRACHRPGESIRHIVSGCSRLANGEYLHRHNLVARIIHQQLALQYNLVGTEVPYYKYVPDPVLENGHATLYWDRSIITDRTILANKPDIVVIDRRERRAMIVDITVPHDENLVKAENDKKIKYLDLAHEVVDMWDVDSAIIVPIVVTVNGLIAKSLDQHLRRLSLRGWVKGLIQKAVLLDTARIVRRFLSLEP

SEQ ID NO: 12765 - protein, 962 aa, Noctua pronuba
MNKKNRALVCALDALLPNFIASSANLCDTHSILYCTAVAACRVANVKFPNTDSATRPKSAVPVWQCRIERRINEARALIGKLICFREGNTRPRVMRFVRRAFSGTDISPREYMSRVTERIDFLKQKVYAWANRIRRYRRRVDRYTQNRMFQSDERWVYRTWERPVTIQGVTDTHLPDNDAMSAFWRSIWSVPVSHTEGDWMRVVEQACDSIPEMEAISISPLDVARAVRPLPNWKSPGPDGLHNFWIKWLQRSHACLASQFQSSLETGSLPSFFTTGVTHLLHKSGSTAEPKNYRPITCLPTVYKVLTSILRAKIVRHIDNNSIMSVSQNGCRNGSRGTKELLLIDMAISQQVRRSRRDLSTCWIDYKKAYDSVPHTWLRRVLELYKIDATLRTFLVSCMGQWSTVLLYPGCRQVLGNDEPIRIERGIFQGDSLSPLWFCLALNPLSTLLEDSGLGYRLRRGGQVISHLLYMDDLKIFAPSNLQLMELLKVTETFSSAIRMEFGVDKCAVMHVKRGEIMESVGTQLSDSIYLRSLSSTETYKYLGMSEALGINATDMKQSLKERFFGRLNKVLKSLLSGGNKVRAFNGWVMPVLMYSYGILKWTQTELDALDRKVRTLLTANRMHHPRSSVMRLYIPRKCGGRGFLNAKTLHNREVCSLREYFLETDVGMHRDVVSVDKGLTPLSLANENWRKPVVLDTNDRKEVWQSKELHGRFFRALHGPDVDLLASVSWLRFGDLFGETEGFVCAIMDEVIMTNNYRKYIVKDGTVDICRACHRPGESIRHIVSGCSRLANGEYLHRHNLVARIIHQQLALQYNLVGTEVPYYKYAPDPVLENGHATLYRSIITDRTILANKPDIVVIDRRERRAMIVDITVPHDENLVKAENDKKIKYLDLAHEVVDMWDVDSAIIVPIVVTVNGLIAKSLDQHLRRLSLRGWVKGLIQKAVLLDTARIVRRFLSLEP

SEQ ID NO: 12766 - protein, 1197 aa, Noctua pronuba
MLTRAAARRARLSPPDPSLSSASPLPESSPIVSAVTPAVAVASSSSDEYFSPPTTPPPVRRRRGRRPPDGLGPRGPPASDRVPALGGSVQRMRWTQSINENVMRSYYGATEGGNNRTAYRVRMLSLFQVLEPAVNVSAQRLSDQVRVIQRNRMLDDTVLDRLRTEMQSSHVITPSAQAVVLPQSNTIPNRANDESNDMVTNVSTQCNEEIRSALEGAIREYRSMQPDLRPRIPRLPMHNKNRALVAVLDSQLSNYFDNCEDLTDAHSILYCAAVAACRVAHVKFSDDRATRPKPAVPAWQYRIERRIGGARALIGKLICFREGNTRPRVMRFVRRAFSGTDISPRDYMSRVTERIDFLKQKVYAWANRIRRYKRRVDRYTQNRTFQRDERWVYRAWERPDQGVADTRLPDDDAMCSFWRSIWSVPVSHTEDEWTREVERACDPVQEMGAITIRPQDVVCAVRPLPNWKSPGPDGLHNFWIKWFTRSHARLATLFQSALESGSLPEFLTTGITHLLHKSGSTAEPKNYRPITCLPTVYKVLTSILRTKISKHINDNSIMSPSQNGCRNGSRGTKELLLIDMAISQQVRRFRRDLSTCWIDYKKAYDSVPHTWLMRVLELYKVDTTLRTFLMSCMGQWRTVLRYPGCRQIQRDSEPIRIERGIFQGDSLSPLWFCLALNPLSTLLEDSGLGYRLRRGGQVISHLLYMDDLKLFAPNDLQLMELLKVTETFSSAIRMEFGVDKCAVMHVKRGEIVESVRTQLSDSINLRSLSATETYKYLGMSEALGINVADMKQSLKERFFGRLKKVFNSLLSGGNKVRAFNGWVMPVLMYSFGILKWTQTELDALDRRVRTLLTAYRMHHPRSSVMRLYIPRRCGGRGFLNAKTLHNREICSLREYFLEADVGMHRDVVAVDKGLTPLSLAKENWRKPVVLDTNDRREVWQSKELHGRFFRALHGPDVDLSASVAWLRSGDLFGETEGFVCAIMDEVMMTNNYRRFIVKDGTVDICRACHRPGESIRHIISGCSRLANGEYLHRHNLVARIIHQQLALKYNLVESEVPYYKYVPDPVLENGCVTLYWDRSIITDRTIVANKPDIVVVDRSERRAMIVDITVPHDENLVKAEKDKQIKYLDLAHEVVDLWDVDSAIIVPIVVSAHGLIAKSFDQHLRRLSLGSWIKGLIQKAVLLDTARIVRRFLSLEP

SEQ ID NO: 12767 - protein, 1200 aa, Tinea trinotella
MLTRSRARHQRTQLPSSGSSLSSASQPPESMPTVSPVISVAAVASSSSDECFSPPTISPSARRRGGGRPPASLEPRGPSASGGVPATSGRVQRMRWTQSINENVMRSYFGATEGGISLTAYRGRMLTLFQVLEPAVNVSAQRLSDQVRVIQRNRMLDDVVLDRLRLESRSSHVSPVSPPVAVQLQPSALPRPNNIEENDDDVTISVSNQYNEQLRSALENAFRVYRSTPPGLRPRIPRLPMHKKNRALVCALDSQLANQFESSKDLADTHSILYCAAVAVCRVAHVKFPNNDRAARLAVPAWQCRIERRISDARALIGKLISFREGNTRPRVMRFVRRAFSGTDISSRDYQTRVTERIDFLKQKIYAWANRIRRYKRRVERYTQNRTFENNERWVYRAWERPDQDVSDTCLPDDDAMSLFWRNIWSVPVGHTEGEWTREVERACDLIPEMGAINISPQDVACAVRPLPNWKSPGLDGLHNFWLKYFQRSHACLAAQFQSALELGSLPQFLTTGITHLLHKSGSTAEPKNYRPITCLPTVYKVLTSILRAKINNHIDANCIMSASQNGCRSGSRGTKELLLIDVAISQQVRRSRRDLSTCWIDYKKAYDSVPHTWLMRVLELYKVDAALRTFLVSCMGQWRTVLHYPGCRRILGNGEPIKIERGIFQGDSLSPLWFCLALNPLSTLLDGSGQGYRLRRDGQVISHLLYMDDLKLFAPNNLQLMKLLKVTETFSSAISMEFGADKCATMHVKRGEIMESVGIQLSDSIHLRSLCSTETYKYLGMSEALGINAVDVKQSLKDRFFGRLNKVLNSLLSGGNKVRAFNGWVMPVLMYSFGILKWTQTELDALDRRVRTLLTANRMHHPRSSVMRLYIPRKCGGRGFLNAKTLHNREVCSLREYFLKTDVGMHRDVVAVDKGLTSLSLANENWRKPVVLDTNDRREVWQSKELHGRFFRALHGPDVDFLASVSWLRFGDLFGETEGFVCAIMDEVMMTNNYRKYIVKDGTVDICRACHRPGESIRHIISGCSRLANGDYLHRHNLVARIIHQQLALKYNLVESEVPYYRYVPDPVLENGNITLYWDRSIITDRTIVANKPDIVVIDRLERRTIIVDVAVPHDENLVKAEKDKQIKYLDLAREVVDMWEVDAAIIVPIVVTANGLIAKSLDKHLKRLSLGSWIKRLIQKAVLLDTARIVRRFLAQEP

SEQ ID NO: 12768 - protein, 1108 aa, Spilosoma lubricipeda
MKWTQSINENVMRAYFRATELGTNLTAYRVRLVSLFQELEPAVNVSAQRLSDQVRAIQRCHLLDDTVLERICSDIRNSLTVPSSPHVVDVVTNSTPQNEDVSELVDSEIISVSTLYNDKIRSTLEDVIREYRCVNFNNRPRLPRLPIHKRNLALVSALDSLLPDYFGNSEDLSDAHSILYCAAIAVCRVAGIKFAENITTTRPENTVPAWQCRIERRIAGARTLIGKLISFRSGNTRPKVMRFVKQAFLGTTISPQQYMSCVTERIDFLKQKVYAWANRIRRYRKRIDRYNQNRMFQRNEKWVYRKWENLSPCMSDGQVPDENATNSFWRSIWSVPVAHTEGDWYRDVERSCESLLPMEVINIDKEDVSCAVRSLPNWKAPGPDGLHNFWLKWFRSSHACLASQFQTALDSGSLPQFLTTGITHLLYKSGSAMDPKNFRPITCLPTLYKLLTSILRLKITTHINQNSILSVSQNGCRSGTRGTKELLIIDMTISQQVRRNRKSLATCWIDYKKAYDSVPHTWLLKVLELYKIDTTLCTFLKSCMGQWRTVLRYPGCCQTAVNDVPIKIERGIFQGDSLSPLWFCLALNPLSTLLESSGLGYRLQKDAALISHLFYMDDLKLFAPTKLQLTALLRVTENFSNSIKMEFCVDKCAVMHVKKGVIVESEGIELSDSTKLRFLSATETYKYLGFSQSLGIPESDMKQSLRERFFGRLKKVLKSLLSGGNKVRAYNGWAMPVLMYSFGILRWTQTELDALDRRVRTLLTTFRMHHPRSSVMRLYIPRKFGGRGLLNIKTLHNREIYNLREYFLHTDVEMHRNVVAVDTGLTPLALAKENWRKPVVLSTNDRREVWKGKELHGRFYRALNMPYIDFKASTSWLRYGDLFGETEGFVCAIMDEVIMTNNYRKYILKDGTVDICRACHRPGESIRHIISGCSRLANGEYLHRHNQVARIVHQQLALKYHLVNSEVPYYRYVPDPVLENGRATLYWDRSIITDRTIVANKPDIVVIDRLERRAMIVDIAVPHDENLVKVEKEKQIKYLDLSHEIVDMWNVDSAIIVPIVVSAHGLIARSLDQHLKRLTLDGWIKGLMQKAVLLDTARIVRRFLSLEP

SEQ ID NO: 12769 - protein, 1199 aa, Spilosoma lubricipeda
MLTRARSRAQLLTPDSSLRSALPSSDARTEVPTVAEASSSSSSDEFFSPPTSPTPVRRQERYRPPDSLGPRGPLTSNRAPAAGGNVRRMKWTHSINENVMRAYFRATELGTNLTAYRVRLVSLFQELEPDVNVSAQRLSDQVRAIQRCHLLDDAVLERIRSDIRNSLAVPSSSHVVDTIVNTTSQLPRSEYIDELVDSEIISVSTQCNDTIRSTLEDAIREYRYVDSNNRPRLSRLPIHKRNLALVSALDSLLPDYFNNSEDLSDTHSILYCAAIAVCRVAGVNFVECKTATRPKNTVPAWQCRIERRIAGTRTLIGKLISFRSGNTRPKVMRFVKQAFLGTTVSPQQYMSCVTERIDFLKQKVYAWANRIRRYRKRTDRYNQNRTFQRNEKWVYQKWEKLSPCMSDEHLPDKNATNYFWRNIWSTPVTHTEGHWCRDVERSCESITPMEPVRIDKEDVSCAVRSLANWKAPGPDGLHNFWLKWFRSSHAYLASQFQTALDSGSLPQFLTTGITHLLHKSGSTMDPKNFRPITCLPTLYKLLTSILRLKITTHINNNSIISVSQNGCRSGTRGTKELLIIDMTISQQVRRNRKSLATCWIDYKKAYDSVPHTWLLRVLELYKIDTTLCTFLKSCMGQWRTVLRYPGCRQSTMNDVLIKIERGIFQGDSLSPLWFCLALNPLSTLLEGSGIGYRLQKDDRVISHLLYMDDLKLLAPTKLQLTALLKVTENFSNSIKMEFGVDKCAVMYVKKGLIVESEGVELSDSTKLRSLSATETYKYLGFSQSLGIPESDVKQMLRERFFGRLKKVLKSLLSGGNKVRAYNSWVMPVLMYSFGILRWTQTELDAFDRRVRTLLTAFRMHHPRSSVMRLYIPRKFGGRGLLNIKTLHNREIYNLREYFLHTDVEMHRNVVAVDTGLTPLALAKENWRKPVVLSTNDRREVWKGKELHGRFYRALNGPDIDFKASTSWLRYGDLFGETEGFVCAIMDEVIMTNNYRKYILKDGTVDICRACHRPGESIRHIISGCSRLANGEYLHRHNQVARIVHQQLALKYHLVNSEVPYYRYVPDPVLENGRATLYWDRSIITDRTIVANKPDIVVIDRLERRAMIVDIAVPHDENLVKAEKEKQIKYLDLSHEIVDMWNVDSAIIVPIVVSAHGLIARSLDQHLKRLTLDGWIKGLMQKAVLLDTARIVRRFLSLEP

SEQ ID NO: 12770 - protein, 1198 aa, Spilosoma lubricipeda
MLTRARSRALLPSSDSSLRSALPSSDARTEVPTVAEASSSSSSDEFFSPPTSPTPVRRQGRDRPPTSLGPRGPLTSNRAPAAGGDVRRMKWTQSINENVMRAYFRATELGTNLTAYRVRLVSLFQELEPAVNVSAQRLSDQVRAIQRCHLLDDVVLERIRSDVRGTLTVPSSSHSVDLVATTPQLPHNEYVDEQVESEVMTVSTQCNDRIRRALEDAIQEYRHVDYKNRPRLPRLPIHKRNLALVSALNSLLPDYFGNSEDLSDTHSILYCAAIAVCRVAGVKFVEQITTTRPKNEVPAWQCRIERRIAETRTLIGKLITFQSGNTRPRVMRFVKQAFLGTTISPQQYMSSVTERIDFLKQKVYAWANRIRRYRKRVDRFIQNRMFQRNEKWVYRKWEEPSPRVGEGRFPDENVTNTFWRNIWSVPVTHTEGDWYRDVERSCESITSMEPITISKDDIGCAVRSLPNWKSPGPDGLHNFWLKWFRSSHACLASQYQAAVDSGSLPQFLTTGITHLLYKSGSAMDPKNFRPITCLPTMYKLLTSILRLKISTHINNNLIMSVSQNGCRSGSRGTKELLIIDMTISQQVRRNRKSLATCWIDYKKAYDSVPHTWLLRVLELYKIDTTLCTFLKSCMGQWRTVLRYPGCRQTAVNDVLINIERGIFQGDSLSPLWFCLALNPLSALLEDSGLGYRLQKDDQVISHLFYMDDLKLLAPTKLQLTALLKVTENFSNSIKMEFGVDKCAVMYVKKGVIVESEGTELSDSTRLRSLSATETYKYLGFSQSLGIPEPDMKQSLRERFFGRLKKVLKSLLSGGNKVRAYNGWVMPVLMYSFGILRWTQTELDALDRRVRTLLTAFRMHHPRSSVMRLYIPRKFGGRGLLNAKTLHNREIYNLREYFLHTDVGVHRSVVTVDTGLTPLALAKENWRKPVVLSTNDRREVWKGKELHGRFYRALNGPDIDFKASTSWLRYGDLFGESEGFVCAIMDEVIMTNNYRKYILKDGTVDICRACHRPGESIRHIISGCSRLANGEYLHRHNQVARIVHQQLALKYHLVSSEVPYYRYVPDPVLENGRATLYWDRSIITDRTIVANKPDIVVIDRLERRAMIVDIAVPHDENLVKVEKEKQIKYLDLSHEIVDMWNVDSAIIVPIVVSAHGLIAKSLDQHLKRLTLEGWIKGLMQKAVLLDTARIVRRFLSLEP

SEQ ID NO: 12771 - protein, 1198 aa, Ochropleura plecta
MITRLAARQHARLPPPDSPLSSASPPPEPSLIVSAVTPAVAVASSSSDEYFSPPTTPLPACRRGGRRPPDGLGLRGPPASDRVPAPGGSVQRMRWTSSINENVMRSYYGATEGGNNLTAYRVRMLSLFQVLEPAVNVSAQRLSDQVRVIQRNRMLDDTVLDRLRTEMQSSQVITSSSQALVPPQSHQLVSHADEVSNDMATNVSTQCNEEMRIALEGAIREYRYISPELRPRLPRLPMHNKNRALVAVLDSQLSNYFDNCENLTDAHSILYCAAVAACRVAHVKFPDDGATRPKPAVPFWQCRIERRIGVARALIGKLICFREGNTRPRVMRFVRRAFAGTDISPPDYMSHITERIDFLKQKVYAWANRIRRYKRRVERYTLNRTFQSDERWVYRAWERPDQGVSDTHLPDDDAMCLFWRNIWSVPVSHTEGEWTREVERACDPIPEMGALTISPQDVTCVVRPLPNWKSPGPDGLHNFWLKWIQRSHARLATLFQTALESGSLPKFLTTGITHLLHKSGSTTEPKNYRPITCLPTIYKVLTSILRAKITKHIDDNSIMSASQNGCRNGSRGTKELLLIDMAISQQVRRSRRHLSTCWIDYKKAYDSVPHTWLMRVLELYKVDATLRTFLSSCMRQWNTVLRYPGCRQIQRNSEPIRIERGIFQGDSLSPLWFCLALNPLSTLLEDSGLGYRLRRGGRVISHLLYMDDLKLFAPNDSQLMELLKVTETFSSAISMEFGVDKCAVMHVKRGEIVESVGTQLSDSIHLRSLSANETYKYLGMSEALGINVADMKQSLKERFFGRLRKVFNSLLSGGNKVRAFNGWVMPVLMYSFGILKWTQTELDALDRKVRTLLTAYRMHHPRSSVMRLYIPRSCGGRGFLNAKTLHNREICSLREYFLEADVGMHRDVVTVDKGFTPLSLAKENWRKPVVLDTNDRREVWQSKELHGRFFRALHGPDVDQPASVAWLRSGDLFGETEGFVCAIMDEVMMTNNYRRFIVKDGTVDICRACHRPGESIRHIISGCSRLANGEYLHRHNLVARIIHQQLALKYSLVESEVPYYRYEPDPVLEHGNITLYWDRSIITDRTIVANKPDIVVVDRSERRAMIVDITVPHDENLVKAEKDKQIKYIDLAREVVDMWDVDSAIIVPIVVSANGLIAKSLDQHLRRLSLGSWIKGLIQKAVLLDTARIVRRFLSLEP

SEQ ID NO: 12772 - protein, 1200 aa, Ochropleura plecta
MKMITRSAARRDARLPPPSPSLSSASPPPEPSLVVSAVTPAVAVASSSSDEYFSPPTTPPPARRRGGRRLPDGLGLRGPPASDRVPAPGGNVQRMRWTSSINENVMRSYYGATEGGNNLTAYRVRMLSLFQVLEPAVNVSAQRLSDQVRVIQRNRMLDDTVLDRLLTEMQSSQVITSSSQAVVPPQSHQLVSRADEVSNDMATNVSTQCSEEMRSALEGAIREYRYISPELRPRLPRLPMHNKNRMLVAVLDSQLSNYFDNCENLTDAHSLLYCAAVAACRVAHVKFPDDRATRSKPAVPVWQYRIEQRIGVARALIGKLICFREGNTRPRVMRFVRRAFAETDISPSDYMSRITERIDFLKQKVYAWANRIRRYKRRVERYTLNRTFQSDERWVYRAWERPDQDVSDMRLPDDDAMCSFWRSIWSVPVSHTEGEWTREVERACDPIPEMGAITISPQDVACAVRPLPNWKSPGPDGLHNFWLKWIQRSHARLATLFQTALESGSLPKFLTTGITHLLHKSGSTAEPKNYRPITCLPTIYKVLTSILRAKITKHIDDNSIMSASQNGCRNGSRGTKELLLIDMAISQQVRRSRRHLSTCWIDYKKAYDSVPHTWLMRVLELYKIDATLRTFLISCMRQWSTVLCYPGCRQIQRNSEPIRIERGIFQGDSLSPLWFCLALNPLSTLLENSGLGYRLRRGGQVISHLLYMDDLKLFAPNDLQLMELLKVTETFSSSIRMEFGVDKCAVMHVKRGEIVESVGTQLSDSINLRSLSATETYKYLGMSEALGINVADMKQSLKERFFGRLRKVFNSLLSGGNKVRAFNGWVMPVLMYSFGILKWTQTELDALDRKVRTLLTAFRMHHPRSSVMRLYIPRSCGGRGFLNAKTLHNREICSLREYFLETDVGMHRDVVAVDKGLTPLSLAKENWRKPVVLDTNDRREVWQSKELHGRFFRALHGPDVDQPASVAWLRAGDLFGETEGFVCAIMDEVMMTNNYRRFIVKDGTVDICRACHRPGESIRHIISGCSRLANGEYLHRHNLVARIIHQQLALKYSLVESEVPYYRYEPDPVLEHGNITLYWDRSIITDRTIVANKPDIVVVDRSERRAMIVDITVPHDENLVKAEKDKQIKYIDLAREVVDMWDVDSAIIVPIVVSANGLIAKSLDQHLRRLSLGSWIKGLIQRAVLLDTARIVRRFLSLEP

SEQ ID NO: 12773 - protein, 1200 aa, Ochropleura plecta
MKMITRSAARRDARLPPPGPSLSSASPPPEPSLVVSAVTSAVAVASSSSDEYFSPPTTPPPARRRGGRRPPDGLGLRGPPASDRVPAPGGSVQRMRWTSSINENVMRSYYGATEGGNNLTAYRVRMLSLFQVLEPAVNVSAQRLSDQVRVIQRNRMLDDTVLDRLRTEMQSSQVIISSSQAVVPPQSHQLVSRADEVSNDMATNVSTQCSEEMRSALEGAIREYRYMSPELRPRLPRLPMHNKNRAMVAVLDSQLSNYFDNCENLTDAHSILYCAAVAACRVAHVKFPDDGATRPKPAVPFWQCRIERRIGVARALIGKLICFKEGNTRPRVMRFVRRAFAGTDISPPDYMSRITERIDFLKQKVYAWANRIRRYKRRVERYTLNRTFQSDERWVYRAWERPDQGVSDTHLPDDDAMCLFWRSIWSVPVSHTEGEWTREVERACDPIPEMGALTISPQDVACAVRPLPNWKSPGPDGLHNFWIKWIQRSHVRLAALFQSALESGSLPKFLTTGITHLLHKSGSTAEPKNYRPITCLPTLYKVLTSILRAKITKHIDDNSIMSASQNGCRNGSRGTKELLLIDMAISQQVRRSRRHLSTCWIDYKKAYDSVPHTWLMRVLDLYKIDATLRTFLISCMRQWSTVLRYPGCRQIQRNSEPIRIERGIFQGDSLSPLWFCLALNPLSTLLENSGLGYRLKRGGQVISHLLYMDDLKLFAPNDLQLMELLKVTETFSSAIRMEFGVDKCAVMHVKRGEIVESVGTQLSDSINLRSLSATETYKYLGMSEALGINVADMKQLLKERFFGRLRKVFNSLLSGGNKVRAFNGWVMPVLMYSFGILKWTQTELDALDRKVRTLLTACRIHHPRSSVMRLYIPRSCGGRGFLNAKTLHNREICSLREYFLETDVGMHRDVVAVDKGLTPLSLAKENWRKPVVLDTNDRREVWQSKELHGRFFRALHGPGVDQSASVAWLRSGDLFGETEGFVCAIMDEVMMTNNYRRFIVKDGTVDICRACHRPGESIRHIISGCSRLANGEYLHRHNLVARIIHQQLALKYNLVEAEVPYYRYEPDPVLEHGYITLYWDRSIITDRTVVANKPDIVVVDRSERRAMIVDITVPHDENLVKAEKDKQIKYIDLAREVVDMWDVDSAIIVPIVVSANGLIAKSLDQYLRRLSLGSWIKGLIQKAVLLDTARIVRRFLSLEP

SEQ ID NO: 12774 - protein, 1197 aa, Ochropleura plecta
MLTRSQARSARHPPPGSSLSSASPPPEPSLVVSAVTPAVAVASSSSDEYFSPPTTPPPVRRRGRHRPPDGLGPRGPPASDRVPAPGGSVQRMRWTQSINENVMRSYYGATEGGNNLTAYRVRMLSLFQVLEPAVNVSAQRLSDQVRVIQRNRMLDDTVLDRLRTEMQSSQVITSSSQAVAPPQPHQLVNRANEVSNDMATNVSTQCSEEMRSTLEGAIREYRYMSPELRPRLPRLPMHNKNRALVAALDSQLSSYFDNCENLTDAHSILYCAAVAVCRVAHVKFPDDRATRPKPAVPFWQCRIERRIGAARALIGKLICFREGNTRPRVMRFVRRAFSGTDITPPDYMSRIAERIDFLKQKVYAWANRIRRYKRRVERYTQNRTFQSDERWVYRAWEQPDQGVSDTHLPDDNAMCLFWRSIWSVPVSHTEGEWTREVERACDPIPEMGALTISPQDVACAVRPLPNWKSPGPDGLHNFWIKWIQRSHVRLAALFQTALESGSLPKFLTTGITHLLHKSGSTAEPKNYRPITCLPTLYKVLTSILRAKITKHIDDNSIMSASQNGCRNGSRGTKELLLIDMAISQQVRRSRRHLSTCWIDYKKAYDSVPHTWLMRVLELYKIDATLRTFLISCMRQWSTVLRYPGCRQIQRNSEPIRIERGIFQGDSLSPLWFCLALNPLSTLLENSGLGYRLRRGGQVISHLLYMDDLKLFAPNDLQLMELLKVTETFSSSIRMEFGVDKCAVMHVKRGEIVESVGTQLSDSINLRSLSATETYKYLGMSEALGINVADMKQSLKERFFGRLRKVFNSLLSGGNKVRAFNGWVMPVLMYSFGILKWTQTELDALDRKVRTLLTAFRMHHPRSSVMRLYIPRSCGGRGFLNAKTLHNREICSLREYFLETDVGMHRDVVAVDKGFTPLSLAKENWRKPVVLDTNDRREVWQSKELHGRFFRALHGPDVDQPASVAWLRSGDLFGETEGFVCAIMDEVMMTNNYRRFIVKDGTVDICRACHRPGESIRHIISGCSRLANGEYLHRHNLVARIIHQQLALKYSLVESEVPYYRYEPDPVLEHGNITLYWDRSIITDRTIVANKPDIVVVDRSERRAMIVDITVPHDENLVKAEKDKQIKYIDLAREVVDMWDVDSAIIVPIVVSANGLIAKSLDQHLRRLSLGSWIKGLIQKAVLLDTARIVRRFLSLEP

SEQ ID NO: 12775 - protein, 1106 aa, Hecatera dysodea
MRWTQTINENVMRSYYGATEGGNNLTAYRGRMLSLFQVLEPAVNVSAQRLSDQVRVILRNRMLDDSVLDRLRMEICSSHVITPSPQTVAQPQLIQIPSHADEESDDRVTNVSTQCNEELRSALESAIREFRYVSPELRPRIPRLPMHNKNRALVAALDSQLSNYFDNCEDLTDAHSIMYCAAVAACRVAHVKMPNDRVTRPKPAIPAWQCRIERRIGGARALIGKLICFREGNTRPRVMRFVRRAFSGTQISPLDYLSRVTERIDFLKQKVYAWANRIRRYKRRVERYTQNRTFRSNERWVYRAWERPDQDVTDTRPPDDDAMCSFWRNIWSAPVSHTEGDWIREVERACDPLPDMGAIIISPQDVARAVRPLPNWKSPGPDGLHNFWIKWLHSSHACLASRYQESLESGSLPEFLMTGITHLLHKSGSTAEPKNYRPITCLPTVYKVLTSILRDKINQHINSNNIMSASQNGCRNGSRGTKELLLIDIAISQQVRRSRKDLSTCWIDYKKAYDSVPHTWLLRVLELYKIDATLRTFLMSCMGQWRTVLRYPGCRHVQRNSEPIRIERGIFQGDSLSPLWFCLALNPLSTLLGNSGLGYRLKRGGQVISHLLYMDDLKLFAPTNLQLMELLKVTETFSNAIRMEFGVDKCAIMHVKRGEIMESVGSQLSDSINLRCLSSTETYKYLGMSEALGINVTDMKQSLKERFFGRLKKVFNSLLSGGNKVRAFNGWVMPVLMYSFGVLKWTQTELDALDRRVRTLLTTYRMHHPRSSVMRLYIPRKCGGRGFLNAKTLHNREICSLREYFLAVEVGMHRDVVAVDKGLTPLSMANENWRKPAVLDTNDRRAVWQSKELHGRFFRALHGPDVDQLASVAWLRFGDLFGETEGFVCAIMDEVIMTNNYRRFIVKDGTVDICRACHRPGESIRHIVSGCSRLANGEYLHRHNLVARIIHQQLALKYSLVSSEVPYYRYVPDPVLDSGNITLYWDRSIITDRTIVANKPDIVVVDRIERRTMIVDITVPHDENLVKAEKDKQIKYLDLAREVVDMWDVDSAIIVPIVVSANGLIAKSLDQHLRRLSLGSWIKGLIQKAVLLDTARIVRRFLSLEP

SEQ ID NO: 12776 - protein, 1200 aa, Mythimna impura
MLTRSRAREQETHPTSSGSSLSSASQPPGPAPAVSPVIPAAAVASSSSDEYFSPPTTPPPARRRGRGRPPASLRPRGPPASDRVPAAGGSVQRMRWTQSINENVMRSYFGATEGGSNLTAYRGRMLSLFQVLEPTVNVSAQRLSDQVRVIQRNRMLDDAVLDRLRLESQRSRASSATPPAAVQLQPSALPRPDHVGDADDDAAISVSTQCNERLRSALEDAFREYRSTPPGLRPRLPRLPMHKRNRALVCALDSQLSNCFDSSKDLADTHSILYCAAAAACRVAHVKFPNCDRATRPAVPAWQRRIERRIGEARALIGKLICFREGNTRPRVMRFVRRAFLGTDISPQNYLPCVTERIDFLKQKVYAWASRIRRYKRRVERYTQNRTFQSNERWVYRTWERPDQDVTDTRLPDDDAMCSFWRRIWSVPVSHIEGDWIREVERTCDLLPEMGAITISPQDVARAVRPLPNWKSPGPDGLHNFWIKWFQGSHARLASQFQSALESGSLPEFLTTGITHLLHKSGSTADPKNYRPITCLPTVYKVLTSILRAKINTHIETNSIMSASQNGCRNGSRGTKELLLIDMAISQQVRRSRKDLSTCWIDYKKAYDSVPHTWLMRVLELYKVDTTLRTFLMSCMRQWRTVLHYPGCRQIRENSEPIRIERGIFQGDSLSPLWFCLALNPLSTLLEGSGLGYRLKRGGQVISHLLYMDDLKLFAPNNLHLMELLKVTETFSNAIRMEFGVDKCAVMHVKRGEIMESVGTQLSDSIYLRSLCSTETYTYLGMSEALGINAADVKQSLKERFFGRLNRVLKSLLSGGNKVRAFNGWVMPVLMYSFGILKWTQTELDALDRRVRTLLTANRMHHPRSSVMRLYIPRKCGGRGFLNAKTLHNREVCSLREYFLETDVGMHRDVVAVDKGLTPLSLANGNWRKPIILDTNDRREVWQSKELHGRFYRALHGPDVDLLASVSWLRFGDLFGETEGFVCAIMDEVVMTNNYRKYIVKDGTADICRACRRPGESIRHIISGCSHLANGDYLHRHNLVAKIIHQQLALKYNLVESEVPYYKYVPDPVLDNGSITLYWDRSIITDMTIVANKPDIVVIDRLERRTVIVDIAVPHDDNLVKAEKDKQTKYLDLAREVVDMWEVDTAVIVPIVVTANGLISKSLDQHLRRLSLGSWIKGLIQKAVLLDTARIVRRFLSQEP

SEQ ID NO: 12777 - protein, 1048 aa, Mythimna impura
MLDDTVLDRLRTEMGSHAIASSSQTAVPSQVLASNHLPNHADEESTDMVTHVSTQCSNELRSALECAIREYRNMPLEVRPRLPRLPMCNKNKALVAALDSQLSNYFDDCEDLTDTHSIMYCAAVAACRVAHVKFPNSDVATRPKPAVPAWQCRIERRIGGARALIGKLICFSEGNTRPRVMRFVRRAFSGTDISPRDYMSCVTERIDFLKQKVYAWANRILRYKRRVERYTQNRTFRSNERWVYRAWEQPDQGVTDTRLPDDDAMSSFWRNIWSVPVSHTEGGWTREVERPCEPIPEMGAITISPQDVARAVRPLPNWKSPGPDGLHNFWIKWLQRSHARLASQYQTALESGSLPEFLTTGVTHLLHKSGSTAEPKNYRPITCLPTVYKVLTSILRAKINHHVDNNAIMSASQNGCRNGSRGTKELLLIDMAISQQVRRSRKDLSTCWIDYKKAYDSVPHTWLMRVLELYKIDTTLRTFLMSCMRQWRTVLRYPGCRHIQRNSEPVRIERGIFQGDSLSPLWFCLALNPLSTLLENSGLGYRLKRGGQVISHLLYMDDLKLFAPNNLQLMELLKVTENFSSAIRMEFGVDKCAVMHVKRGEIVESVGTQLSDSINLRYLSPTETYKYLGMSEALGINATDMKQTLRERFFGRLKKVFNSLLSGGNKVRAFNGWVMPVLMYSFGVLKWTQTELDALDRRVRTLLTAYRMHHPRSSVMRLYIPRKCGGRGFLNAKTLHNREVCSLREYFLTADVGMHRDVVAVDKGLTPLSLANESWRKPVVLDTNDRREVWQSKELHGRFFRALHGPDVDQLASVAWLRVGDLFGETEGFVCAIMDEVIMTNNYRRFIVKDGTVDICRACHRPGESIRHIISGCSRLANGEYLHRHNLVARIIHQQLALNYSLVESEVPYYRYVPDPVLDNGDITLYWDRSIITVRTIVANKPDIVVVDRRERRTMIVDISVPHDENLVKAEKDKQIKYIDLAREVVDMWDVDSAIIVPIVVSANGLIAKSLDQHLRRLALGGWIKGLIQKAVLLDTARIVRRFLSLEP

SEQ ID NO: 12778 - protein, 1109 aa, Mythimna impura
MRWTRSINENVMRSYYGATEGGNNLTAYRVRMLSLFQVLEPAVNVSAQRLSDQVRVIQRNHMLDDTVLDRLRTEMGSHAIASSSQTVAPSQVSPSNHLPNHADEESTDMVTHVSTQCSNELRSALECAIREYRNMPLKLRPRLPRLPMCNKNKALVAALDSQLSNYFDDCEDLTDTHSIMYCAAVAACRVAHVKFPNSDVATRPKPAVPAWQCRIERRIGGARALIGKLICFREGNTRPRVMRFVRRAFSGTDISPRDYMSCVTERIDFLKQKVYAWANRIRRYKRRVERYTQNRTFRSNERWVYRAWEQPDQGVADTRLPDDDVMSSFWRNIWSVPVSHTEGGWTREVERACEPIPEMGAITISPQDVARAVRPLPNWKSPGPDGLHNFWIKWLQRSHARLASQYQTALESGSLPEFLTTGVTHLLHKSGSTAEPKNYRPITCLPTVYKVLTSILRTKINHHVDNNAIMSASQNGCRNWSRGTKELLLIDMAISQQVWRSRKDLSTCWIDYKKAYDSVPHTWLMRVLELYKIDATLRTFLMSCMRQWRTVLRYPGCRHIQRNSEPVRIERGIFQGDSLSPLWFCLALNPLSTLLENSGLGYRLKRGGQVISHLLYMDDLKLFAPNNLQLMELLKVTETFSSAIRMEFGVDKCAVMHVKRGEIVESVGTQLSDSINLRSLSPTETYKYLGMSEALGINATDMKQTLRERFFGRLKKVFNSLLSGGNKVRAFNGWVMPVLMYSFGVLKWTQTELDALDRRVRTLLTAYRMHHPRSSVMRLYIPRKCGGRGFLNAKTLHNREVCSLREYFLTADVGMHRDVVAVDKGLTPLSLANESWRKPVVLDTNDRREVWQSKELHGRFFRALHGPDVDQLAFVAWLRVGDLFGETEGFVCAIMDEVIITNNYRRFIVKDGTVDICRACHRPGESIRHIISGCSRLANGEYLHRHNLVARIIHQQLALNYSLVESEVPYYRYVPDPVLDNGDITLYWDRSIITDRTIVANKPDIVVVDRRERRTMIVDISVPHDENLVKAEKDKQIKYIDLAREVVDMWDVDSAIIVPIVVSANGLIAKSLDQHLRRLALGGWIKGLIQKAVLLDTARIVRRFLSLEP

SEQ ID NO: 12779 - protein, 868 aa, Mythimna impura
MRFVRRAFSGTDISPQDYMSCVTERIDFLKQKVYAWANRIRRYKRRVERYTQNRTFRSNERWVYRAWEQPDQGVADMRLPDDDAMSSFWRSIWSVPVSHTEGGWTREVERACEPIPEMGAITISPQDVARAVRPLPNWKSPGPDGLHNFWIKWLQRSHARLASQYQTALESGSLPEFLTTGVTHLLHKSGSTAEPKNYRPITCLPTVYKVLTSILRAKINHHVDNNAIMSASQNGCRNGSRGTKELLLIDMAISQQVRRSRKDLSTCWIDYKKAYDSVPHTWLMRVLELYKIDATLRTFLMSCMRQWRTVLRYPGCRHIQRNSEPVRIERGIFQGDSLSPLWFCLALNPLSTLLENSGLGYRLKRGGQVISHLLYMDDLKLFAPNNLQLMELLKVTETFSSAIRMEFGVDKCAVMHVKRGEIVESVGTQLSDSVNLRSISPTETYKYLGMSEALGINATDMKQTLRERFFGRLKKVLNSLLSGGNKVRAFNGWVMPVLMYSFGVLKWTQTELDALDRRVRTLLTAYRMHHPRSSVMRLYIPRKCGGRGFLNAKTLHNREVCSLREYFLTADVGMHRDVVAVDKGLTPLSLANESWRKPVVLDTNDRREVWQSKELHGRFFRALHGPDVDQLASVAWLRVGDLFGETEGFVCAIMDEVIMTNNYRRFIVKDGTVDICRACHRPGESIRHIISGCSRLANGEYLHRHNLVARIIHQQLALNYSLVESEVPYYRYVPDPVLDNGDITLYWDRSIITDRTIVANKPDIVVVDRRERRTMIVDISVPHDENLVKAEKDKQIKYIDLAREVVDMWDVDSAIIVPIVVSANGLIAKSLDQHLRRLALGGWIKGLIQKAVLLDTARIVRRFLSLEP

SEQ ID NO: 12780 - protein, 1001 aa, Mythimna impura
MVKHVSTQCSNELRSALECAIREYRNMPLKLRPRLPRLPMCNKNKALVAALDSQLSNYFDDCEDLTDTHSIMYCAAVAACRVAHVKFPNSDVATRPKPAVPAWQCRIERRIGGARALIGKLICFREGNTRLRVMRFVRRVFSGTDISPRDYMSCVTERIDFLKQKVYAWANRIRRYKRRVERYTQNRTFRSNERWVYRAWEQPDQGVADTRLPDDDVMSSFWRNIWSVPVSHTEGGWTREVERACEPIPEMGTITICPQDVARAVRPLPNWKSPGPDGLHNFWIKWLQRSHARLASQYQTALESGSLPEFLTTGVTHLLHKSGSTAEPKNYRPITCLPTVYKVLTSILRAKINHHVDNNAIMSASQNGCRNGFRGTKELLLIDMAISQQVRRSRKDLSTCWIDYKKAYDSVPHTWLMRVLELYKIDATLRTFLMSCMRQWRTVLRYPGCRHIQRNSEPVRIERGIFQGDSLSPLWFCLALNPLSTLLENSGLGYRLKRGGQVISHLLYMDDLKLFAPNNLQLMELLKVTETFSSAIRMEFGVDKCAVMHVKRGEIVESVGTQLSDSINLRSLSPTETYKYLGMSEALGINATDMKQTLRERFFGRLKKVFNSLLSGGNKVRAFNGWVMPVLMYSFGVHKWTQTELDALDRRVRTLLTAYRMHHPRSSVMRLYIPRKCGGRGFLNAKTLHNREVCSLREYFLTADVGMHRDVVAVDKGLTPLSLANESWRKPVVLDTNDRREVWQSKELHGRFFRALHGPDVDQLASVAWLRVGDLFGETEGFVCAIMDEVIMTNNYRRFIVKDGTVDICRACHRPGESIRHIISGCSRLANGEYLHRHNLVARIIHQQLALNYSLVESEVPYYRYVPDPVLDNGDITLYWDRSIITDRTIVANKPDIVVVDRRERRTMIVDISVPHDENLVKAEKDKQIKYIDLAREVVDMWDVDSAIIVPIVVSANGLIAKSLDQHLRRLALGGWIKGLIQKAVLLDTARIVRRFLSLEP

SEQ ID NO: 12781 - protein, 868 aa, Mythimna impura
MRFVRRAFSGTNISPRDYLPHITERIDFLKQKVYAWANRIRRYKRRVERYTQNRTFQRNERWVYRAWERPDQGVIDTRLPDDDAMCSFWRSIWSVPVSHTEGDWTREIERTCDLIPEMEPITISPQDVARAVRPLPNWKSPGPDGLHNFWLKWFQRSHARLASQFQSALESGSLPQFLTTGITHLLHKSGSTAEPKNYRPITCLPTVYKVLTSILRAKINSHIETNSIMSASQNGCRNGSRGTKELLLIDVAISQQVRRSRRDLSTCWIDYKKAYDSVPHTWLMRVLELYKVDATLRTFLMSCMRQWRTALHYPGCRQIRESSEPIRIERGIFQGDSLSPLWFCLALNPLSTLLEGSGLGYRLKRGGQVISHLLYMDDLKLFASNNLQLMELLKVTETFSSAIRMEFGLDKCAVMHVKRGEIMESVGTQLSDFIYIRSLCSTETYKYLGMSEALGINAADMKQSLRERFFGRLNKVLNSLLSGGNKVRAFNGWVMPVLMYSFGILKWTQTELDALDRRVRSLLTANRMHHPRSSVMRLYIPRKCGGRGFLNAKTLHNREICSLREYFLKTDVGMHRDVVAVDKGLTPLSLVNENWRKPTVMDTNERRAVWQGKELHGRFYRALHGPDVDLLASVSWLRFGNLFGETEGFVFAIMDEVMMTNNYRKYIVKDGTVDICRACHRPGESIRHIISGCSHLANGDYLHRHNLVARIIHQQLALKYNLVESEVPYYRYVPDPVLENGSVTLYWDRSIITDRTIVANKPDIVVIDRLERRTMIVDIAVPHDENLVKAEKDKQTKYLDLAREVVDMWEVDRAVIVPIVVTANGLIAKSLEQHLRRLSLGSWIKGLIQKAVLLDTARIVRRFLSQEP

SEQ ID NO: 12782 - protein, 1200 aa, Mythimna impura
MLTRAAARRARPPPPASSLSSASPPPEPCLTVSAVTPAVAAASSSSDEYYSPPTTPPPTRRRGERRPSACLGSRGPPASDRVPATGGCVSRMRWTKSINENVMRAYYGATEGGNNLTAYRVRMLSLFQVLEPAVNVSAQRLSDQVRVIQRNHMLDDTVLDRLRTEMGSHAIASSSQTAVPSQVSPSNHLPNHADEESTDMVTHVSTQCSNELRSALECAIREYRNMPLELRPRLPRLPMCNKNKALVAALDSQLSNYFDDCEDLTDTHSIMYCAAVAACRVAHVKFPNSDVATRPKPAVPAWQCRIERRIGGARALIGKLICFREGNTRPRVMRFVRRAFSGTDISPRDYMSCVTERIDFLKQKVYAWANRIRRYKRRVERYTQNRTFRSNERWVYRAWELPDQSVTDTRLPDDDAMSSFWRNIWSVPVSHSEGGWTREVERACEPIPEMGAITISPQDVARAVRPLPNWKSPGPDGLHNFWIKWLQRSHARLASQYQTALESGSLPEFLTTGVTHLLHKSGSTAEPKNYRPITCLPTVYKVLTSILRAKINHHVDNNAIMSASQNGCRNGSRGTKELLLIDMAISQQVRRSRKDLSTCWIDYKKAYDSVRHTWLMRVLELYKIDTTLRTFLMSCMRQWRTVLRYPGCRHIQRNSEPVRIERGIFQGDSLSPLWFCLALNPLSTLLENSGLGYRLKRGGQVISHLLYMDDLKLFAPNNLQLMELLKVTETFSSAIRMEFGVDKCAVMHVKRGEIVESMGTQLSDSINLRSLSPTETYKYLGMSEALGINAIDMKQTLKERFFGRLKKVFNSLLSGGNKVRAFNGWVMPVLMYSFGVLKWTQTELDALDRRVRTLLTAYRMHHPRSSVMRLYIPRKCGGRGFLNAKTLHNREVCSLREYFLAADVGMHRDVVAVDKGLTPLSLANESWRKPVVLDTNDRREVWQSKELHGRFFRALHGPDVDQLASVAWLRVGDLFGETEGFVCAIMDEVIMTNNYRRFIVKDGTVDICRACHRPGESIRHIISGCSRLANGEYLHRHNLVARIIHQQLALKYSLVESEVPYYRYMPDPVLDNGDITLYWDRSIITDRTIVANKPDIVVVDRRERRTMIVDISVPHDENLVKAEKDKQIKYIDLAREVVDMWDVDSAIIVPIVVSANGLIAKSLDQHLRRLALGGWIKGLIQKAVLLDTARIVRRFLSLEP

SEQ ID NO: 12783 - protein, 1076 aa, Mythimna impura
MLSLFQVLEPTVNVSAQRLSDQVRVIQRNRMLDDAVLDRLRLESQRSRASSATPPAAVQLQPSALPRPDHVGDADDDAAISVSTQCNERLRSALEDAFREYRSTPPGLRPRLPRLSMHKRNRALVCALDSQLSNCFDSSKDLADTHSILYCAAAAACRVAHVKFPNCDRATRPAVPAWQRRIERRIGEARALIGKLICFREGNTRPRVMRFVRRAFLGTDISPQNYLPCVTERIDFLKQKVYAWASRIRRYKRRVERYTQNRTFQSNERWVYRTWERPDQDVTDTRLPDDDAMCSFWRRIWSVPVSHIEGDWIREVERTCDLLPEMGAITISPQDVARAVRPLPNWKSPGPDGLHNFWIKWFQGSHARLASQFQSALESGSLPEFLTTGITHLLHKSGSTADPKNYRPITCLPTVYKVLTSILRAKINTHIETNSIMSASQNGCRNGSRGTKELLLIDMAISQQVRRSRKDLSTCWIDYKKAYDSVPHTWLMRVLELYKVDTTLRTFLMSCMRQWRTVLHYPGCRQIWENSEPIRIERGIFQGDSLSPLWFCLALNPLSTLLEGSGLGYRLKRGGQVISHLLYMDDLKLFAPNNLHLMELLKVTETFSNAIRMEFGVDKCAVMHVKRGEIMESVGTQLSDSIYLRSLCSTETYKYLGMSEALGINAADVKQSLKERFFGRLNRVLKSLLSGGNKVRAFNGWVMPVLMYSFGILKWTQTELDALDRRVRTLLTANRMHHPRSSVMRLYIPRKCGGRGFLNAKTLHNREVCSLREYFLETDVGMHRDVVAVDKGLTPLSLANGNWRKPIILDTNDRREVWQSKELHGRFYRALHGPDVDLLASVSWLRFGDLFGETEGFVCAIMDEVVMTNNYRKYIVKDGTADICRACHRPGESIRHIISGCSHLANGDYLHRHNLVAKIIHQQLALKYNLVESEVPYYKYVPDPVLDNGSITLYWDRSIITDRTIVTNKPDIVVIDRLERRTVIVDIAVPHDDNLVKAEKDKQTKYLDLAREVVDMWEVDTAVIVPIVVTANGLISKSLDQHLRRLSLGSWIKGLIQKAVLLDTARIVRRFLSQEP

SEQ ID NO: 12784 - protein, 1200 aa, Mythimna impura
MLTRAAARRARLPPPASSLSSASPPPESSPTVSAVTPAVAVASSSSDEYFSPPTSPPPARRRRGRRPPSGLGPRGPPASDRVPAPGGSVQRMRWTQSINENVMRAYYGATEGGNNLTAYRVRMLSLFQVLEPAVNVSAQRLSDQVRVIQRNHMLDDTVLDRLRTEMSNHAIAPSSQPVVPVMVPPSYHLSDHADEEITDMVTHVSTQCNNELRSALECAIREYRNMPLELRPRLPRLPMHNKNKALVAALDLQLSNYFDDCEDLTDTHSIMYCAAVAACRVAHVKFPSCDVSTRPKPAVPAWQCRIERRIGGARALIGKLICFREGNTRPRVMRFVRRAFSGTDISPRDYMSRVTERIDFLKQKVYAWANRIRRYKRRVERYTQNRTFRSNERWVYRAWERPDQGVTDTRLPDDDAMSSFWRSIWSVPVSHTEGDWTRQVERACDPIPQMGAIDISPQDVARAVRPLPNWKSPGPDGLHNFWIKWFTRSHARLAYQFQSALESGSLPQFLTTGITHLLHKSGSTAEPKNYRPITCLPTVYKVLTSILRSKINSHIDKNLIMSPSQNGCRNGSRGTKELLLIDMTISQQVRRFRKDLSTCWIDYKKAYDSVPHTWLMRVLELYKIDTTLRTFLMSCMRQWSTVLRYPGCRHIQRNSEPVRIERGIFQGDSLSPLWFCLALNPLSTLLENSGLGYRLKRGGQVISHLLYMDDLKLFAPNNLQLMELLKVTETFSSAIRMEFGVDKCAVMHVKRGEVVESVGTQLTDSINLRSLSPTETYKYLGMSEALGINITDMKQSLKERFFGRLKKVFNSLLSGGNKVRAFNGWVMPVLMYSFGVLKWTQTELDALDRRVRTLLTAYRMHHPRSSVMRLYIPRKCGGRGFLNAKTLHNREVCSLREYFLATDVGMHRDVVAVDKGLTPLSLANENWRKPVVLDTNDRREVWQSKELHGRFFRAFHGPDVDQLASVAWLRFGDLFGETEGFVCAIMDEVIMTNNYRRFIVKDGTVDICRACHRPGESIRHIISGCSRLANGEYLHRHNLVARIIHQQLALKYSLVESELPYYRYEPDPVLDNGHITLYWDRSIITDRTIVANKPDIVVVDRSERRAMIVDISVPHDENLVKAEKDKQIKYIDLAREVVDMWDVDSAIIVPIVVSANGLIAKSLDQHLRRLALGGWIKALIQKAVLLDTARIVRRFLSLEP

SEQ ID NO: 12785 - protein, 901 aa, Mythimna impura
MAWQCRIERRIGGARALIGKLICFREGNTRPRVMRFVRRAFSGTDISPRDYMSCVTERIDFLKQKVYAWANRIRRYKRRVERYTQNRTFRSNERWAYRAWEQPDQGGADTRLPDDDAMSSFWRNIWSVPVSHTEGGWTREVERACEPIPEMGAITISPQDVARAVRPLPNWKSPGPDGLHNFWIKWLQRSHARLASQYQTALESGSLPEFLTTGVTHLLHKSGSTAEPKNYRPITCLPTVYKVLTSILRAKINHHVDNNAIMSASQNGCRNGSRGTKELLLIDMAISQQVRRSRKDLSTCWIDYKKAYDSVPHTWLMRVLELYKIDATLRTFLMSCMRQWRTVLRYPGCRHIQRNSEPVRIERGIFQGDSLSPLWFCLALNPLSTLLENSGLGYRLKRGGQVISHLLYIDDLKLFAPNNLQLMELLKVTETFSSAIRMEFGVDKCAVMHVKRGEIVESVGTQLSDSINLRSLSATETYKYLGMSEALGINATDMKQTLRERFFGRLKKVFNSLLSGGNKVRAFNGWVMPVLMYSFGVLKWTQTELDALDRRVRTLLTAYRMHHPRSSVMRLYIPRKCGGRGFLNAKTLHNREVCSLREYFLTADVGMHRDVVAVDKGLTPLSLANESWRKPVVLDTNDRREVWQSKELHGRFFRALHGPDVDQLASVAWLRVGDLFGETEGFVCAIMDEVIMTNNYRRFIVKDGTVDICRACHRPGESIRHIISGCSRLANGEYLHRHNLVARIIHQQLALNYSLVESEVPYYRYVPDPVLDNGDITLYWDRSIITDRTIVANKPDIVVVDRRERRTMIVDISVPHDENLVKAEKDKQIKYIDLAREVVDMWDVDSAIIVPIVVSANGLIAKSLDQHLRRLALGGWIKGLIQKAVLLDTARIVRRFLSLEP

SEQ ID NO: 12786 - protein, 962 aa, Mythimna impura
MHKKNRALVCTLDSLLKNIFESSENLVDTHSILYCGAVAACRLANIKFPNTDGTIRPKPAVPAWQYRIERRIDGARVLIGKLHSFREGNTRPRVMRFVRRAFLGTSISPQEYMSRVTERIDFLKQKVCAWASRIRRYKRRVDRYSQNRIFQSDERWVYRAWERPEQNVIDGLRPDDFATITFWRNIWSVPVSHTEGGWIREVERVCEAIPEMEKITISPADVAKAVRPLPNWKSPGPDGLQNFWLKWYRNSHAPLASQFQSTLESGSLPEYLTTGVTHLLHKTGNPAEPKNYRPITCLSTVYKLLTSILREKINRHIENNSIMSASQNGCRNGSRGTKELLLIDMAVSQQARRSRKDLSTCWIDYKKAYDSVPHTWLMRVLELYKIDTTLRTFLESCMRQWKTVLRYPGCRPIQGDDEPIRIKRGIFQGDSLSPLWFCLALNPLSTLLEDSGLGYRLRRGGQAISHLLYMDDLKLFAPSNLQLMELLKVTETFSSAIRMEFGVDKCAAMHVKQGEIMESEGIQLPDSIHLKSLSSTETYRYLGMSEALGINNADMKQSLKERFFGRLKKVLNSLLSGGNKVRAFNGWVMPVLMYSFGILKWTQTELDALDRRVRTLLTANRMHHPRSSVMRLYISRKCGGRGFLNAKTLHNREVCSLREYFLKTDVGMHRDVVAVDKGLTPLSMAKEDWRKPVVLTTDDRKEVWKGKELHGRFYRALHEPDVDFLASVAWLRFSDLFGETEGFVCAIMDEVILTNNYRKYIMKDGTVDVCRACHRPGESIRHIISGCSRLANGEYLHRHNQVARIIHQQLALKYNLVDSEVPYYKYVPDPVLENDHVTLYWDRSIITDRTIVANKPDIVVIDRLARRAIIVDVTIPHDENLVKAEKEKQIKYLDLAHEVVGMWNMDSAVIVPIVVTANGLIAKSFDDHLSKLSLRGWIKGLIQKAVLLDTARIVRRFLSLEP

SEQ ID NO: 12787 - protein, 1109 aa, Mythimna impura
MRWTQSINENVMRAYYGATEGGNNLTAYRVRVLSLFQVLEPAVNVSAQRLSDQVRVIQRNHMLDDTVLDRLRTEMGSHAIASSSQTAVPSQVSPSNHLPNHADEESTDMVTHVSTQCSNELRSALECAIREYRNMPLELRPRLPRLPMCNKNKALVAALDSQLSNYFDDCEDLTDIHSIMYCAAVAACRVAHVKFPNSDVATRPKPAVPAWQCRIERRIGGARALIGKLICFRDSNTRPRVMRFVRRAFSGTDISPRDYMSCVTERIDFLKQKVYAWANRIRRYKRRVERYTQNRAFRSNERWVYRAWEQPDQSVTDTRLPDDDAMSSFWRNIWSVPVRHTEGGWTREVERACEPIPEMGAITISPQDVARAVRPLPNWKSPGPDGLHNFWIKWLQRSHARLASQYQTALESGSLPEFLTTGVTHLLHKSGSTAEPKNYRPITCLPTVYKVLTSILRAKINHHVDNNAIMSASQNGCRNGSRGTKELLLIDMAISQQVRRSQKDLSTCWIDYKKAYDSVPHTWLMRVLELYKIDTTLRTFLMSCMRQWRTVLRYPGCRHIQRNSEPVRIERGIFQGDSLSPLWFCLALNPLSTLLENSGLGYRLKRGGQVISHLLYMDDLKLFAPNNLQLMELLKVTETFSSAIRMEFGVDKCAVMHVKRGEIVESVGTQLSDSINLRSLSPTETYKYLGMSEALGINATDMKQTLRERFFGRLKKVFNSLLSGGNKVRAFNGWVMPVLMYSFGVLKWTQTELDALDRRVRTLLTAYRMHHPRSSVMRLYIPRKCGGRGFLNAKTLHNREVCSLREYFLAADVGMHRDVVAVDKGLTPLSLANESWRKPVVLDTNDRREVWQSKELHGRFFRALHGSDVDQLASVAWLRVGDLFGETEGFVCAIMDEVIMTNNYRRFIVKDGTVDICRACHRPGESIRHIISGCSRLANGEYLHRHNLVARIIHQQLALKYSLVESEVPYYRYMPDPVLDNGDITLYWDRSIITDRTIVANKPDIVVVDRRERRTMIVDISVPHDENLVKAEKDKQIKYIDLAREVVDMWDVDSAIIVPIVVSANGLIAKSLDQHLRRLALGGWIKGLIQKAVLLDTARIVRRFLSLEP

SEQ ID NO: 12788 - protein, 1202 aa, Phlogophora meticulosa
MLTRSRARVLNAPKTSSGSSLSSASQLPGPAPDVSPVTPAAAVASSSSDEYYSPPTSPPPVRRCGRGRPPASLGLRGPPASARVPASGGSVQRMRWTQSINENVMRSYYGATEGGTNLTAYRSRMLSLFQVLEPAVNVSAQRLSDQVRVIQRNHMLDDTVLDRLRLNSRSNRVMPASPLVAVQLQSLPIVSPRPDYVGEEDDDAAISVSSQCNVRLRSALEDAFREYRSTPPELRQRLPRLPMHKKNKALMCALDSLLSNSFDNSKDLADTHSILYCAAAAACRVANVKFPNSKKATRPAVPAWQCRIERRIGEARVLIGKLICFREGNTRPRVMRFVRRAFSGTDISSRDYLTRVTERIDFLKQKICAWANRIRRYKRRVERYTQNRTFRSDERWVYRAWERPDQGVIDTCLPDDEAMYSFWRSIWSVPVSHTEGDWTREVERACEPLPVMGTINISPQDVACAVCPLPNWKSPGPDGLHNFWIKWLKSSHARLATQFQSALESGSLPQFLTTGITHLLHKSGSTAEPKNYRPITCLPTVYKVLTSILRSKINNHIETSSIMSVSQNGCKNGSRGTKELLLIDMAISQQVRRSRKDLSTCWIDYKKAYDSVPHTWLMRVLELYKIDATLRTFLTSCMRQWRTVLHYPGCRQFRENSEPIRIERGIFQGDSLSPLWFCLALNPLSTQLEGSGLGYRLRRGTQVISHLLYMDDLKLFAPNNLQLMELLKVTETFSNAIRMDFGVDKCAVMHVKRGGIVESAGTQLSDSIYLRSLSSTETYKYLGMSEALGINAADMKQSLKERFFCRLNKVLNSLLSGGNKVRAFNGWVMPVLMYSFGILKWTQTELDALDRRVRTLLTANRMHHPRSSVMRLYISRKCGGRGFLNAKTLHNREVCSLRKYFIEADVGMHRDVVAVDKGLTPLSLANENWRKPIVLDTTDRMEIWKSKELHGHFYRVLHGPDVDLLASISWLRFGDLFGETEGFVCAIMDEVIMTNNYRKYIVKDGTVDICRACHRPGESIRHIISGCSRLANGEYLHRHNLVARIIHQQLALKYNLVELEVPYYKYVPDPVLENGNITLYWDRSIITDRTIVANKPDIVVIDRSERRTMIVDITVPHDENLVKAEKEKQMKYLDLAREVVDMWEVNTAVIVPIVVTANGIIAKSLDQHLRRLSLGSWIKGLIQKAVLLETARIVRRFLSQEP

SEQ ID NO: 12789 - protein, 1200 aa, Phlogophora meticulosa
MLTRSAARRARPPPLASSLSSASPPPESSPIVSTVTPAVAIASSSSDEYFSPPTSPPPARRRRGRRPPDSIGPRGPPASDRVPASGGSVQRMRWTQSINENVMRSYYGATEGGTNLTAYRGRMLSLFQMLEPAVNVSAQRLSDQVRVIQRNHMLDDVVLDRLRLNSRIYHVTPALPPVAVQLQSLPSVSPRPDYVGEEDDDAAISVSSQCNVRLRSALEDAFREYRSTPPELRSRLPRLPMHKKNKALMSALDSLLTKSFDNSKDLTDTHSILYCAAAAACRVANVKFPNTERATRPTVPAWQCRIQRRIDEARALIGKLICFREGNTRPRVMRFVRRAFSGTDISSRDYLTRVTERIDFLKQKICAWANRIRRYKRRVERYTQNRTFRSDERWVYRAWERSDQGVTDTCLPDDEAMCSFWRSIWSVPVSHTEGNWTREIERACEPLPEMGVINISPQDVASAVRPLPNWKSPGPDGLHNFWIKWLQSSHARLACQFQSALESGSLPQFLTTGITHLLHKSGSTAEPRNYRPITCLPTVYKVLTSILRSKINNHIDSNLIMSFSQNGCRNGSRGTKELLLIDTAISQQVRRSRKDLSTCWVDYKKAYDSVPHTWLMRVLELYKVDATLRTFLMSCMGQWRTVLRYPGCQQTRENSEPIRIERGIFQGDSLSPLWFCLALNPLSTLLEGSGLGYRLRTGGQVISHLLYMDDLKLFAPNNLQLMELLKVTETFSSAIRMDFGVDKCAVMHVKRGEIVESVGTQLSDSIYLRSLSSTETYKYLGMSEALGINATDMKQSLKERFFGRLNKVLNSLLSGGNKVRAFNGWVMPVLMYSFGILKWTQTELDALDRRVRTLLTANRMHHPRSSVMRLYIPRKCGGRGFLNAKTLHNREICSLREYFLKADVGMHRDVVAVDKTFTPLSLANKNWRKPIVLDTADRMEIWKSKELHGRFYRVLHGPDVDLVASISWLRFGDLFGETEGFVCAIMDEVIMTNNYRKYIVKDGTVDICRACHRPGESIRHIISGCSRLANGDYLHRHNLVARIIHQQLALKYNLVDLEVPYYKYVPDPVLENGSITLYWDRSIITDRTIVANKPDIVVIDRSERRTMIIDITVPHDENLVKAEKEKQMKYLDLAREVVDMWDVNTAVIVPIVVTANGIIAKSLDQHLKRLSLGSWIKGLIQKAVLLDTARIVRRFLSQEP

SEQ ID NO: 12790 - protein, 1248 aa, Phlogophora meticulosa
MFLVQYETYPSRTGRTGALLSQHSDSTRISHWKSRRHNNNNNKKSKMLTRSRARVLNAPKTSSGSLLSSASQLPGPAPDVSPVTPAAAVASSSSDEYYSPPTSPPPVRRCGRGRPPASLGLRGTPASARVPVSGGSVQRMRWTQSINENVMRSYYGATEGGTNLTAYRSRMLSLFQVLEPAVNVSAQRLSDQVRVIQRNHMLDDTVLDRLRLNSRSIRVMPASPLVAVQLPTLPIISPRPDYVGEEDDDAAISVSSQCNVRLRSALEDAFREYRSTPPGLRQRLPRLPMHKKNKALMCALDSLLSNSFDNSKDLADTHSILYCAAAAACRVANVKFPNSKKATRPAVPAWQCRIERRIGEARVLIGKLICFREGNTRPRVMRFVRRAFSGTDISSRDYLTRVTERIDFLKQKICAWANRIRRYKRRVERYTQNRTFRSDERWVYRAWERPDQGVIDTCLPDDEAMYSFWRSIWSVPVSHTEGDWTREVERACEPLPVMGTINISPQDVACAVRPLPNWKSPGPDGLHNFWIKWLKSSHARLATQFQSALESGSLPQFLTTGITHLLHKSGSTAEPKNYRPITCLPTVYKVLTSILRSKINNHIETSLIMSVSQNGCKNGSCGTKELLLIDMAISQQVRRSRKDLSTCWIDYKKAYDSVPHTWLMRVLELYKIDTTLRTFLTSCMRQWRTVLHYPGCRQFRENSEPIRIERGIFQGDSLSPLWFCLALNPLSTLLEGSGLGYRLRRGAQVISHLLYMDDLKLFAPNNLQLMELLKVTETFSSAIRMDFGVDKCAVMHVKRGGIVESAGTQLSDSIYLRSLSSTETYKYLGMSEGLGINAADMKQSLKERFFGRLNKVLNSLLSGGNKVRAFNGWVMPVLMYSFGILKWTQTELDALDRRVRTLLTANRMHHPRSSVMRLYISRKCGGRGFLNAKTLHNREVCSLREYFLEADVGMHRDVVAVDKGLTPLSLANENWRKPIVLDTTDRMEIWKNKELHGRFYRVLHGPDVDLLASISWLRFGDLFGETEGFVCAIMDEVIMTNNYRKYIVKDGTVDICRACHRPGESIRHIISGCSRLANGEYLHRHNLVARIIHQQLALKYNLVELEVPYYKYVPDPVLENGNITLYWDRSIITDRTIVANKPDIVVIDRSERRTMIVDITVPHDENLVKAEQEKQMKYLDLAREVVDMWDVNTAVIVPIVVTANGIIAKSLDQHLRRLSLGSWIKGLIQKAVLLETARIVRRFLSQEP

SEQ ID NO: 12791 - protein, 1202 aa, Phlogophora meticulosa
MLTRSRARVLNAPITSSGSSLSSASQLPGPAPDVSPVTPAAAVASSSSDEYYSPPTSPPPVRRCGRGRPPASLGLRGTPASARVPASGGSVQRMRWTQSINENVMRSYYGATEGGTNLTAYRGRMLSLFQVLEPAVNVSAQRLSDQVRVIQRNHMLDDTVLDRLRLNSRSNRVMPASSLVAVQLPSLPIVSPRPEYVGEEDDDAAISVSSQCNVRLRSALEDAFREYRSTPPELGQRLPRLPMHKKNKALMCALDSLLSNSFDNSKDLADTHSILYCAAAAACRVANVKFPNSKKATRPAVPAWQCRIERRIGEARVLIGKLICFREGNTRPRVMRFVRRAFSGTDISSRDYLSRVTERIDFLKQKICAWANRIRRYKRRVERYTQNRTFRSDERWVYRAWERPDQGVIDTCLPDDKAMYSFWRSIWSVPVSHTEGDWTREVERACEPLPVMGTINISPQDVACAVRPLPNWKSPGPDGLHNFWIKWLKSSHARLATQFQSALESGSLPQFLTTGITHLLHKSGSTAEPKNYRPITCLTTVYKVLTSILRSKINNHIETSSIMSVSQNGCKNGSRGTKELLLIDMTISQQVRRSRKDLSTCWIDYKKAYDSVPHTWLMRVLELYKIDATLRTFLTSCMRQWRTVLHYPGCRQFRENSEPIRIKRGIFQGDSLSPLWFCLALNPLSTLLEGSGLGYRLRRGTQVISHLLYMDDLKLFAPNNLQLMELLKVTETFSSAISMDFGVDKCAVMHVKRGGIVESAGTQLSDSIYLRSLSSTETYKYLGMSEALGINAADMKQSLKERFFGRLNKVLNSLLSGGNKVRAFNGWVMPVLMYSFGILKWTQTELDALDRRVRTLLTANRMHHPRSSVMRLYISRKCGGRGFLNAKTLHNREVCSLREYFLEADVGMHRDVVAVDKGLTPLSLANENWRKPIVLDTTDRMEIWKSKELHGRFYRVLHGSDVDLLASISWLRFGDLFGETEGFVCAIMDEVIMTNNYRKYIVKDGTVDICRACHRPGESIRHIISGCSRLANGEYLHRHNLVAGIIHQQLALKYNLVELEVPYYKYVPDPVLENGNITLYWDRSIITDRTIVANKPDIVVIDRSERRTMIVDITVPHDENLVKAEKEKQMKYLDLAREVVDMWDVNTAVIVPIVVTANGIIAKSLDQHLRRLSLGSWIKGLIQKAVLLETARIVRRFLSQEP

SEQ ID NO: 12792 - protein, 1161 aa, Phlogophora meticulosa
MLTRSRARVLNAPTTSSGSSLSSASQLPGPAPDVSPVTPAAAVASSSSDEYYSPPTSPPPVRRCGRGRPPASLGLRGPPASARVPASGGSVQRMRWTQSINENVMRSYYGATEGGINLTAYRGRMLSLFQVLEPAVNVSAQRLSDQVRVIQRNHMLDDTVLDRLRLNSRSNRVMPASPLVAVQLASLPIVSPRPDYVGEEDDDAAISVSSQCNVRLRSALEDAFREYRSTPPELRQRLPRLPMHKKNKALMCALDSLLSNSFDNSKDLADTHSILYCAAAAACRVANVKFPNSKKATRPAVPAWQCRIERRIGEARVLIGKLICFREGNTRPRVMRFVRRAFSGTDISSRDYLTRVTERIDFLKQKICAWANRIRRYKRRVERYTQNRTFRSDERWVYRTWERPDQGVTDTFLPDDEAMCLFWRSIWSVPVSHTEGDWTREVERTCEPLPEMGAINISPQDVACAVRPLPNWKSPGPDGLHNFWIKWLKSSHARLASQFQSALESGSLPQFLTTGITHLLHKSGSTAEPKNYRPITCLPTVYKVLTSILRSKINNHIDSTSIMSVSQNGCKNGSRGTKELLLIDMAISQQVRRSRKDLSTCWIDYKKAYDSVPHTWLMRVLELYKIDATLRTFLKSCMGQWRTVLHYPGCRQFQENSEPIRIERGIFQGDSLSPLWFCLALNPLSTLLEGSGLGYRLRRGGQVISHLLYMDDLKLFAHNNLQLMKLLKVTETFSSAIRMDFGVDKCAVMHVKRGGIVESAGTQLSDSIYLRSLSSTETYKYLGMSEALGINTADMKQSLKERFFGRLNKVLNSLLSGGNKVRAFNSWVMPVLMYSFGILKWTQTELDALDRRVRTLLTANRMHHPRSSVMRLYISRKCGGRGFLNAKTLHNREVCSLREYFLETDVGMHRDVVAMDKALTPLSLANENWRKPIVLDTTDRMEIWKSKELHGRFYRVLHGPDVDLSASVSWLRFGDLFGETEGFVCAIMDEVIMTNNYRKYIVKDGTVDICRACHRSGESIRHIISGCSRLANGDYLHRHNFVAKIIHQQLALKYNLVESEVPYYKYVPDPVLENGNITLYWDRSIITDRTIVANKPDIVVIDRLERRTMIVDITVPHDENLVKAEKEKQIKYLDLALRNKGNNNNNKSFISDSSCDYIHIC

SEQ ID NO: 12793 - protein, 868 aa, Laspeyria flexula
MRFVNQAFSGTDVSPNEYLSRVTERIDFLKQKVYAWANRIRRFKKRVDRYTVNRLFQRDQRRVYRNWERPTQEVSDERLPNATATNEFWSSIWSEPVLHSEGEWIWDVERACERIPLMESVVISAEDIASAVRPMANWKSPGPDGLHNFWLRWLRSSHGRLASQFQSALESGSLPEFLTTGCTHLLHKSGSVTEPGNYRPITCLPSVYKLLTSVLRAKITKHIDDTRTMSISQNGCRRGSRGTKELLLVDMTISQQVRRSRKDLATCWIDYKKAFDSVPHSWLLRVLELYKVDITLRTFLESCMRQWRTVLTYPGCRLICGNGEPVRIKRGIFQGDSLSPLWICLALNPLGTLLESSGLGYRLRRGGHVISHLLYMDDLKLIAPTDLQLKGLLKATEDFSKSIKMDFGVDKCAIMHVKRGEIVESDGIQLSDSINFRSLLVTDTYKYLGMSQALGIKETDMKQSLQERFFGRLKKVLNSLLSGGNKVRACNGWVMPLLMYSFGILKWTQTELDTLDRRVRTMLTAYRMHHPRSSVMRLYIPRKCGGRGFLNAKTLHNREVYNLREYFMGKVEGMHRDVVAVDSGLTPLSLAKDNWRRPIVLSTDDRRQVWQSKELHGRFYKALHGPDVDRVASVAWLRFGDLFGETEGFACAIADEVIKTNNYRKYILRDGTVDICRACHRPGESLRHIVSGCSRLANGEYLHRHNQVARIIHQQLALRYKLVDVEVPYYRYAPEPVLENSHTTLYWDRSIITDRTVIANKPDIVVLDRSKRLAVIVDITVPHDENLVKAEKDKQTKYLDLAHEIVDMWDVDSAIIVPIVVTVNGLEAKSLDQHLKRLGLGSWLKGLIQKAVLLGTARIVRRFLSLEP

SEQ ID NO: 12794 - protein, 1211 aa, Xestia xanthographa
MSPMLTRHRAKLQKEAHPPSPGSSLSSASQPPERATPVSTVSPVAAVASSSSDEFFSPPSTPSPPPRGRRRGRGRPPAGLGPRGQQAPSRVPAAGGNVSRMRWTHSINENVMRAYYGATEGGSNLTAYRSRMLSLFQVLEPAVSVEAQRLSDQVRVIQRNHMLDDTVLDRLRSESRSNLVTPASPMIAVQQQNIPSAPPRSDYDGEEDRDEVISVSTQCNAQLRSALEGAFREYRSTPPELRPRLPRLPMHNKNKALMCALDSQLSNCFDSSKDLADTHSILYCGAVAACRVAHVKFPNNDRATRPKLAVPAWQCRIERRIGEARALIGKLICFREGNTRPRVMRFVRRAFSGTDISFRDYLARVTERIDSLKQKICAWASRIRRYKRRVERYTQNRTFQSDERWVYRAWERPDQGVTDTRLPDESATYSFWRNIWSVPVSHTEGDWTREVEQACDPIPEMGAIIISPQDVARAVRPLPNWKSPGPDGLHNFWIKWFQRSHARLASQFQSALESGSLPQFLTTGITHLLHKSGSVAEPKNYRPITCLPTVYKVLTSILRAKINQHIDSNSIISASQNGCRNGSRGTKELLLIDMAISQQVRRSRKNLSTCWIDYKKAYDSVPHTWLMKVLELYKIDATLRTFLMSCMGHWRTVLRYPGCRQIQGNSEPIRIERGIFQGDSLSPLWFCLALNPLSTLLERSGLGYLLRRDGQVISHLLYMDDLKLFAPNNLQLMKLLKVTETFSSAIRMEFGVDKCAVMHVKRGEIMESVGTQLSDSIHLRSLSSTETYKYLGMSEALGINTADVKQSLRERFFGRLNKVLGSLLSGGNKVRAFNGWVMPVLMYSFGILKWTQTELDALDRRVRTLLTANRMHHPRSSVMRLYIPRKCGGRGFLNAKTLHNREVCSLREYFLEADGEMHRDVVSVDKGLTPLSLANENWRKPKVLDTNDRKVEWQGKELHGCFYRALHGPDVDFLPSVSWLRFGDLFGETEGFICAIMDEVMMTNNYRKYIVKDGTVDICRACHRPGESIRHIISGCSSLANGEYLHRHNLVARIIHQQLALKYNLVESEVPYYKYAPDPVLDNGHITLYWDRPITTDRTVVANRPDIVVIDRLEGRTMIVDITIPHDENLVKAEKDKQFKYLDLAREVVDMWDVGTAVIVPIVVSANGLIAKSLDQHLRRLSLGSWIKGLLQKAVLLDTARIVRRFLSQEP

SEQ ID NO: 12795 - protein, 968 aa, Xestia xanthographa
MTFSLMDCVHRMRCTLPPGAGTLSEAGGPRGPKPSGGRRPPRRHVAACRVAHVKFPSDRATLPKPAVPAWQYRIERRIGGARALIGKLVCFREGNTRPRVMRFVRQAFAGTDISPRDYMSRVTERIDFLKQKVYAWANRIRRYKRRVDRYTQNRTFQKDERWVYRAWERPDQGVADTHLPDDDAMCSFWRSIWSVPVSHAEGEWTRLIERACDPISEMGAITISPQDVARAVRPLPNWKSPGPDGLHNFWIKWFTRSHARLATQFQSALESGSLPEFLTTGITHLLHKSGSTAEPKNYRPITCLPTVYKVLTSILRTKISKHIDDNSVMSASQNGCRNGSRGTKELLLIDMAISHQVRRSRKDLSTCWIDYKKAYDSVPHTWLMRVLELYKVDATLRTFLMSCMGQWRTVLRYPGCQQIQRNSEPIRIERGIFQGDSLSPLWFCLALNPLSTLLEDSGLGYRLRKDGQVISHLLYMDDLKLFAPNDLRLMELLKVTETFSNAIRMEFDVDKCAVMHVKRGEIVESVGTQLSDSITLRSLSATETYKYLGMSEALGVNVADMKQLLKERFFGRLKKVLNSLLSGGNKVRAFNGWVMPVLMYSFGILKWTQTELDALDTKIRKLLTAYRMHHPRSSVMRLYIPRKCGGRGFLNAKTLHNREICSLKEYFLGTDVGMHRDVVTMDKGLTPLSLAKENWRKPPVLDTNDRREVWQSKELHGRFFRALHGPDVDLSASVAWLRSGDLFGETEGFVCAIMDEVMMTNNYRRFIVKDGTVDICRACHRPGESIRHIISGCSRLANGEYLHRHNLVARIIHQQLALKYNLVESEVPYYRYVPDPVLDNGCITLYWDQSIITDRTIVANKPDIVVVDRSERRAMIVDITVPHDENLVKAEKDKQIKYLDLAREVVDMWEVDSAIIVPIVVSAHGLIAKSLDQYLRRLSLGSWIKGLIQKAVLLDTARIVRRFLSLEP

SEQ ID NO: 12796 - protein, 1241 aa, Xestia xanthographa
MHEPSLVLIKAITSLVMYSEGLGFEYQALLMGFIIIIINETTKMLTRSAAARRARLPPPDSSLSSASPPPEPSPIVSAVIPAVAVASSSSDEYFSPPTTPPPARRRGGRRPPDGLGPRGPPASDRVPAPGGSVQRMRWTQSINANVMRAYYGATEGGNNLTAYRVRMLSLFQVLEPAVNVSAQRLSDQVRVIQRNRMLDDTVLDRLRTEIQSNHVIATPSQAVVPPQSSIIPNCDNDVSNDMVTNVSTQCNVEMRSALEGAIREYRFMQPDLRPRIPRLPMHNKNRALVAVLDSQLSNYFDNCEDLTDVHSILYCAAVATCRVAHVKFPSDRATRPKPAVPAWQYRIERRIGGARALIGKLVCFREGNTRPRVMRFVRQAFSGTDISPRDYMSRVTERIDFLKQKVYAWANRIRRYKRRVDRYTQNRTFQKDERWVYRAWERPDQGVADTHLPDDDAMCSFWRSIWSVPVSHAEGEWTRVIERACDPISEMGAITISPQDVARAVRPLPNWKSPGPDGLHNFWIKWFTRSHARLATLFQSALESGSLPEFLTTGITHLLHKSGSTAEPKNYRPITCLPTVYKVLTSILRTKISKHIDDNSVMSASQNGCRNGSRGTKELLLIDMAISHQVRRSRKDLSTCWIDYKKAYDSVPHTWLMRVLQLYKVDATLRTFLMSCMGQWRTVLHYPGCRQIQRNSEPIRIERGIFQGDSLSPLWFCLALNPLSTLLEDSGLGYRLRKDGQVISHLLYMDDLKLFAPNDLRLMELLKVTETFSNAIRMEFGVDKCAVMHVKRGEIVESVGTQLSDSITLRSLSATETYKYLGMSEALGVNVADMKQSLKERFFGRLKKVLNSLLSGGNKVRAFNGWVMPVLMYSFGILKWTQTELDALDTKVRKLLTAYRMHHPRSSVMRLYIPRKCGGRGFLNAKTLHNREICSLREYFLGTDVGMHRDVVTMDKGLTPLSLAKENWRKPPVLDTNDRREVWQSKELHGRFFRALHGPDVDLSASVAWLRSGDLFGETEGFVCAIMDEVMMTNNYRRFIVKDGTVDICRACHRPGESIRHIISGCSRLANGEYLHRHNLVARIIHQQLALKYNLVESEVPYYRYVPDPVLDNGCITLYWDQSIITDRTIVANKPDIVVVDRSERRAMIVDITVPHDENLVKAEKDKQIKYLDLAREVVDMWEVDSAIIVPIVVSAHGLIAKSLDQYLRRLSLGSWIKGLIQKAVLLDTARIVRRFLSLEP

SEQ ID NO: 12797 - protein, 868 aa, Xestia xanthographa
MRFVRRAFSGTDISFRDYLARVTERIDSLEQKICAWASRIRRYKRRVERYTQNRTFQSDERWVYRAWERPDQGVTDTRLPDDSAMYSFWRNIWSVPVSHTEGDWTREVEQACDPIPEMGAIIISPQDVARAVRPLPNWKSPGPDGLHNFWIKWFQRSHARLASQFQSALESGSLPQFLTTGITHLLHKSGSVAEPKNYRPITCLPTVYKVLTSILRAKINQHIDSNSIMSASQNGCRNGSRGTKELLLIDMAISQQVRRSRKNLSTCWIDYKKAYDSVPHTWLMRVLELYKIDATLRTFLMSCMGHWRTVLRYPGCRQIQGNSEPIRIERGIFQGDSLSPLWFCLALNPLSTLLERSGLGYLLRRDGQVISHLLYMDDLKLFAPNNLQLMKLLKVTETFSSAIRMEFGVDKCAVMHVKRGEIMESVGTQLSDSIHLRSLSSTETYKYLGMSEALGINTADMKQSLRERFFGRLNKVLGSLLSGGNKVRAFNGWVMPVLMYSFGILKWTQTELDALDRRVRTLLTANRMHHPRSSVMRLYIPRKCGGRGFLNAKTLHNREVCSLREYFLEADGEMHRDVVSVDKGLTPLSLANENWRKPKVLDTNDRKVEWQGKELHGRFYRALHGPDVDFLPSVSWLRFGDLFGETEGFICAIMDEVMMTNNYRKYIVKDGTVDICRACHRPGESIRHIISGCSSLANGEYLHRHNLVARIIHQQLALKYNFVESEVPYYKYAPDPVLDNGHITLYWDRPITTDRTVVANRPDIVVIDRLERRTMIVDITIPHDENLVKAEKDKQFKYLDLAREVVDMWDVGTAVIVPIVVSANGLIAKSLDQHLRRLSLGSWIKGLIQKAVLLDTARIVRRFLSQEP

SEQ ID NO: 12798 - protein, 1215 aa, Cosmia trapezina
MRYIPLTDRWTDGRTDCAGSVPNRVPFGTLRLRNPKNGGGRCKNYYNNNNIIESIKCSSSSSDEYFSPPTTPPPARRRGGRRPPDGLGPRGPPASDRVPAPGGSVQRMRWTRAINENVMRSYYGATEGGNNLTAYRVRMHSLFQVLEPALNVSAQRLSDQVQVIQRNHMLDDTVLDRLRNEMQSSRVIAPLSQTIVAPPPPQCNTTQADEGSDGTAANVSTQCNEELRSALEGAIQEYRFVSPELRPRLPRLPMHNKNRALVAALDSQLSNYFDDCEDLTDTHSILYCAAVAACRVAHVKFANDSRATRPKPAVPAWQCRIERRIGGARALIGKLICFREGNTRPRVMRFVKRAFSGTDVSPQDYMSRVTERIDFLRQKVYAWANRIRRYKRRVDRYTQNRTFQSDERWVYRGWERPDQGVTDTRLPDDDAMCSFWRSIWSVPVSHTEGDWAREVRRACDPIPEMGAITICPQDVARAVRPLPNWKSPGPDGLHNFWIKWFLGSHARLAAQYQSALQSGSLPQFLTTGITHLLHKSGSTTEPKNYRPITCLPTVYKVLTSILRAKINEHIDTNSIMSASQNGSRNGSRGTKELLLIDMAISQQVRRSRRDLSTCWIDYKKAYDSVPHTWLMRVLELYKVDATLRTFLMSCMGQWRTVLRYPGCRNIQRNSEPIRIERGIFQGHSLSPLWFCLALNPLSTLLEDSGLGYRLRRGGQVISHLLYMDDLKLFAPSNLQLMELLKVTETFSSAIRMEFGVDKCAVMHVKRGEIVESVGTQLPDSINLRTLSAAETYKYLGMSEALGINVADMKQSLKERFFGRLKKVFNSLLSGGNKVRAFNGWVMPVLMYSFGILKWTQTELDALDRRVRTLLTAYRMHHPRSSVMRLYIPRKCGGRGFLNAKTLHNREICSLREYFLETDVGMHRDVVAVDKGLTPLSLAKENWRKPVVLDANDRMEVWQSKELHGRFFRALHGPDVNLLASVAWLRSGDFFGETEGFVCAIMDEVIMTNNYRRFIVKDGTVDICRACHRPGESIRHIISGCSRLANEEYLHRHNLVARIIHQQLALKYSLVESEVPYYRYVPDPVLENGHITLYWDRSIITDRTIVANKPDIVVVDRTERRAMIVDITVPHDGNLVKAEKDKQIKYIDLAREVVDMWDVDSAVIVPIVVSANGLIAKSLDQHLRRLSLGSWIKGLIQKAVPLDTARIVRRFLSLEP

SEQ ID NO: 12799 - protein, 1146 aa, Cosmia trapezina
MTGVFVLHDSFLFKSNMMKIKTKNNNNNNNNVSRMRWTQSINENVMRAYYGATEGGINLTAYRGRMLSLFQVLEPAVNVSAQRLSDQVRVIQHNHRLDNATLDRLRSEMQSSSASNPPPSQNVMHVPAEIPLRANQRDEEENARAISADNLCNVEIRSALEDAIREYRFTSPDLRPRLPRLPMNKKNRALVCALDALLPNFIESSADLCDTHSILYCTAVAACRVACVKFPNTDRATRPKPAAPAWQCRIERRINEARVLIGKLICFREGNTRPRVMRFVRRAFSGTNISPQEYVSRVTERIDFLKQKVYAWANRIRRYRRRVDRYSQNRMFQSDERWVYRAWERPIPTQGVTDVRPPDNETMSAFWRSIWSVPVSHTEGDWMRIVEQACDSIPNMDAVTISPLDVACAVRPLPNWKSPGPDGLHNFWIKWLQRSHACLASQFQSSLETGSLPLLFTTGVTHLLHKSGSTAEPKNYRPITCLPTVYKVLTSILRAKIAHHIYNNSIMSVSQNGCRNGSRGTKELLLIDMTISQQVRRSRKDLSTCWIDYKKAYDSVPHTWLIRVLELYKIDATLRTFLMSCMGQWKTVLLYPGCRRIPEIDEPIRIERGIFQGDSLSPLWFCLALNPLSTLLEDSGLGYRLRRGGQVISHLLYMDDLKLFAPNNLRLMELLKVTENFSSAIRMEFGVDKCAVMHVKRGEIMESVGTQLSDSIHLRSLSSTETYKYLGMSESLGINVADMKQSLKERFFGRLKKVFNSLLSGGNKVRAFNGWVMPVLMYSFGVLKWTQTELDALDRRVRTLLTAYRMHHPRSSVMRLYIPRKCGGRGFLNAKTLHNREICSLREYFLEADVGMHRDVVAVDKGLTPLSLAKENWRKPAVLDTNDRREVWQGKELHGRFFRALHGPDVDFLASVSWLRFGDLFGETEGFVCAIMDEVIMTNNYRKYIVKDGTVDICRACHHPGESIRHIVSGCSRLANGEYLHRHNLVARIIHQQLALQYNLVESEVPYYRYVPDPVLENGQATLYWDRSIITDRTIVANKPDIVVIDRRERRAIIVDIAVPHDENLVKAEKDKKIKYLDLAHEVVDMWDVDSAIIVPIIVTVNGLIAQSLDQHLRRLSLRGWIKGLIQKAVLLDTARIVRRFLSLEP

SEQ ID NO: 12800 - protein, 1200 aa, Cosmia trapezina
MLTRSATRKARLPPPDSSLSSASPPPVPSLTVSAVSTPAAVVASSSSDEYFSPPTTPPPARRRGGRRPPDGLGPRGPPASDRVPAPGGSVQRMRWTRAINENVMRSYYGATEGGNNLTAYRVRMHSLFQVLEPALNVSAQRLSDQVRVIQRNHMLDDTVLDRLRNEMQSSRVIAPLSQTIVAPPPPQCNTTQADEGSDGTAANVSTQCNEELRSALEGAIQEYRFVSPELRPRLPRLPMHNKNRALVAALDSQLSNYFDDCEDLTDTHSILYCAAVAACRVAHVKFANDSRATRPKPAVPAWQCRIERRIGGARALIGKLICFREGNTRPRVMRFVRRAFSGTDVSPQDYMSRVTERIDFLRQKVYAWANRIRRYKRRVDRYTQNRTFQSDERWVYRGWERPDQGVTDTRLPDDDAMCSFWRSIWSVPVSHTEGDWAREVRRACDPIPEMGAITICPQDVARAVRPLPNWKSPGPDGLHNFWIKWFLGSHARLAAQYQSALQSGSLPQFLTTGITHLLHKSGSTTEPKNYRPITCLPTVYKVLTSILRAKINEHIDTNSIMSASQNGSRNGSRGTKELLLIDMAISQQVRRSRRDLSTCWIDYKKAYDSVPHTWLMRVLELYKVDATLRTFLMSCMGQWRTVLRYPGCRNIQRNSEPIRIERGIFQGDSLSPLWFCLALNPLSTLLEDSGLGYRLRRGGQVISHLLYMDDLKLFAPSSLQLMELLKVTETFSSAIRMEFGVDKCAVMHVKRGEIVESVGTQLPDSINLRTLSAAETYKYLGMSEALGINVADMKQSLKERFFGRLKKVFNSLLSGGNKVRAFNGWVMPVLMYSFGILKWTQTELDALDRRVRTLLTAYRMHHPRSSVMRLYIPRKCGGRGFLNAKTLHNREICSLREYFLETDVGMHRDVVAVDKGLTPLSLAKENWRKPVVLDANDRMEVWQSKELHGRFFRALHGPDVNLLASVAWLRSGDLFGETEGFVCAIMDEVIMTNNYRRFIVKDGTVDICRACHRPGESIRHIISGCSRLANEEYLHRHNLVARIIHQQLALKYSLVESEVPYYRYVPDPVLENGHITLYWDRSIITDRTIVANKPDIVVVDRTERRAMIVDITVPHDGNLVKAEKDKQIKYIDLAREVVDMWDVDSAVIVPIVVSANGLIAKSLDQHLRRLSLGSWIKGLIQKAVLLDTARIVRRFLSLEP

SEQ ID NO: 12801 - protein, 1128 aa, Cosmia trapezina
MELLIIITDRVPAPGGSVQRMRWTRAINENVMRSYYGATEGGNNLTAYRVRMHSLFQVLEPALNVSAQRLSDQVRVIQRNHMLDDTVLDRLRSEMQSSRVIAPLSQTIVAPPPPQCNTNQADEGSDDTAANVSTQCNEELRSALEGAIQEYRFVSPELRPRLPRLPMHNKNRALVAALDSQLSNYFDDCEDLTDTHSILYCAAVAACRVAHVKFANDSRATRPKPAVPAWQCRIERRIGGARALIGKLICFREGNTRPRVMRFVRRAFSGTDVSPQDYMSRVTERIDFLRQKVYAWANRIRRYKRRVDRYTQNRTFQSDERWVYRGWERPDQGVTDTRLPDDDAMCSFWRSIWSVPVGHTEGDWAREVERACDPIPEMGAITICPQDVARAVRPLPNWKSPGPDGLHNFWIKWFPGSHARLAAQYQSALQSGSLPQFLTTGITHLLHKSGSTAEPKNYRPITCLPTVYKVLTSILRAKINEHIDTNSIMSVSQNGSRNGSRGTKELLLIDMAISQQVRRSRKDLSTCWIDYKKAYDSVPHTWLMRVLELYKVDATLRTFLMSCMGQWRTVLRYPGCRNIQRNSEPIRIERGIFQGDSLSPLWFCLALNPLSTLLEDSGLGYRLRRGGQVISHLLYMDDLKLFAPNNLQLMELLKVTETFSSAIRMEFGVDKCAVMHVKRGEIVESVGTQLSDSINLRTLSAAETYKYLGMSEALGINVADMKQSLKERFFGRLKKVFNSLLSGGNKVRAFNGWVMPVLMYSFGILKWTQTELDALDRRVRTLLTAYRMHHPRSSVMRLYIPRKCGGRGFLNAKTLHNREICSLREYFLEADVGMHRDVVAVDKGFTPLSLAKENWRKPVVLDTNDRMEVWQSKELHGRFFRALHGPDVDLLASVAWLRSGDLFGETEGFVCAIMDEVIMTNNYRRFIVKDGTVDICRACHRPGESIRHIISGCSRLANEEYLHRHNLVARIIHQQLALKYSLVESEVPYYRYVPDPVLENGNITLYWDRSIITDRTIVANKPDIVVVDRTERRAMVVDITVPHDGNLVKAEKDKQIKYLDLAREVVDMWDVDSAIIVPIVVSANGLIAKSLDQHLRRLSLGSWIKGLIQKAVLLDTARIVRRFLSLEP

SEQ ID NO: 12802 - protein, 1205 aa, Cosmia trapezina
MLTRSRAQQLRNTQPTSSGSSLSSASQLPEPAPDVSQVIPAAAVASSSSDEYFSPPTTPPPVRRRGRGRPPASLGPRGPSASDRVPAPGGSVQRMRWTQTVNENVMRAYFGATEGGSNLTAYRGRMLSLFQVLEPAVNVSAQRLSDQMRVIQRNHMLDDVVLDRLRLESRNSHVTSVSPMVAVQLQNLPSASPLPDRVGEEDDGGAISVSSQCNVQLRSALEGAFREYRSTPPGLRPRLPRLPMHKKNKALVCALDSQLSNCFDDSKDLADTHSILYCAAVAACRVAHVKFPNSDRVPRPKPAVPAWQCRIERRIGEARALIGKLICFREGNTRPRVMRFVRRAFSGTDISPRDYFTCVTERIDFLKQKICAWANRIRRYRRRVERYTQNRTFQSDERWVYRAWERPDQGVADTQLPDDDAMCSFWRSIWSVPVSHTEGDWTREVERACDHIPQMGALTISPQDVARAVRPLPNWKSPGPDGLHNFWIKWFQRSHARLASQFQSALQSGSLPQFLTTGITHLLHKSGSTAEPRNYRPITCLPTVYKVLTSILRAKINKHIDTNSIMSASQNGCGNGSRGTKELLLIDMTINQQVRRSRKDLSTCWIDYKKAYDSVPHTWLMRVLELYKIDATLRTFLMSCMGQWRTVLRYPGCRNIQRNSEPIRIERGIFQGDSLSPLWFCLALNPLSTLLEDSGLGYRLRRGGQVISHLLYMDDLKLFAPNNLQLMELLKVTETFSSAIRMEFGVDKCAVMHVKRGEIVESVRTQLSDSIHLRSLSSLETYKYLGMSEALGINAADMKQSLRERFFGRLNKVLNSLLSGGNKVRAFNGWVMPVLMYSFGILKWTQTELDALDRRVRTLLTANRMHHPRSSVMRLYIPRKCGGRGFLNAKTLHNREVCSLREYFLEADVGMHRDVVSVDKGLTPLSLANENWRKPIVLDTNDRREVWQSKELHGRFYRVLHGPDVDFLASVSWLRFGDLFGETEGFVFAIMDEVMMTNNYRKYIVKDGTVDICRACHRPGESIRHIISGCSRLANGDYLHRHNLVARIIHQQLALKYSLVESEVPYYRYVPDPVLENGNITLYWDRSIITDRTIVANKPDIVVIDRLERRTVIVDIAVPHDENLVKAEKDKQIKYLDLAREVVDMWDVDTAIIVPIVVTANGIIAKSLDQHLRRLSLGGWIKGLIQKAVLLDTARIVRRFLSQQP

SEQ ID NO: 12803 - protein, 1080 aa, Cosmia trapezina
MLSLFQVLEPAVNVSAQRLSDQVRVIQRNHMLDDVVLDRLRLESRNSRVTSDSPMVAVQLQNLPSASPRPDRVGEEDDSGAISVSSQCNVQLRSALEDAFREYRSTPPGLRPRLPRLPMHKKNKALVCALDSQLSNCFDGSKDLADTHSILYCAAVAACRVAHVKFHNNDRVTRPKPAVPTWQCRIERRIGEARALIGKLICFREGNTRPRVMRFVRRAFSGMDISPRDYLTCVTERIDFLKQKICAWANRIRRYRRRVERYTQNRTFQSDERWVYRAWERPDQGVADTQLPDDDAMCSFWRSIWSVPVSHTEGDWTREVERACDHIPQMGALTISPQDVARAVRPLPNWKSPGPDGLHNFWIKWFQRSHARLASQFQSALQSGSLPQFLTTGITHLLHKSGSTAEPRNYRPITCLPTVYKVLTSILRAKINKHIDTNSIMSASQNGCGNGSRGTKELLLIDMTISQQVRRSRKDLSTCWIDYKKAYDSVPHTWLMRVLELYKIDATLRTFLMSCMGQWRTVLRYPGCRNIQRNSEPIRIERGIFQGDSLSPLWFCLALNPLSTLLEDSGLGYRLRRGGQVISHLLYMDDLKLFAPNNLQLMELLKVTETFSSAIRMEFGVDKCAVMHVKRGEIVESVRTQLSDSIHLRSLSSLETYKYLGMSKALGINAADMKQSLRERFFGRLNKVLNSLLSGGNKVRAFNGWVMPVLMYSFGILKWTQTELDALDRRVRTLLTANRMHHPRSSVMRLYIPRKCGGRGFLNAKTLHNREVCSLREYFLEADVGMHREVVSVDKGLTPLSLANENWRKPIVLDTNDRREVWQSKELHGRFYRVLHGPDVDFLASVSWLRFGDLFGETEGFVFAIMDEVMMTNNYRKYIVKDGTVDICRACHRPGESIRHIISGCSRLANGDYLHRHNLVARIIHQQLALKYSLVESEVPYYRYVPDPVLENGNITLYWDRSIITDRTIVANKPDIVVIDRLERRTVIVDIAVPHDENLVKAEKDKQIKYLDLAREVVDMWDVDTAIIVPIVVTANGIIAKSLDQHLRRLSLGGWIKGLIQKAVLLDTARIVRRFLSQQP

SEQ ID NO: 12804 - protein, 1200 aa, Cosmia trapezina
MLTRSAARKARLPPPDSSLSSASPPPAPSLTVSAVSTPAAVVASSSSDEYFSPPTTPPPARRRGGRRPPDGLGPRGPPASDRVPAPGGSVQRMRWTRAINENVMRSYYGATEGGNNLTAYRVRMHSLFQVLEPALNVSAQRLSDQVRVIQRNHMLDDTVLDRLRNEMQSSRVIAPLSQTIVAPPPPQCNTTQADEGSDGTAANVSTQCNEELRSALEGAIQEYRFVSPELRPRLPRLPMHNKNRALVAALDSQLSNYFDDCEDLTDTHSILYCAAVAACRVAHVKFANDSRATRPKPAVPAWQCRIERRIGGARALIGKLICFREGNTRPRVMRFVKRAFSGTDVSPQDYMSRVTERIDFLRQKVYAWANRIRRYKRRVDRYTQNRTFQSDERWVYRGWERPDQGVTDTRLPDDDAMCSFWRSIWSVPVSHTEGDWAREVRRACDPIPEMGAITICPQDVARAVRPLPNWKSPGPDGLHNFWIKWFLGSHARLAAQYQSALQSGSLPQFLTTGITHLLHKSGSTTEPKNYRPITCLPTVYKVLTSILRAKINEHIDTNSIMSASQNGSRNGSRGTKELLLIDMAISQQVRRSRRDLSTCWIDYKKAYDSVPHTWLMRVLELYKVDATLRTFLMSCMGQWRTVLRYPGCRNIQRNSEPIRIERGIFQGDSLSPLWFCLALNPLSTLLENSGLGYRLRRGGQVISHLLYMDDLKLFAPSNLQLMELLKVTETFSSAIRMEFGVDKCAVMHVKRGEIVESVGTQLPDSINLRTLSAAETYKYLGMSEALGINVADMKQSLRERFFGRLKKVFNSLLSGGNKVRAFNGWVMPVLMYSFGILKWTQTELDALDRRVRTLLTAYRMHHPRSSVMRLYIPRKCGGRGFLNAKTLHNREICSLREYFLETDVGMHRDVVAVDKGLTPLSLAKENWRKPVVLDANDRMEVWQSKELHGRFFRALHGPDVNLLASVAWLRSGDLFGETEGFVCAIMDEVIMTNNYRRFIVKDGTVDICRACHRPGESIRHIISGCSRLANEEYLHRHNLVARIIHQQLALKYSLVESEVPYYRYVPDPVLENGHITLYWDRSIITDRTIVANKPDIVVVDRTERRAMIVDITVPHDGNLVKAEKDKQIKYIDLAREVVDMWDVDSAVIVPIVVSANGLIAKSLDQHLRRLSLGSWIKGLIQKAVLLDTARIVRRFLSLEP

SEQ ID NO: 12805 - protein, 1197 aa, Mamestra brassicae
MLTRSRARHLATHPSPSASSLSSASPPPEPSPTVSAVTPAVAVASSSSDEYFSPPTTPPPARRRRGRRPPDGLGPRGPPASDRVPAPGGSVQRMRWTQSINENVMRSYFGATEGGTNLTAYRGRMLSLFQVLEPAVNVSAQRLSDQVRVIQRNRMLDDSVLDRLRMEICGHVITPPSQTVAPPQSQMSSPADEESNDRVTNVSTQCNEELRSALECAIREYRYVPPELRPRLPRLPMHNKNRALVAALDSQLSNYFDDCEDLTDTHSIMYCAAVAACRVAHVKMTNDRVTRPKPAVPAWQCRIERRIGGARALIGKLICFREGNTRPRVMRFVRRAFSGTDISPRDYMSRVTERIDFLKQKVYAWANRIRRYRRRVERYTQNRTFRSNERWVYRVWEQPDQGVTDTRLPDDDAMCSFWRNIWSVPVSHTEGDWIRGVERACDPLPEMGAITISPQDVARAVRPLPNWKSPGPDGLHNFWIKWLQRSHARLASQYQTVLESGSLPEFLTTGVTHLLHKSGSTAEPKNYRPITCLPTVYKVLTSILRAKINNHINSNNIMSVSQNGCRNGSRGTKELLLIDMAISQQVRRSRKDLSTCWIDYKKAYDSVPHTWLMRVLELYKIDTMLRTFLMSCMGQWRTVLRYPGCRNIQRNSEPVKIERGIFQGDSLSPLWFCLALNPLSTLLENSGLGYRLKRGGQVLSHLLYMDDLKLFASSNLQLMELLKVTETFSSAIRMEFGVDKCAVMHVKRGEIMESVGTQLSDSINLRSLSSTETYKYLGMSEALGINVTDMKQSLKERFFGRLKTVFNSLLSGGNKVRAFNGWVMPVLMHSFGVLKWTQTELDTLDRRVRTLLTAYRMHHPRSSVMRLYIPRKCGGRGFLNAKTLHNREICSLREYFLAVDVGMHRDVVAVDKGLTPLSLANENWRKPAVLDTNDRRAVWQSKELHGRYFRALHGSDVDQLASVAWLRFGDLFGETEGFVCAIMDEVIMTNNYRRFIVKDGTVDICRACHRPGESIRHIVSGCSRLANGEYLHRHNLVARIIHQQLALKYSLVESEVPYYRYAPDPVLDNGNITLYWDRSIITDRTIVANKPDIVVVDRIERRTMIVDITVPHDENLVKAEKDKQIKYIDLAREVVDMWDVDSAIIVPIVVSANGLIATSLDQHLRRLSLGSWIKGLIQKAVLLDTARIVRRFLSLEP

SEQ ID NO: 12806 - protein, 1046 aa, Mamestra brassicae
MLDDAVLDRLRLESRSGRVSPASPPAAVEIQSSISPRPNNVGEDDDDGAISVSTQCNERLRSALEDAFREYRSTPPELRPRLPRLPMHNKNRALVCALDSQLTNCFDSSEDLADTHSILYCAAAAACRVAHVKFLNSDRATRPAVPAWQCRIERRIGEARALIGKLICFREGNTRRRVMRFVRRAFSGTDTSPRDYLTRVTERIDFLKQKIYAWANRIRRYKRRVERYTQNRTFQSNERWVYRAWERPDQGVTDTRLPDDDVMCSFWRNIWSVPVSHTEGDWIREVERACDPILEMGAITISPQDVARAVRPLPNWKSPGPDGLHNFWIKWFTGSHVRLASQFQSALESGSLPQFLTTGITHLLHKSGSTAEPKNYRPITCLPTVYKVLTSILRAKINHHIESNSIMSASQNGCRNGSRGTKELLLMDIAISQQVRRSRKDLSTCWIDYKKAYDSVPHTWLMRVLELYKVDAVLRTFLMSCMGQWRTVLRYPGCRQIQVNGDPIRIERGIFQGDSLSPLWFCLALNPLSTLLEGSGQGYRLRRGGQVISHLLYMDDLKLFAPNNLQLMELLKVTETFSSAISMEFGVDKCAVMHVKRGEIMESVGTQLSDSIHLRSLSSTETYKYLGMSEALGINANDMKQSLKERFFGRQNKVLNSLLSGGNKVRAFNGWVMPVLMYSFGILKWTQTELDALDRRVRSLLTANRMHHPRSSVMRLYIPRKCGGRGFLNAKTLHNREICSLREFFLEADVGMHRDVVAVDKGLTALSLANENWRKPVILDTNDRREVWQSKELHGRFYRVLHGPDVDFLASVAWLRFGDLFGETEGFVCAITDEVMMTNNYRKYIVKDGTVDICRACHRPGESIRHIISGCPSLANGDYLHRHNLVARIIHQQLALKYNLVESEVPYYRYVPDPVLENGNCTLYWDRSIITDRTIVANKPDIVVIDRLERRAMIVDIAVPHDENLVKTEKDKQTKYLDLAREVVDMWDVNTAVIVPIVVTANGIIAKSLDQHLKRLSLGSWIKGLIQKAVLLDTARIVRRFLSQGP

SEQ ID NO: 12807 - protein, 1197 aa, Mamestra brassicae
MLTRSRARHLATHPSPSASSLSSASPPPEPSPTVSAVTPAVAVASSSSDEYFSPPTTPPPARRRRGRRPPDGLGPRGPPASDRVPAPGGSVQRMRWTQSINENVMRSYFGATEGGTNLTAYRGRMLSLFQVLEPAVNVSAQRLSDQVRVIQRNRMLDDSVLDRLRMEMCGHVITPPSQTVAPPQSQISSHADEESNDRVTNVSTQCNEELRSALECAIREYRYVPPELRPRLPRLPMHNKNRALVAALDSQLSNYFDDCEDLTDTHSIMYCAAVAACRVAHVKMTNDRVTRPKPAVPAWQCRIERRIGGARALIGKLICFREGNTRPRVMRFVRRAFSGTDISPRDYMSRVTERIDFLKQKVYAWANRIRRYRRRVERYTQNRTFRSNERWVYRVWEQPDQGVTDTRLPDDDAMCSFWRNIWSVPVSHTEGGWIREVERACDPLPEMGAITISPQDVARAVRPLPNWKSPGPDGLHNFWIKWLQRSHARLASQYQTALESGSLPEFLTTGVTHLLHKSGSTAEPKNYRPITCLPTVYKVLTSILRAKINNHINSNNIMSVSQNGCRNGSRGTKELLLIDMAISQQVRRSRKDLSTCWIDYKKAYDSVPHTWLMRVLELYKIDTMLRTFLMSCMGQWRTVLRYPGCRNIQRNSEPVRIERGIFQGDSLSPLWFCLALNPLSTLLENSGLGYRLKRGGQVISHLLYMDDLKLFAPSNLQLMELLKVTETFSSAIRMEFGVDKCAVMHVKRGEIMESVGTQLSDSINLRSLSSTETYKYLGMSEALGINVTDMKQSLKERFFGRLKKVFNSLLSGGNKVRAFNGWVMPVLMHSFGVLKWTQTELDALDRRVRTLLTAYRMHHPRSSVMRLYIPRKCGGRGFLNAKTLHNREICSLREYFLAVDVGMHRDVVAVDKGLTPLSLANENWRKPAVLDTNDRRAVWQSKELHGRYFRALHGPDVDQLASVAWLRFGDLFGETEGFVCAIMDEVIMTNNYRRFIVKDGTVDICRACHRPGESIRHIVSGCSRLANGEYLHRHNLVARIIHQQLALKYSLVESEVPYYRYAPDPVLDNGNITLYWDRSIITDRTIVANKPDIVVVDRIERRAMIVDITVPHDENLVKAEKDKQIKYIDLAREVVDMWDVDSAIIVPIVVSANGLIATSLDQHLRRLSLGSWIKGLIQKAVLLDTARIVRRFLSLEP

SEQ ID NO: 12808 - protein, 1197 aa, Mamestra brassicae
MLTRSRARHLATHPSPSASSLSSASPPPEPSPTVSAVTPAVAVASSSSDEYFSPPTTPPPARRRRGRRPPDGLGPRGPPASDRVPAPGGSVQRMRWTQSINENVMRSYFGATEGGTNLTAYRGRMLSLFQVLEPAVNVSAQRLSDQVRVIQRNRMLDDSVLDRLRMEICGHVITPPSQTVAPPQSQMSSPADEESNDRVTNVSTQCNEELRSALECAIREYRYVPPELRPRLPRLPMHNKNRALVAALDSQLSNYFDDCEDLTDTHSIMYCAAVAACRVAHVKMSNDRVTRPKPAVPAWQCRIERRIGGARALIGKLICFREGNTRPRVMRFVRRAFSGTDISPRDYMSRVTERIDFLKQKVYAWANRIRRYRRRVERYTQNRTFRSNERWVYRVWEQPDQGVTDTRLPDDDAMCSFWRNIWSVPVSHTEGDWIREVERACDPLPEMGAITISPQDVARAVRPLSNWKSPGPDGLHNFWIKWLQRSHARLASQYQKVLESGSLPEFLTTGVTHLLHKSGSTAEPKNYRPITCLPTVYKVLTSILRAKINNHINSNNIMSVSQNGCRNGSRGTKELLLIDMAISQQVRRSRKDLSTCWIDYKKAYDSVPHTWLMRVLELYKIDTMLRTFLMSCMGQWRTVLRYPGCRNIQRNSEPVKIERGIFQGDSLSPLWFCLALNPLSTLLENSGLGYRLKRGGQVLSHLLYMDDLKLFAPSNLQLMELLKVTETFSSAIRMEFGVDKCAVMHVKRGEIRESVGTQLSDSINLRSLSSTETYKYLGMSEALGINVTDMKQSLKERFFGRLKKVFNSLLSGGNKVRAFNGWVMPVLMHSFGVLKWTQTELDALDRRVRTLLTAYRMHHPRSSVMRLYIPRKCGGRGFLNAKTLHNREICSLREYFLAVDVGMHRDVVAVDKGLTPLSLANENWRKPAVLDTNGRRAVWQSKELHGRYLRALHGPDVDQLASVAWLRFGDLFGETEGFVCAIMDEVIMTNNYRRFIVKDGTVDICRACHRPGESIRHIVSGCSRLANGEYLHRHNLVARIIHQQLALKYSLVESEVPYYRYAPDPVLDNGNITLYWDRSIITDRTIVANKPDIVVVDRIERRAMIVDITVPHDENLVKAEKDKQIKYIDLAREVVDMWDVDSAIIVPIVVSANGLIATSLDQHLRRLSLGSWIKGLIQKAVLLDTARIVRRFLSLEP

SEQ ID NO: 12809 - protein, 868 aa, Mamestra brassicae
MRFVRRAFSGTDISPRDYMSRVTERIDFLKQKVYAWANRIRRYRRRVERYTQNRTFRSNERWVYRVWEQPDQGVTDTRLPDDDAMCSFWRNIWSVPVSHTEGGWIREVERACDPLPEMGAITISPQDVARALRPLPNWKSPGPDGLHNFWIKWLQRSHARLASQYQTALESGSLPEFLTTGVTHLLHKSGSTAEPKNYRPITCLPTVYKVLTSILRAKINNHINSNNIMSVSQNGCRNGSRGTKELLLIDMAISQQVRRFRKDLSTCWIDYKKAYDSVPHTWLMRVLELYKIDTMLRTFLMSCMGQWRTFLRYPGCRNIQRNSEPVRIERGIFQGDSLSPLWFCLALNPLSTLLENSGLGYRLKRGGQVISHLLYMDDLKLFAPSNLQLMELLKVTETFSSAIRMEFGVDKCAVMHVKRGEIMESVGTQLSDSINLSSLSSTETYKYLGMSEALGINVTDMKQSLRERFFGRLKKVFNSLLSGGNKVRAFNGWVMPVLMHSFGVLKWTQTELDALDRRVRTLLTAYRMHHPRSSVMRLYIPRKCGGRGFLNAKTLHNREICSLREYFLAVDVGMHRDVVTVDKGLTPLSLANENWRKPAVLDTNDRRAVWQSKELHGRFFRALHGPNVDQLASVAWLRFGDLFGETEGFVCAIMDEVIMTNNYRRFIVKDGTVDICRACHRPGESIRHIVSGCSRLANGEYLHRHNLVARIIHQQLALKYSLVESEVPYYRYAPDPVLDNGNITLYWDRSIITDRTIVANKPDIVVVDRIERRAMIVDITVPHDENLVKAEKDKQIKYIDLAREVVDMWDVDSAIIVPIVVSANGLIATSLDQHLRRLSLGSWIKGLIQKAVLLDTARIVRRFLSLEP

SEQ ID NO: 12810 - protein, 1107 aa, Noctua fimbriata
MRWTQSINANVMRAYYGATEGGNNLTAYRVRMLSLFQVLEPAVNVSAQRLSDQVRVIQRNRMLDDTVLDRLRTEMQSSHVIATPPPQAVVPPQSTIIPNRDNDVSNDIVTNVSTQCSEEMRSALEGAIREYRFMQPDLRPRIPRLPMHNKNRALVAVLDSQLSNYFDNCEDLTDAHSILYCAAVAACRVAHVKFSDDRATRPKPAVPPWQYRIERRIGGARALIGKLICFREGNTRPRVMRFVRRAFSGTDISPRDYMSRITERIDFLKQKVYAWANRIRRYKRRVDRYTQNRTFQRDERWVYRAWERPDQGVADTRLPDDDAMCSFWRSIWSVPVSHTEGEWTQGVERACDLVPEMGAITISPQDVVRAVRPLPNWKSPGPDGLHNFWIKWFTRSHARLAILFQSALESGSLPEFLTTGITHLLHKSGSTAEPKNYRPITCLPTVYKVLTSILRAKINKHIDDNSIMSASQNGCRNGSRGTKELLLIDMAISQQVRRSRSDLSTCWIDYKKAYDSVPHTWLMRVLELYKVDATLRTFLMLCMGQWRTVLRYPGCRQIQRNSEPIRIERGIFQGDSLSPLWFCLALNPLSTLLEDSGLGYRLRRGGQVISHLLYMDDLKLFAPNDLQLMELLKVTETFSSAIRMEFGVDKCAVMHVKRGEIVESVGTQLSDSINLRSLSATETYKYLGMSEALGINVADMKQSLKERFFGRLKKVFNSLLSGGNKVRAFNGWVMPVLMYSFGILKWTQTELDALDRRVRTLLTAYRMHHPRSSVMRLYIPRKCGGRGFLNAKTLHNREICSLREYFLETDVGMHRDVVAVDKGLTPLSLAKENWRKPVVFDTNYRMEVWQSKELHGRFFRALHGPDVDLSASVAWLRSGDLFGETEGFVCAIMDEVMMTNNYRRFIVKDGTVDICRACHRPGESIRHIISGCSRLANGEYLHRHNLVARIIHQQLALKYNLVELEVPYYKYVPDPVLENGSITLYWDQSIITDRTIVANKPDIVVVDRSERRTMIVDITVPHDENLVKAEKDKKIKYLDLAREVVDMWDVDSAIIVPIVVSAHGLIAKSLDQYLRRLSLGSWIKGLIQKAVLLDTARIVRRFLSLEP

SEQ ID NO: 12811 - protein, 988 aa, Noctua fimbriata
MRSALEGAIREYRFMQPDLRPRIPRLPMHNKNRALVAVLDSQLSNYFDNCEDLTDAHSILYCAAVAACRVAHVKFSDDRATRPKPAVPPWQYRIERRIGGARALIGKLICFREGNTRPRVMRFVRRAFSGTDISPRDYMSRITERIDFLKQKVYAWANRIRRYKRRVDRYTQNRTFQRDERWVYRAWERPDQGVADTRLPDDDAMCSFWRSIWSVPVSHTEGEWTQGFERACDLVPEMGAITISPQDVVRAVRPLPNWKSPGPDGLHNFWIKWFTRSHARLAILFQSALESGSLPEFLTTGITHLLHKSGSTAEPKNYRPITCLPTVYKVLTSILRAKINKHIDDNSIMSASQNGCRNGSRGTKELLLIDMAISQQVRRSRSDLSTCWIDYKKAYDSVPHTWLMRVLELYKVDATLRTFLMSCMGQWRTVLRYPGCRQIQRNSEPIRIERGIFQGDSLSPLWFCLALNPLSTLLEDSGLGYRLRRGGQVISHLLYMDDLKLFAPNDLQLMELLKVTETFSSAIRMEFGVDKCAVMHVKRGEIVESVGTQLSDSINLRSLSATETYKYLGMSEALGINVADMKQSLKERFFGRLKKVFNSLLSGGNKVRAFNGWVMPVLMYSFGILKWTQTELDALDRRVRTLLTAYRMHHPRSSVMRLYIPRKCGGRGFLNAKTLHNREICSLREHFLETDVGMHRDVVAVDKGLTPLSLAKENWRKPVVFDTNYRMEVWQSKELHGRFFRALHGPDVDLSASVAWLRSGDLFGETEGFVCAIMDEVMMTNNYRRFIVKDGTVDICRACHRPGESIRHIISGCSRLANGEYLHRHNLVARIIHQQLALKYNLVELEVPYYKYVPDPVLENGSITLYWDQSIITDRTIVANKPDIVVVDRSERRTMIVDITVPHDENLVKAEKDKKIKYLDLAREVVDMWDVDSAIIVPIVVSAHGLIAKSLDQYLRRLSLGSWIKGLIQKAVLLDTARIVRRFLSLEP

SEQ ID NO: 12812 - protein, 1150 aa, Noctua fimbriata
MSISLRRRRHHPRRRGGRRPPDGLGPRGPPASDRVPAPGGSVQRMRWTQSINENVMRSYYGATEGGNNLTAYRVRMLSLFQVLEPAVNVSAQRLSDQVRVIQRNRMLDDTVLDRLRTEMQSSHVITPSAQAVVLPQSSTITNRDNDVSNDMVTNVSTQCNEEMRSALEGAIRECRFMQPDLRPRIPRLPMHNKNRALVAVLDSQLSNYFDNCEDLTDAHSVLYCAAVAACRVAHVKFFDDRATRPKPVVPPWQYRIERRIDGARALIGKLICFREGNTRPRVMRFVRRAFSGTDISPRDYMSRITERIDFLKQKVYAWASRIRRYKRRVDRYTQNRTFQRDERWVYRAWERPDQGVADTRIPDDDAMCSFWRSIWSVPVSHTEGEWTREVERACDLVPEMGAITISPQDVVRAVRPLPNWKSPGPDGLHNFWIKWFTRSHARLAILFQSALESGSLPEFLTTGITHLLYKSGSTAEPKNYRPITCLPTVYKVLTSILRAKINKHIDDNSIMSASQNGCRNGSRGTKELLLIDMAISQQVRRSRRDLSTCWIDYKKAYDSVPHTWLMRVLELYKVDATLRTFLMSCMGQWRTVLRYPGCRQIQRNSEPIRIERGIFQGDSLSPLWFCLALNPLSTLLEDSGLGYQLRRGGQVISHLLYMDDLKLFAPNDLQLMELLKVTETFSSAIRMEFGVDKCAVMHVKRGEIVESVGTQLSDSINLRSLSATETYKYLGMSEALGINVADMKQSLKERFFGRLKKVFNSLLSGGNKVRAFNGWVMPVLMYSFGILKWTQTELDALDRRVRTLLTAYRMHHPRSSVMRLYIPRKCGGRGFLNAKTLHNREICSLREYFLETDVGMHRDVVAVDKGLTPLSLAKENWRKPLVLDTNDRMEVWQSKELHGRFFRALHGPDVDLSASVAWLRSGDLFGETEGFVCAIMDEVMMTNNYRRFIVKDGTVDICRACHRPGESIRHIISGCSRLANGEYLHRHNLVARIIHQQLALKYNLVESEVPYYKYVPDPVLENGSITLYWDQSIITDRTIVANKPDIVVVDRSERRTMIVDITVPHDENLVKAEKDKKIKYLDLAREVVDMWDVDSAIIVPIVVSAHGLIAKSLDQYLKRLSLGSWIKGLIQKAVLLDTARIVRRFLSLEP

SEQ ID NO: 12813 - protein, 1198 aa, Noctua fimbriata
MLTRSAARRARLSPPDPSLSSASPPPESSPVVSAVTPAVAVASSSSDEYFSPPTTPPPVRRRGGRRPPDGLGPRGPPTSDRVPAPGGSVQRMRWTQSINANVMRAYYGATEGGNNLTAYRVRMLSLFQVLEPAVNVSAQRLSDQVRVIQRNRMLDDTVLDRLRTEMQSSHVIATPPPQAVVPPQSTIIPNRDNDVSNDIVTNVSTQCNEEMRSALEGAIREYRFMQPDLRPRIPRLPMHNKNRALVAVLDSQLSNYFDNCEDLTDAHSILYCAAVAACRVAHVKFSDDRATRTKPAVPPWQYRIERRIGGARALIGKLICFREGNTRPRVMRFVRRAFSGTDISPRDYMSRITERIDFLKQKVYAWANRIRRYKRRVDRYTQNLTFQRDERWVYRAWERPDQGVADTRLPDDDAMCSFWRSIWSVPVSHTEGEWTQGVERACDLVPEMGAITISPQDVVRAVRPLPNWKSPGPDGLHNFWIKWFTRSHARLAILFQSALESGSLPEFLTTGITHLLHKSGSTAEPKNYRPITCLPTVYKVLTSILRAKINKHIDDNSIMSASQNGCRNGSRGTKELLLIDMAISQQVRRSRSDLSTCWIDYKKAYDSVPHTWLMRVLELYKVDATLRTFLMSCMGQWRTVLRYPGCRQIQRNSEPIRIERGIFQGDSLSPLWFCLALNPLSTLLEDSGLGYRLRRGGQVISHLLYMDDLKLFAPNDLQLMELLKVTETFSSAIRMEFGVDKCAVMHVKRGEIVESVGTQLSDSINLRSLSATETYKYLGMSEALGINVADMKQSLKERFFGRLKKVFNSLLSGGNKVRAFNGWVMPALMYSFGILKWTQTELDALDRRVRTLLTAYRMHHPRSSVMRLYIPRKCGGRGFLNAKTLHNREICSLREYFLETDVGMHRDVVAVDKGLTPLSLAKENWRKPLVPDTNDRMEVWQSKELHGRFFRALHGPDVDLSASVAWLRCGDLFGETEGFVCAIMDEVMMTNNYRRFIVKDGTVDICRACHRPGESIRHIISGCSRLANGEYLHRHNLVARIIHQQLALKYNLVESEVPYYKYVPDPVLENGSITLYWDQSIITDRTIVANKPDIVVVDRSERRTMIVDITVPHDENLVKAEKDKKIKYLDLAREVVDMWDVDSAIIVPIVVSAHGLIAKSLDQYLRRLSLGSWIKGLIQKAVLLDTARIVRRFLSLEP

SEQ ID NO: 12814 - protein, 988 aa, Noctua fimbriata
MRSALEGAIREYRFMQPDLRPRIPRLPMHNKNRALVAVLDSQLSNYFDNCEDLTDAHSILYCAAVAACRVAHVKFSNDRATRPKPAVPPWQYRIERRIGGARALIGKLICFREGNTRPRVMRFVRRAFSGTDISPRDYMSRITERIDFLKQKVYAWANRIRRYKRRVDRYTQNRTFQRDERWVYRAWERPDQGVADTRLPDDDAMCSFWRSIWSVPVSHTEGEWTQGVERACDLVPEMGAITISPQDVVRAVRPLPNWKSPGPDGLHNFWIKWFTRSHARLAILFQSALESGSLPEFLTTGITHLLHKSGSTAEPKNYRPITCLPTVYKVLTSILRAKINKHIDDNSIMSASQNGCRNGSRGTKELLLIDMAISQQVRRSRRDLSTCWIDYKKAYDSVPHTWLMRVLELYKVDVTLRTFLMSCMGQWRTVLRYPGCRQIQRNSEPIRIERGIFQGDSLSPLWFCLALNPLSTLLEDSGLGYRLRRGGQVISHLLYMDDLKLFAPNDLQLMELLKVTETFSSAIRMEFGVDKCAVMHVKRGEIVESVGTQLSDSINLRSLSATETYKYLGMSEALGINVADMKQSLKERFFGRLKKVFNSLLSGGNKVRAFNGWVMSVLMYSFGILKWTQTELDALDRRVRTLLTAYRMHHPRSSIMRLYIPRKCGGRGFLNAKTLHNREICSLREYFLETDVGMHRDVVAVDKGLTPLSLAKENWRKPLVLDTNDRMEVWQSKELHGRFFRALHGPDVDLSASVAWLRSGDLFGETEGFVCAIMDEVMMTNNYRRFIVKDGTVDICRACHRPGESIRHIISGCSRLANGEYLHRHNLVARIIHQQLALKYNLVESEVPYYKYVPDPVLENGSITLYWDQSIITDRTIVANKPDIVVVDRSERRTMIVDITVPHDENLVKAEKDKKIKYLDLAREVVDMWDVDSAIIVPIVVSAHGLIAKSLDQYLRRLSLGSWIKGLIQKAVLLDTARIVRRFLSLEP

SEQ ID NO: 12815 - protein, 1197 aa, Noctua fimbriata
MLTRAAAKRARLSPPDPSLSSASPPPESSPVVSAVTPAVAVASSSSDEYFSPPTTPPPVRRRGGRRPPDGLGPRGPPASDRVPAPGGSVQRMRWTQSINENVMRSYYGATEGGNNLTAYRVRMLSLFQVLEPAVNVSAQRLSDQVRVIQRNRMLDDTVLDRLRTETQSSHVITPSAQAVVLPQSSTIPNRDNDVSNDMVTNVSTQCNEEMRSALEGAIREYRFMQPDLRPRIPRLPMHNKNRALVAVLDSQLSNYFDNCEDLTDAHSILYCAAVAACRVAHVKFSDDRATRPKPAVPPWQYRIERRIGGARALIGKLICFREGNTRPRVMRFVRRAFSGTDISPRDYMSRITERIDFLKQKVYAWASRIRRYKRRVDRYTQNRTFQRDERWVYRTWERPDQGVADTRIPDDDAMCSFWRSIWSVPVSHTEGEWTQEVERACDLVPEMGAITISPQDVVRAVRPLPNWKSPGPDGLHNFWIKWFTRSHARLAILFQSALESGSLPEFLTTGITHLLHKSDSTAEPKNYRPITCLPTVYKVLTSILRAKINKHIDDNSIMSASQNGCRNGSRGTKELLLIDMAISQQVRRSRRDLSTCWIDYKKAYDSVPHTWLMRVLELYKVDATLRTFLMSCMGQWRTVLRYPGCRQIQRNSEPIRIERGIFQGDSLSPLWFCLALNPLSTLLEDSGLGYQLRRGGQVISHLLYMDDLKLFAPNDLQLMELLKVTESFSSAIRMEFGVDKCAVMHVKRGEIVESVGTQLSDSINLRSLSATETYKYLGMSEALGINVADMKQSLKERFFGRLKKVFNSLLSGGNKVRAFNGWVMPVLMYSFGILKWTQTELDALDRRVRTLLTAYRMHHPRSSVMRLYIPRKCGGRGFLNAKTLHNREICSLREYFLETDVGMHRDVVAMDKGLTPLSLAKENWRKPLVLDTNDRMEVWQSKELHGRFFRALHGPDVDLSASVAWLRSGDLFGETEGFVCAIMDEVMMTNNYRRFIVKDGTVDICRACHRPGESIRHIISGCSRLANGEYLHRHNLVARIIHQQLALKYNLVESEVPYYKYVPDPVLENGSITLYWDQSIITDRTIVANKPDIVEVDRSERRTMIVDITVPHDENLVKAEKDKKIKYLDLAREVVDMWDVDSAIIVPIVVSAHGLIAKSLDQYLRRLSLGSWIKGLIQKAVLLDTARIVRRFLSLEP

SEQ ID NO: 12816 - protein, 1079 aa, Atethmia centrago
MRWTQSVNENVMRSYYGATEGGNNLTAYRVRMLSLFQVLEPAVNVSAQRLSDQVRVIQRNHMLDDTVLDRLRSEMQRSHIIVPPSQTVVLSPQLSTNQADEGSDDRATNVSTQCNVELRSALEDAIREYRLMSPELRPRLPRLPMHKKNRALVAALDSQLSNYFDDCEDLTDTHSILYCAAVAVCRVAHVKFAKDSRTTRPKPTVPAWQCRIESRIGGARALIGKLICFREGNTRPRVMRFVRRAFSGTGIRRYKRRVERYTQNRTFQSDERWVYRGWERPDQDVTDTRLPDDDVMCSFWRSIWSVPVSHTEGDWARKVERACDPIPEMGAITICPQDVARAVRPLPNWKSPGPDGLHNFWLKWFLRSHARLAAQYQTALESGSLPQFLTTGVTHLLHKSGSTAEPKNYRPITCLPTVYKLLSSILRAKINKHIDTNSIMSASQNGCRNGSRGTKELLLIDMTISQQVRHSRKDLSTCWIDYKKAYDSVPHTWLMRVLELYKVDATLRTFLISCMGQWRTVLRYPGCRNIQRNSEPIRIERGIFQGDSLSPLWFCLALNPLSTLLEDSGLGYRMRRGGQVISHLLYMDDLKLFASNNLQLMELLKITESFSSAIRMEFGVDKCAVMHVKRGKIVESVGTQLSDSINLRTLSASETYKYLGMSEALGINVTDMKQSLKERFFGRLKKVFNSLLSGGNKVRAFNGWVMPVLMYSFGILKWTQTELDALDRRVRTVLTAYRMHHPRSSVMRLYIPRKCGGRGFLNAKTLHNREVCSLREYFLEADVGMHRDVVAVDKGLTPLSLAKENWRKLVVLDTNDRREVWQSKELHGRFFRALHEPDVDFQASVAWLRFGDLFGETEGFVCAIMDEVIMTKNYRRFIVKDGTVDVCRACHRPGESIRHIISGCSRLANEEYLHRHNLVARIIHQQLALKYSLVESEVPYYRYVPDPVLDNGNITLYWDRSIITDRTIVANKPDIVVVDRTERRAMIVDITVPHDGNLVKAEKDKQIKYLDLAREVVDMWDVDSAIIVPIVVSANGLIAKSLDQHLKRLTLDGWIKGLIQKAVLLDTARIVRRFLSLEP

SEQ ID NO: 12817 - protein, 1198 aa, Atethmia centrago
MLTRSAAVRARLPPPDSSLSSASPPPVPSPTVCVVTTPTAAVASSSSDEYFSPPTTPPPVRRRGGRRPPDGLGSRGPPASDRVPAPGGSVKRMRWTQSVNENVMRSYYGATEGGNNLTAYRVRMLSLFQVLEPAVNVSAQRLSDQVRVIQRNHMLNDTVLDRLRSEMQRSHVIVPPSQTVVHSPQLSTNQADEGSDDRATNVSTQCNVELRSALEDAIREYRLMSPELRPRLPRLPMHKKNRALVAALDSQLSNYFDDCKDLTDTHSILYCAAVAVCRVAHVKFAKDSRTTRPKPTVPAWQCRIESRIGGARALIGKLICFREGNTRPRVMRFVRRAFSGTDIGPQDYMTRVTERIDFLKQKVYAWANRIRRYKRRVERYTQNRTFQSDERWVYRGWERPDQDVTDTRLPDDDVMSSFWRSIWSVPVSHTEGDWARKVERACDPIPEMGAITICPQDVARAVRPLPNWKSPGPDGLHNFWLKWFLRSHARLAAQYQTALESGSLPQFLTTGVTHLLHKSGSTAEPKNYRPITCLPTVYKLLTSILRAKINKHIDTNSIMSASQNGCRNGSRGTKELLLIDMTISQQVRRSRKDLSTCWIDYKKAYDSVPHTWLMRVLELYKVDATLRTFLISCMGQWRTVLRYPGCRNIQRNSEPIRIEWGIFQGDSLSPLWFCLALNPLSTLLEDSSLGYRMRRGGQVISHLLYMDDLKLFASNNLQLMELLKITESFSSAIRMEFGVDKCAVMHVKRGKIVESVGTQLSDSINLRTLSASETYKYLGMSEALGINVTDMKQSLKERFFGRLKKVFNSLLSGGNKVRAFNGWVMPVLMYSFGILKWTQTELDALDRRVRTLLTAYRMHHPRSSVMRLYNPRKCGGRGFLNAKILHNREVCSLREYFLEADVGMHRDVVAVDKGLTPLSLAKENWRKLVVLDTNDRREVWQSKELHGRFFRALHEPDVDFQASVAWLRFGDLFGETEGFVCAIMDEVIMTKNYRRFIVKDGTVDVCRACHRPGESIRHIISGCSRLANEEYLHRHNLVARIIHQQLALKYSLVESEVPYYRYVPDPVLDNGNITLYWDRSIITDRTIVANKPDIVVVDRTERRAMIVDITVPHDGNLVKAEKDKQIKYLDLAREVVDMWDVDSAIIVPIVVSANGLIAKSLDQHLKRLTLDGWIKGLIQKAVLLDTARIVRRFLSLEP

SEQ ID NO: 12818 - protein, 1111 aa, Mesoligia furuncula
MRWTQTVNENVMRAYFGATEGGSNLTAYRGRMLSLFQVLEPAVNVSAQRLSDQVRVIQRNHMLDNVVLDRLRLESRNSHVTPASSLIAVQLQNVPSVSPRPDHVYVEDDDEAITVSSQCNARLRSALEDAFREYRSIPPGLRPRLPRLPMHKKNKALVCALDLQLSNCFNNSKDLTDTHSILYCAAVAACRVAHVKFPNSDRAPRPKPAVPAWQCRIECRIGEARALIGKLICFREGNTRPRVMRFVRRAFSGTDISSRDYLSRVTERIDFLKQKIYAWANRIRRYRRRVERYTQNRTFQNDERWVYRAWERPDQGVTDTPLPDDDAMCSFWRNIWSVPVSHTEGDWTAKIERACDLIPEMGVLTISPQDVARAVRPLPNWKSPGPDGLHNFWIKWFQGSHARLASQFQSALESGSLPQFLTTGITHLLHKSGSTADPKNYRPITCLPTVYKVLTSILRAKINKHIDTNSIMSVSQNGCRNGFRGTKELLLIDMTISQQVRRFRKDLSTCWIDYKKAYDSVPHTWLMRVLELYKVDTTLRTFLMSCMGQWRTVLRYPGCRNIQRNSEPIRIERGIFQGDSLSPLWFCLALNPLSTLLEDSGLGYRLRRGGQVISHLLYMDDLKLFAPNNLRLMELLKITETFSSAIRMEFGVDKCAVMHVKRGEIVESVGTQLSDSTNLRALSASETYKYLGMSEALGINVTDMKQSLKERFFGRLKKVFNSLLSGGNKVRAFNSWVMPVLMYSFGILKWTQTELDALDRKVRTLLTANRMHHPRSSVMRLYIPRKCGGRGFLNAKTLHNREICSLREYFLETDVGMHRDVVAVDKGLTPLSLGKENWRKPVVLDTNDRMEVWQSKELHGRFFRALHGPDVDLLASVAWLRFGDLFGETEGFVYAIMDEVMMTNNYRRFIVKDGTVDICRACHRPGESIRHIISGCSRLANGEYLHRHNLVARIIHQQLALKYSLVESEVPYYRYVPDPVLENGNITLYWDRSIITDRTIVANKPDIVVVDRSERRAMIVDITVPHDENLVKAEKDKQVKYLDLAREVVDMWDVDSAIIVPIVVTANGLIAKSLDQHLKRLSLGSWIKGLIQKAVLLDTARIVRRFLSLEP

SEQ ID NO: 12819 - protein, 1198 aa, Mesoligia furuncula
MLTRSALRKARLPPPDSSLSSASPPPVPSLTVSAVTTPAVAVASSSSDEYFSPPTTPPPARRRGGRRPPDGLGPRGPPASDRVPAPGGSVQRMRWTRSINENVMRSYYGATEGGNNLTAYRVRMLSLFQVLEPAVNVSAQRLSDQVRVIQRNHMLDDTVLDRLRSEMQSSHVIAPQPQTAVLLPQCNTIHADEGSNDRATNVSTQCNEESRSALEDAIREYRFMSPEHRPRLPRLPMHNKNRALVVALDSQLSNYFDDCEDLIDTHSILYCAAVAACRVAHVKFANDSRATRPKPAIPAWQCRIERRIGGARALIGKLICFREGNTRPRVMRFVRRAFLGTDISPQDYMSCVTERIDFLKQKVYAWANRIRRYKRRVERYTQNRTFQSDERWVYRGWERPDQSVADTCLPDAEAMCSFWRSIWSVPVSHTEGDWAREVERACDPIPEMGAITICPQDVARAVRPLPNWKSPGPDGLHNFWIKWFLRSHARLASQFQTALESGLLPQFLTTGITHLLHKSGSTAEPKNYRPITCLPTVYKVLTSILRAKIDKHINTNSIMSVSQNGCKNGSRGTKELLLIDMAISQQVRRSRKDLSTCWIDYKKAYDSVPHTWLMRVLELYKVDATLRTFLMSCMGQWRTVLRYPGCRNIQRNSEPIRIERGIFQGDSLSPLWFCLALNPLSTLLEDSGLGYQLRRGGQVISHLLYMDDLKLFAPNNLQLMELLKVTQTFSSAIRMEFGVDKCVVMHVKRGEIVESVGTQLSDSTNLRALSASETYKYLGMSEALGINVTDMKQSLKERFFGRLKKVLNSLLSGGNKVRAFNGWVMPVLMYSFGILKWTQTELDALDRRVRTLLTANRMHHPRSSVMRLYIPRKCGGRGFLNAKTLHNREICSLREYFLETDVGMHRDVVAVDKGLTPLSLAKENWRKPVVLDTNDRMEVWQSKELHGRFFRALHGPDVDLLASVAWLRFGDLFGETEGFVCAIMDEVMMTNNYRRFIVKDGTVDICRACHRPGESIRHIISGCSRLANGEYLHRHNLVARIIHQQLALKYSLVESKVPYYRYVPDPVLENGNISLYWDRSIITDRTIVANKPDIVVVDRSERRAMIVDITVPHDENLVKAEKDKQIKYLDLAREVVDMWDVDSAIIVPIVVTANGLIAKSLDQHLRRLSLGSWIKGLIQRAVLLDTARIVRRFLSLEP

SEQ ID NO: 12820 - protein, 1198 aa, Mesoligia furuncula
MLTRLAARRARLPPPDSSLSSASPPPVPSLTVSAVTTPAVAVASSSSDEYFSPPTTPPPARRRGGRRPPDGLGPRGPPASDRVPAPGGSVQRMRWTRSINENVMRSYYGATEGGNNLTAYRVRMLSLFQVLEPAVNVSAQRLSDQVRVIQRNHMLDDTVLDRLRNEMQSSHVIAPQPQTAVLLPQCNTNHADEGSNDRATNVSTQCNEELRSALEDAIREYRFMSPEHRPRLPRLPMHNKNRALVAALDSQLSNYFDDCEDLTDTHSILYCAAVAVCRVAHVKFANDSRATRPKPAIPAWQCRIERRIGGARALIGKLICFREGNTRPRVMRFVRRAFLGTDISPQDYMSCVTERIDFLKQKVYAWANRIRRYKRRVERYTQNRTFQSDERWVYRSWERPDQSVADTCLPDDEAMCSFWRNIWSVPVSHTEGDWAREVERACDPIPEMGAITICPQDVARAVRPLPNWKSPGPDGLHNFWIKWFLRSHARLASQFQTALESGSLPQFLTTGITHLLHKSGSTTEPKNYRPITCLPTVYKVLTSILRAKIDKHINTNSIMSVSQNGCKNGSRGTKELLLIDMAISQQVRRSRKDLSTCWIDYKKAYDSVPHTWLMRVLELYKIDATLRTFLMSCMGQWRTVLRYPGCRNIQRNSEPIRIERGIFQGDSLSPLWFCLALNPLSTLLEDSGLGYRLRRGGQVISHLLYMDDLKLFAPNNLQLMELLKVTQTFSSAIRMEFGVDKCAVMHVKRGEIVESVGTQLSDSTNLRALSASETYKYLGMSEALGINVTDMKQSLKERFFGRLKKVLNSLLSGGNKVRALNGWVMPVLMYSFGILKWTQTELDALDRRVRTLLTANRMHHPRSSVMRLYIPRKCGGRGFLNAKTLHNREICSLREYFLETDVGMHRDVVAVDKGLTPLSLAKENWRKPVVLDTNDRMEVWQSKELHGRFFRALHGPDVDLLASVAWLRFGDLFGETEGFVCAIMDEVMMTNNYRRFIVKDGTVDICRACHRPGESIRHIISGCSRLANGEYLHRHNLVARIIHQQLALKYSLVESEVPYYRYVPDPVLENGNISLYWDRSIITDRTIVANKPDIVVVDRSERRAMIVDITVPHDENLVKAEKDKQIKYLDLAREVVDMWDVDSAIIVPIVVTANGLIAKSLDQHLRRLSLGSWIKGLIQKAVLLDTARIVRRFLSLEP

SEQ ID NO: 12821 - protein, 1199 aa, Spilarctia lutea
MLTRARRRAQLSPPDSSLRSALPSPEEAIEVPAGAEASSSSSSDEFFSPPTSPIPVRRQGRGRPPTSLGSRGPLTSNRAPAAGGDVRRMKWTHSINENVMRAYFRATELGTNLTAYRVRLVSLFQELEPAVNVSAQRLSDQVRAIQRCHLLDDAALERIRSDIRNSLTVPSSSHVLNVVTNSTPQVPQNDDISELVDSEIISVSTQYNDRIRSTLEDAIREYRYVNLNNRPRLSRLPIHKRNLALVSALDSLLPKYFSNSEDLSDTHSILYCAAIAVCRVAGVKFAEYTTTTRQENTLPAWQYRIERRIAEARTLIGKLMSFRSGNTRPRVMRFVKRAFLGTTISPQEYMSCVTERIDFLKQKVYAWANRIRRYRKRVDRYNQNRMFQRNEKWVYRKWENLSPCMSDGQVPDENATNSFWRNMWSVPVTHTEGDWCRDVERSCESLLPMEPISIDEEDVSCAVRSLPNWKAPGPDGLHNFWLKWFRSSHACLASQFQTALDSGSLPQFLTTGITHLLYKSGDAMDPKNFRPITCLPTLYKLLTSILRLKITTHINHNSILSISQNGCRSGTRGTKELLIIDMTISQQVRRNRKSLATCWIDYKKAFDSVPHTWLLKVLELYKIDTTLCTFLKVCMGQWRTALRYPGCRQSAMNDVLIKIERGIFQGDSLSPLWFCLALNPLSTLLEGSGLGYRLQKDDRVISHLFYMDDLKLLAPTKLQLTALLKVTENFSNSIKMEFGVDKCAVMYVKKGEIMESEGIELSDSTKLRSLSATETYKYLGFSQSLGMPESDMKQTLRERFFSRLKKVLKSLLSGGNKVRACNGWVMPVLMYSFGVLRWTQTELDAIDRRVRTLLTAFRMHHPRSSVMRLYIPRRLGGRGLLNIKTLHNREVYNLREYFLQTDVGVHRSVVTVDTGLTPLALAKENWRKPVVLSTNDRREVWKGKELHGRFYRALHGPDIDFKTSTSWLRYGDLFGETEGFVCAIMDEVIMTNNYRKYILKDGTVDICRACHRPGESIRHIISGCSRLANGEYLHRHNQVARIVHQQLALKYHLVNSEVPYYRYVPDPVLENGRATLYWDRSIITDRTIVANKPDIVVIDRLERRAIIIDIAVPHDENLVKVEKEKQIKYLDLSHEIVDMWNVDSVIIVPIVVSAHGLIAKSLDQHLKRLTLEGWIKGLIQKAVLLDTARIVRRFLSLEP

SEQ ID NO: 12822 - protein, 1199 aa, Xestia c-nigrum
MLTRAAARRARLPPPDPSLSSALPPPEPSPIVSAVTPAVAVASSSSDEYFSPPTTPPPARRRGGRRPPDGLGPRGPPASDRVPAPGGSVQRMRWTQSNNENVMRAYYGATEGGNNLTAYRVRMLSLFQVLEPAVNVSAQRLSDQVRVIQRNRMLDDTVLDRLRTEVQSSRVTATPPSQAVVPPQSTVTTPYCDGDVSSDMVTNVSTQCSEDMRSALEGAIREYRFMTPELRPRLPRLPMHNKNKMLMAVLDSQLSNYFDSCEDLTDIHSILYCAAVAACRVAHVKFSDDRATRPKPAVPAWQYRIEQRIGGARALIGKLICFREGNTRPRVMRFVRRAFSGTDISPRDYMFRVTERIDFLKQKVYAWASRIRRYKRRVDRYTQNRTFQRDERWVYRAWERPDQGVADTRLPDDDAMCSFWCSIWSVPVSHAEGEWTRVVERACDPVPEMGAITISPQDVACAVRPLPNWKSPGPDGLHNFWIKWFTRSHARLATLFQSALESGSLPEFLTTGITHLLHKSGSTAEPKNYRPITCLPTVYKVLTSILRAKITKHIDENSVMSASQNGCRNGSRGTKELLLIDMARSQQVRRSRKDLSTCWIDYKKAYDSVPHTWLRRVLELYKVDATLRTFLMSCMGQWRTVLRYPGCRQIQRNSEPIRIERGIFQGDSLSPLWFCLALNPLSTLLEDSGLGYRLRKDGRVISHLLYMDDLKLFAPNDFQLMELLKVTETFSSAIRMEFGVDKCAVMHVKRGGIVEYVGTQLSDSINLRSLSATETYKYLGMSEALGISVADMKQSLKERFFGRLKKVFNSLLSGGNKVRAFNGWVMPVLMYSFGILKWTQTELDALDTKVRKLLTAYRMHHPRSSVMRLYIPRKCGGRGFLNAKTLHNREICSLREYFLAADVGMHRDVVAMDKGLTPLSLAKENWRIPVVFTTDDRRKEWQSKELHGRFYRALYGPDVDFQASVSWLRSGDLFGETEGFVCAIMDEVMMTNNYRRFIVKDGTVDICRACHRPGESIRHIISGCSRLANGEYLHRHNLVARIIHQQLALKYNLVESEVPYYRYVPDPVLVNGSITLYWDQSIITDRTVIANRPDIVVMDRSERRAMIVDITVPHDENLVKAEKDKQIKYLDLAREVVDMWEVDSAIIVPIVVSAHGLIAKSLDQHLRRLSLGSWIKGLIQKAVLLDTARIVRRFLSLEP

SEQ ID NO: 12823 - protein, 953 aa, Xestia c-nigrum
MAVLDSQLSNYFDSCEDLTDIHSILYCAAVAACRVAHVKFSDDRATRPKPAVPAWQYRIEQRIDGARALIGKLICFREGNTRPRVMRFVRRAFSGTDISPRDYMFRVTERIDFLKQKVYAWASRIRRYKRRVDRYTQNRTFQRDERWVYRAWERPDQGVADTRLPDDDAMCSFWRSIWSVPVSHAEGEWTRVVERACDPVPEMGAITISPQDVACAVRPLPNWKSPGPDGLHNFWIKWFTRSHARLATLFQSALESGSLPEFLTTGITHLLHKSGSTAEPKNYRPITCLPTVYKVLTSILRAKITKHIDENSVMSASQNGCRNGSRGTKELLLIDMAISQQVRRSRKDLSTCWIDYKKAYDSVPHTWLRRVLELYKVDATLRTFLMSCMGQWRTVLRYPGCRQIQRNSEPIRIERGIFQGDSLSPLWFCLALNPLSTLLEDSGLGYRLRKDGRVISHLLYMDDLKLFAPNDFQLMELLKVTETFSSAIRMEFGVDKCAVMHVKRGGIVESVGTQLSDSINLRSLSATETYKYLGMSEALGISVADMKQSLKERFFGRLKKVFNSLLSGGNKVRAFNGWVMPVLMYSFGILKWTQTELDALDTKVRKLLTAYRMHHPRSSVMRLYIPRKCGGRGFLNAKTLHNREICSLREYFLAADVGMHRDVVAMDKGLTPLSLAKENWRIPVVFTTDDRRKEWQSKELHGRFYRALHGPDVDFQASVSWLRSGDLFGETEGFVCAIMDEVMMTNNYRRFIVKDGTVDICRACHRPGESIRHIISGCSRLANGEYLHRHNLVARIIHQQLALKYNLVESEVPYYRYVPDPVLVNGSITLYWDQSIITDRTVIANRPDIVVMDRSERRAMIVDITVPHDENLVKAEKDKQIKYLDLAREVVDMWEVDSAIIVPIVVSAHGLIAKSLDQHLRRLSLGSWIKGLIQKAVLLDTARIVRRFLSLEP

SEQ ID NO: 12824 - protein, 955 aa, Xestia c-nigrum
MLMAVLDSQLSNYFDSCEDLTDIHSILYCAAVAVCRVAHVKFSDDRATRPKPAIPAWQYRIEQRIGGARALIGKLICFREGNTRPRVMRFVRRAFSGTDISPRHYMFRVTERIDFLKQKVYAWASRIRRYKRRVDRYTQNRTFQRDERWVYRAWERPDQGVADTRLPDDDAMCSFWRSIWSVPVSHAEGEWTRVVERACDPVPEMGAITISPQDVACAVRPLPNWKSPGPDGLHNFWIKWFTRSHARLATLFQSALESGSLPEFLTTGITHLLHKSGSTAEPKNYRPITCLPTVYKVLTSILRAKITKHIDENSVMSASQNGCRNGSRGTKELLLIDMAISQQVRRSRKDLSTCWIDYKKAYDSVPHTWLRRVLELYKVDATLRTFLMSCMGQWRTVLRYPGCRQIQRNSEPIRIERGIFQGDSLSPLWFCLALNPLSTLLEDSGLGYQLRKDGRVISHLLYMDDLKLFAPNDLQLMELLKVTETFSSAIRMEFGVDKCAVMHVKRGGIVESVGTQLSDSINLRSLSATETYKYLGMSEALGISVADMKQSLKERFFGRLKKVFNSLLSGGNKVRAFNGWVMPVLMYSFGILKWTQTELDALDTKVRKLLTAYRMHHPRSSVMRLYIPRKCGGRGFLNAKTLHNREICSLREYFLAADVGMHRDVVAMDKGLTPLSLAKENWRIPVVFTTDDRRKEWQSKELHGRFYRALHGPDVDFQASVSWLRSGDLFGETEGFVCAIMDEVMMTNNYRRFIVKDGTVDICRACHRPGESIRHIISGCSRLANGEYLHRHNLVARIIHQQLALKYNLVESEVPYYRYVPDPVLNSGSITLYWDQSIITDRTVIANRPDIVVMDRSERRAMIVDITVPHDENLVKAEKDKQIKYLDLAREVVDMWEVDSAIIVPIVVSAHGLIAKSLDQHLRRLSLGSWIKGLIQKAVLLDTARIVRRFLSLEP

SEQ ID NO: 12825 - protein, 1198 aa, Griposia aprilina
MLTRSAARRARPPPPDSSLSSASLPPVSSPTVSAVTTPAAVVASSSSDEYFSPPTTPPPVRRRGGHRPPDSLGPRGPPASDRVPAPGGSVQRMRWTRSINENVMRSYYGATEGGNNLTAYRVRMLSLFQVLEPAVNVSAQRLSDQVRVIQRNHMLDDTVLDRLRNEMQSSHVIAPPSQTVVVLPQSNTSQADEESDDRATNVSTQCNDELRSALEDAIREYRFISPELRPRLPLLPMHNKNRVLVAALDAQLSNYFDDCVDLTDTHSILYCAAVAACRVAHVKFANDSRATRPKPAVPAWQCRIERRIGEARALIGKLICFREGNTRPRVMRFVRRAFAGTNISPQDYMSCVTERIDFLKQKVYAWANRIRRYKRRVERYTQNRTFQRDERWVYRGWERPDQGVADTCLPDDDAMCSFWRNIWSVPVSHTEGDWTREVERACDPIPEMGAITICPQDVTRAVRPLPNWKSPGPDGLHNFWIKWFGRSHARLAAQYQVALESGSLPQFLTTGVTHLLHKSGSTAEPKNYRPIACLPTVYKVLTSILRDKINKHIDTNYIMSPSQNGCRNGSRGTKELLLIDMAISQQVRRSRKDLSTCWIDYKKAYDSVPHTWLMRVLELYKVEATLRTFLMSCMGQWRTVLHYPACRNTQRNSEPIRIERGIFQGDSLSPLWFCLALNPLSTLLEDSGLGYRLRRGGQVISHLLYMDDLKLFAPNNSQLMDLLKVTETFSSAIRMEFGVDKCAVMHVKRGEIVESVGTQLSDSINLRALSASETYKYLGMSEALGINGTDMKQSLKDRFFGRLKKVFNSLLSGGNKVRAFNGWVMPVLMYSFGILKWTQTELDALDRKVRTLLTANRMHHPRSSVMRLYIPRKCGGRGFLNAKTLHNREICSLREYFLEADVGMHRDVVTVDKGLTPLSLAKENWRKPVVLDTNDRMEVWQSKELHGRFFRALHGPDVDQLASVAWLRFGDLFGETEGFVCAIMDEVMMTNNYRRFIVKDGTVDICRACHRPGESIRHIISGCSRLANEEYLHRHNLVARIIHQQLALKYSLVESEVPYYRYVPDPVLENGHITLYWDRSIITDRTIVANKPDIVMVDRLERRAMIVDITVPHDGNLVKAEKDKQIKYLDLAREVVDMWDVDSAIIVPIVVTANGLIAKSLDQHLRRLSLGSWIKGLIQKAVLLDTARIVRRFLSLEP

SEQ ID NO: 12826 - protein, 1197 aa, Griposia aprilina
MLTRSAALRARLPTPDSSLSSASPPPVSSPIVSAVTTPAAVVASSSSDEYFSPPTTPPPARRRGGHRPPDGLGPRGPPASDRVPAPGGSVQRMRWTQSINENVMRSYYEATEGGNNLTAYRVRMLSLFQVLEPAVNVSAQRLSDQVRVIQRNHMLDDTVLDRLRSEMQSSHVIAPPSQTVVVLPQPITSHDEGSDDRATNVSTQCNEELRSALEGAIREYRFMSPELRPRLPRLPMHNKNRALVAALDSQLSNYFDDCVDLTDTHSILYCAAVAACRVAHVKFANDSRATRPKPAVPAWQCRIERRIDGARALIGKLICFREGNTRPRVMRFVRRAFAGTDVSPQDYISCVTERIDFLKQKVYAWASRIRRYKRRVERYTQNRTFQRDERWVYRDWERPDQGVADTYLPDDDAMCSFWHNIWSVPVSHTEGDWTREVERACEPIPEMGAITICPQDVARAVRPLPNWKSPGPDGLHNFWIKWFLKSHARLAAQFQAALESGSLPQFLTTGVTHLLHKSGSIAEPKNYRPITCLPTVYKVLTSILRAKINKHIDTNSIMSASQNGCRNGSRGTKELLLIDMAISQQVRRSRKDLSTCWIDYKKAYDSVPHTWLMRVLELYKVDATLRTFLKSCMGQWRTVLRSPTCRNTQRNSEPIRIERGIFQGDSLSPLWFCLALNPLSTLLEDSGLGYRLRRGGRVISHLLYMDDLKVFAPNNLQLIELLKVTETFSSAIRMEFGLDKCAVMHVKRGEIVESVGTQLSDSMNLRALSASETYKYLGMSEALGVNNTDMKQSLKERFFGRLKKVFNSLLSGGNKVRAFNGWVMPVLMYSFGILKWTQTELDTLDRRVRTLLTANRMHHPRSSVMRLYIPRKCGGRGFLNAKSLHNREICSLREYFLEADVGMHRDVVAVDKGLTPLSLAKENWRKPVVLDTNDRMEVWQSKELHGRFFRALHGPYVDVQASVAWLRFGDLFGETEGFVCAIMDEVMMTNNYRRFIVKDGTVDICRACHRPGESIRHIISGCSRLANEEYLHRHNLVARIIHQQLALKYSFVESEVPYYRYVPDPVLENGTITLYWDRSIITDRTIIANKPDIVLVDRRERRAMIVDITIPHDGNLVKAEKDKQIKYLDLAREVVDMWDVDSAIIVPIVVTANGLIAKSLDQHLRRLSLGSWIKGLIQKAVLLDTARIVRRFLSLEP

SEQ ID NO: 12827 - protein, 1198 aa, Griposia aprilina
MLTRSAARRARPPPPDSSLSSASLPPVSSPTVSAVTTPAAVVASSSSDEYFSPPTTPPPVRRRGGHRPPDGLGPRGPPASDRVPAPGGSVQRMRWTRSINENVMRSYYGATEGGNNLTAYRVRMLSLFQVLEPAVNVSAQRLSDQVRVIQRNHMLVDTVLDRLRNEMQSSHVIAPPSQTVVVLPQSNTSQADEESDDRATNVSTQCNDELRSALEDAIREYRFISPDLRPRLPRLPMHNKNRVLVAALDAQLSNYFDDCVDLTDTHSILYCAAVAACRVAHVKFANDSRATRPKPAVPAWQCRIERRIGEARALIGKLICFREGNTRPRVMRFVRRAFAGTNISPQDYMSCVTERIDFLKQKVYAWANHIRRYKRRVERYTQNRTFQRDERWVYRGWERPDQGVADTCLPDDDAMCSFWRNIWSVPVSHTEGDWTREVERACDPIPEMGAITICPQDVTRAVRPLPNWKSPGPDGLHNFWIKWFGRSHARLAAQYQVALESGSLPQFLTTGVTHLLHKSGSTAEPKNYRPIACLPTVYKVLTSILRDKINKHIDTNYIMSPSQNGCRNGSRGTKELLLIDMAISQQVRRSRKDLSTCWIDYKKAYDSVPHTWLMRVLELYKVEATLRTFLMSCMGQWRTVLHYPACRNTQRNSEPIRIERGIFQGDSLSPLWFCLALNPLSTLLEDSGLGYRLRRGGQVISHLLYMDDLKLFAPNNSQLMDLLKVTETFSSAIRMEFGVDKCAVMHVKRGEIVESVGTQLSDSINLRALSASETYKYLGMSEALGINGTDMKQSLKDRFFGRLKKVFNSLLSGGNKVRAFNGWVMPVLMYSFGILKWTQTELDALDRKVRTLLTANRMHHPRSSVMRLYIPRKCGGRGFLNAKTLHNREICSLREYFLEADVGMHRDVVTVDKGLTPLSLAKENWRKPVVLDTNDRMEVWQSKELHGRFFRALHGPDVGQLASVAWLRFGDLFGETEGFVCAIMDEVMMTNNYRRYIVKDGTVDICRACHRPGESIRHIISGCSRLANEEYLHRHNLVARIIHQQLALKYSLVESEVPYYRYVPDPVLENGHITLYWDRSIITDRTIVANKPDIVMVDRLERRAMIVDITVPHDGNLVKAEKDKQIKYLDLAREVVDMWDVDSAIIVPIVVTANGLIAKSLDQHLRRLSLGSWIKGLIQKAVLLDTARIVRRFLSLEP

SEQ ID NO: 12828 - protein, 962 aa, Griposia aprilina
MHNKNRVLVAALDAQLSNYFDDCVDLTDTHSILYCAAVAACRVAHVKFANDSRATRPKPAVPAWQCRIERRIGGARALIGKLICFREGNTRPRVMRFVRRAFAGTNISPQDYMSCVTERIDFLKQKVYAWANRIRRYKRRVERYTQNRTFQRDERWVYRGWERPDQGVADTCLPDDDAMCSFWRNIWSVPVSHTEGDWTREVERACDPIPEMGAITICPQDVTRAVRPLPNWKSPGPDGLHKFWIKWFGRSHARLAAQYQVALESGSLPQFLTTGVTHLLHKSGSTAEPKNYRPIACLPTVYKVLTSILRDKINKHIDTNYIMSPSQNGCRNGSRGTKELLLIDMAISQQVRRSRKDLSTCWIDYKKAYDSVPHTWLMRVLELYKVEATLRTFLMSCMGQWRTVLRYPACRNTQRNSEPIRIERGIFQGDSLSPLWFCLALNPLSTLLEDSGLGYRLRRGGQVISHLLYMDDLKLFAPNNSQLMDLLKVTETFSSAIRMEFGVDKCAVMHVKRGEIVESVGTQLSDSINLRALSASETYKYLGMSEALGINGTDMKQSLKDRFFGRLKKVFNSLLSGGNKVRAFNGWVMPVLMYSFGILKWTQTELDALDRKVRTLLTANRMHHPRSSVMRLYIPRKCGGRGFLNAKTLHNREICSLREYFLEADVGMHRDVVTVDKGLTPLSLAKENWRKPVVLDTNDRMEVWQSKELHGRFFRALHGPDVDQLASVAWLRFGDLFGETEGFVCAIMDEVMMTNNYRRFIVKDGTVDICRACHRPGESIRHIISGCSRLANEEYLHRHNLVARIIHQQLALKYSLVESEVPYYRYVPDPVLENGHITLYWDRSIITDRTIVANKPDIVMVDRLERRAMIVDITVPHDGNLVKAEKDKQIKYLDLAREVVDMWDVDSAIIVPIVVTANGLIAKSLDQHLRRLSLGSWIKGLIQKAVLLDTARIVRRFLSLEP

SEQ ID NO: 12829 - protein, 868 aa, Griposia aprilina
MRFVRRAFAGTNISPQDYMSCVTERIDFLKQKVYAWANRIRRYKRRVERYTQNRTFQRDERWVYRGWERPDQGVADTCLPDDDAMCSFWRNIWSVPVSHTEGDWGREVERACDPIPEMGAISICPQDVTRAVRPLPNWKSPGPDGLQNFWIKWFGRSHARLAAQYQVAIESGSLPQFLTTGVTHLLHKSGSTAEPKNYRPITCLPTVYKVLTSILRAKINKHIDTNSIMSPSQNGCRNGSRGTKELLLIDMVISQQVRRSRKDLSTCWIDYKKAYDSVPHTWLMRVLELYKVDATLRTFLKSCMGQWRTILHYPGCRNIQRDNEPIRIERGIFQGDSLSPLWFCLALNPLSTLLEDSGLGYRLRRGGQVISHLLYMDDLKLFAPNNLQLMELLKVTETFSSAIRMEFGVDKCAVMHVKRGEIVESVGTQLSYSINLRALSASDTYKYLGMSEALGINGTDMKQSLKERFFGRLKKVFNSLLSGGNKVRAFNGWVMPVLMYSFGILKWTQTELDALDRKVRTLLTANRMHHPRSSVMRLYIPRKCGGRGFLNAKTLHNREICSLREYFLEADVGMHRDVVTVDKGLTPLSLAKENWRKPVVLDTNDRMEVWQSKELHGRFFRALHGPDVDQLASVAWLRFGDLFGETEGFVCAIMDEVILTNNYRRHIMKDGTVDVCRACHRPGESIRHIISGCSRLANEEYLHRHNLVARIIHQQLALKYSLVESEVPYYRYVPDPVLENGHITLYWDRSIITDRTIVANKPDIVVVDRLERRAMIVDITVPHDGNLVKAEKDKQIKYLDLAREIVDMWDVDSAIIVPIVVTANGLIAKSLDQHLRRLSLGSWIKGLIQKAVLLDTARIVRRFLSLEP

SEQ ID NO: 12830 - protein, 1199 aa, Griposia aprilina
MMLTRSAKRRAHPPPPDSSLSSASPLPVSSPTVSAVTTPAAVVASSSSDEYFSPPTTPPPVRRRGGHRPPDGLGPRGPPASDRVPAPGGSVQRMRWTRSINENVMRSYYGATEGGNNLTAYRVRMLSLFQVLEPAVNVSAQRLSDQVRVIQRNHMLDDTVLDRLRNEMQSSHVIAPPSQTVVVLPQSNTSQADEESDDRATNVSTQCNDELRSALEDAIREYRFISPELRPRLPRLPMHNKNRVLVAALDAQLSNYFDDCVDLTDTHSILYCAAVAACRVAHIKFANDSRPTRPKPAVPAWQCRIERRIGGARALIGKLICFREGNTRPRVMRFVRRAFAGTNISPQDYMSCVTERIDFLKQKVYAWANRIRRYKRRVERYTQNRTFQRDERWVYRGWERPDQGVADTCLPDDDAMCSFWRNIWSVPVSHTEGDWGREVERACDPIPEMGAISICPQDVTRAVRPLPNWKSPGPDGLQNFWIKWFGRSHARLAAQYQVAIESGSLPQFLTTGVTHLLHKSGSTAEPKNYRPITCLPTVYKVLTSILRAKINKHIDTNSIMSPSQNGCRNGSRGTKELLLIDMAISQQVRRSRKDLSTCWIDYKKAYDSVPHTWLVRVLELYKVDATLRTFLKSCMGQWRTILHYPGCRNIQRDNEPIRIERGIFQGDSLSPLWFCLALNPLSTLLEDSGLGYRLRRGGQVISHLLYMDDLKLFAPNNLQLMELLKVTETFSSAIRMEFGVDKCAVMHVKRGEIVESVGTQLSYSINLRALSASDTYKYLGMSEALGINGTDMKQSLKERFFGRLKKVFNSLLSGGNKVRAFNGWVMPVLMYSFGILKWTQTELDALDRKVRTLLTANRMHHPRSSVMRLYIPRKCGGRGFLNAKTLHNREICSLREYFLEADVGMHTDVVKVDKGLTPLSLAKENWRKPVVLDTNDRMEVWQSKELHGRFFRALHEPDVDQLASVAWLRFGDLFGETEGFVCAIMDEVILTNNYRRHIMKDGTVDVCRACHRPGESIRHIISGCSRLANEEYLHRHNLVARIIHQQLALKYSLVESEVPYYRYVPDPVLENGHITLYWDRSIITDRTIVANKPDIVVVDRLERRAMIVDITVPHDGNLVKAEKDKQIKYLDLAREVVDMWDVDSAIIVPIVVTANGLIAKSLDQHLRRLSLGSWIKGLIQKAVLLDTARIVRRFLSLEP

SEQ ID NO: 12831 - protein, 868 aa, Griposia aprilina
MRFVRRAFAGTNISPQDYMSCVTERIDFLKHKVYAWANRIRRYKRRVERYTQNRTFQRDERWVYRGWERPDQGVADTCLPDDDAMCSFWRNIWSVPVSHTEGDWTRKVERACDPIPEMGAITICPQNVTRAVRPLPNWKSPGPDGLHNFWIKWFGRSHARLAAQYQVALESGSLPQFLTTGVTHLLHKSGSTAEPKNYRPIACLPTVYKVLTSILRDKINKHIDTNYIMSPSQNGFRNGSRGTKELLLIDMAISQQVRRSRKDLSTCWIDYKKAYDSVPHTWLMRVLELYKVEATLRTFLMSCMGQWRTVLHYPACRNTQRNSEPIRIERGIFQGDSLSPLWFCLALNPVSTLLEDSGLGYRLRRGGQVISHLLYMDDLKLFAPNNSQLMDLLKVTETFSSAIRMEFGVDKCAVMHVKRGEIVESVGTQLSDSINLRALSASETYKYLGMSEALGINGTDMKQSLKDRFFGRLKKVFNSLLSGGNKVRAFNGWVMPVLMYSFGILKWTQTELDALDRKVRTLLTANRMHHPRSSVMRLYIPRKYGGRGFLNAKTLHNREICSLREYFLEADVGMHRDVVTVDKGLTPLSLAKENWRKPVVLDTNDRMEVWQSKELHGRFFRALHGPDVDQLASVAWLRFGDLFGETEGFVCAIMDEVMMTNNYRRFIVKDGTVDICRACHRPGESIRHIISGCSRLANEEYLHRHNLVARIIHQQLALKYSLVESEVPYYRYVPDPVLENGHITLYWDRSIITDRTLVANKPDIVMVDRLEWRAMIVDITVPHDGNLVKAEKDKQIKYLDLAREVVDMWDVDSAIIVPIVVTANGLIAKSLDQHLRRLSLGSWIKGLIQKAVLLDTARIVRRFLSLEP

SEQ ID NO: 12832 - protein, 1194 aa, Griposia aprilina
MTDVTSDNTNMKTKSLSSASLPPVSSPTVSAVTTPAAVVASSSSDEYFSPPTTPPPVRRRGGHRPPDGLGPRGPPVSDRVPAPGGSVQRMRWTRSINENVMRSYYGATEGGNNLTAYRVRILSLFQVLEPAVNVTAQRLSDQVRVIQRNHMLDDTVLDRLRNEMQSSHVIAPPSQTVVVLPQSKTSQADEESDDRATNVSTQCNDELRSALEDAIREYRFISPELRPRLPRLPMHNKNRALVVALDAQLSNYFDDCVDLTDTHSILYCAAVAACRVAHVKFANDSRATRPKPAVPAWQCRIERRIGGARALIGKLICFREGNTRPRVMRFVRRAFAGTDISPQDYMSCVTERIDFLKQKVYAWANRIRRYKRRVERYTQNRTFQRDERWVYRGWERPDQGVADTCLPDDAMCSFWRNIWSVPVSHTEGDWTREVERACDPIPEMGAITICPQDVTRAVRPLPNWKSPEPDGLHNFWIKWFGRSHARLAAQYQVALESGSLPQFLTTGVTHLLHKSGSTAEPKNYRPIGCLPTVYKVLTSILRDKINKHIDTNYIMSPSQNGCRNGSRGTKELLLIDMAISQQVRRSRKDLSTCWIDYKKAYDSVPHTWLMRVLELYKVEATLRTFLMSCMGQWRTVLRYPACRNTQRNSEPIRIERGIFQGDSLSPLWFCLALNPLSTLLEDSGLSYRLRRGGQVISHLLYMDDLKLFAPNNSQLMDLLKVTETFSSAIRMEFGVDKCAVMHVKRGEIVESVGTQLSDSINLRALSASETYKYLGMSEALGINGTDMKQSLTDRFFGRLKKVFNSLLSGGNKVRAFNGWVMPVLMYSFGILKWTQTELDALDRKVRTLLTANRMHHPRSSVMRLYIPRKCGGRGFLNAKTLHNREICSLREYFLEADVGMHQDVVTVDKGLTPLSFAKENWRKPVVLDTNDRMEVWQSKELHGRFFRALHGPDVDQLASVAWLRFGDLFGETEGFVCAIMDEVMITNNYRRFIVKDGTVDICRACHRPGESIRHIISGCPRLANEEYFHRHNLVARIIHQQLALKYSLVESEVPYYRYVPDPVLENGHITLYWDRSIITDRTIVANKPDIVMVDRLERRAMIVDITVPHDGNLVKAEKDKQIKYLDLAREVVDMWDVDSAIIVPIVVTANGLIAKSLNQHLRRLSLGSWIKGLIQKAVLLDTARIVRRFLSLEP

SEQ ID NO: 12833 - protein, 1204 aa, Omphaloscelis lunosa
MKIMLTRLAARRARLPPPDSPLSSASSPPVRSPTVNAVMTPAAAVASSSSDEYFSPPTTPPPARRRGRRRPPDGLGPRGPPASDRVPAPGGSVQRMRWTRSINENVMRSYYGATEGGNNLTAYRVRMLSLFQVLEPAVNVSAQRLSDQVRVIQRNHMLDDTVLDRLRSEMQSSHVIAPPLRSVIIPSQMSSVITSQADERIDDRATNVSTQCNEDLRSALEGAIQEYRFMSPELRPRLPRLPMHNKNKALVAVLDSQLSNYFDDCEDLTDTHSILYCAAVAVCRVAHLKFSNDSRATRPKPAAPAWQCRIERRIGGARTLIGKLICFREGNTRPRVMRFVRRAFLGTDISPQDYMTRVTERIDFLKQKVYAWANRIRRYKRRVERYTQNRTFQSDERWVYRAWERPDQGVADTHLPDDDAMCSFWRSIWSVPVSHTEGDWTREVERACDPIPEMGAITICPQDVARAVRPLPNWKSPGPDGLHNFWIKWFVRSHARLAAQYQTALESGSLPQFLTTGVTHLLHKSGSTAEPKNYRPITCLPTVYKVLTSILRAKINKHIDTNSIMSASQNGCRNGSRGTKELLLIDMAISQQVRRSRKDLSTCWIDYKKAYDSVPHTWLMRVLELYKVHKTLRTFLMSCMGQWRTVLRYPGCRNIQRNSEPIRIERGIFQGDSLSPLWFCLALNPLSTLLEDSGLGYRLRRGGQVISHLLYMDDLKLFAPNNLQLMELLKVTETFSSAIRMEFGVDKCAVMHVKRGEIMESVRTQLSDSINLRALSASETYKYLGMSEALGINVTDMKQSLKERFFGRLKKVLNSLLSGGNKVRAFNGWVMPVLMYSFGILKWTQTELDALDRRVRTLLTAYRMHHPRSSVMRLYIPRKCGGRGFLNAKTLHNREICSLREYFLGVDVGMHRDVVVVDKGLTPLSLAKENWRKPVVLDTKDRMEIWQSKELHGRYLRALHGPDVDLPASVTWLRFGDLFGETEGFVCAIMDEVMMTNNYRRFIVKDGTVDICRACHRPGESIRHIISGCSRLANEEYLHRHNLVARIIHQQLALKYSLVESEVPYYRYVPDPVLENGNITLYWDRSIITDRTIAANKPDIVVVDRGERRTMIIDITVPHDENLVKAEKDKQIKYLDLAREVVDMWDVDSAIIVPIVVTANGLIAKSLDQHLRRLSLGSWIKGLIQRAVLLDTARIVRRFLSLEP

SEQ ID NO: 12834 - protein, 1204 aa, Omphaloscelis lunosa
MLTRSATRRAHPPPPDSSLSSASPPSIPNPTVNVVTTPTAAVASSSSDEYFSPPTSPTPVRRQGRGRPPAGLGPRGQQAPNRVPAAGGYVSRIRWTQSMNENVMRAYYGATEGGINLTVYRSRMLSLFQVLEPTINVSAQRLSDQVRVIQHNHRLDNATLDRLRLEMQNSFASNPPPSQNVMQAPAAVPLQANQHEEEEDGRAISADNLCNVELRSALEDAIREYRFTSPDLRPRLPRLPMNKRNRALVCALDALLPNFIGSSTNLCDTHSILYCTAVAACRIARVKFPNTDRSVRPKPVAPAWQCRIECRINEARVLIGKLICFREGNTRPRVMRFVRRAFSGTSISPREYVSHVTERIDFLKQKVYAWANRIRRYRRRVDRYTQNRMFQNDERWVYRTWERPTPNQGVTDTRLPNSDAMKAFWQSIWSVPVSHTEGDWMRVVEQACDPIPHMEAISITPLDVARAVRPLPNWKSPGPDGLHNFWLKWLQRSHTCLATQFQSSLDTGSLPLFFTTGVTHLLHKSGSTAEPKNYRPITCLPTIYKVLTSILRAKISHHINNNLIMSVSQNGCKNGSRGTKELLLIDMTISQQVRKSRKDLSTCWIDYKKAYDSVPHTWLMRVLELYKIDATLRTFLMSCMRQWRTVLLYPGCRQIRGIDEPIRIERGIFQGDSLSPLWFCLALNPLSTMLEDSGLGYRLRRGGQVISHLLYMDDLKLFAPNNLRLMELLKITETFSSAIRMEFGVDKCAVMHVKRGEIMESVGTQLADSIHLRSLSSTETYKYLGMSEALGINVTDMKQSLKERFFGRLNKVLNSLLSGGNKVRAFNGWVMPVLMYSFGILKWTQTELDALDRKVRTLLTANRMHHPRSSVMRLYIPRKCGGRGFLNAKTLHNREIYSLREYFLQTNAGMHRDVVAVDKGLTPLSLAKENWRKPTVLDTNDRKEIWQGKELHGRFFRALHGPDVDFLTSVSWLRFGDLFGETEGFVCAIMDEVIMTNNYRKYIVKDGTVDICRACHQPGESIRHIVSGCSRLANGEYLHRHNLVARIIHQQLALQYNLIESEVPYYRYVPDPVLENGHTTLYWDRSIITDRTIVANKPDIVVIDRRERRAMIVDIAVPHDENLVKAEKDKKIKYLDLAHEVVDMWDVDSAIIVPIIVTVNGLIAKSLDQHLRRLSLRGWIKGLIQKAVLLDTARIVRRFLSLEP

SEQ ID NO: 12835 - protein, 1044 aa, Sesamia nonagrioides
MLDDTVLDRLRNEMQSSRIIAHQSQTAEIPPQPTNYADEGSNDRATNVSTQCNEELINALEAAIREYRFTPAEQRPRLPRLPMHNRNRALMAALDAQLSDYFDTCEDLTDTHSILYCAAVAACRVAHVKFPSDSRATRPKPVVPAWQHRIERRIGGARALIGKLICFREGNTRPRVMRFVRRAFAGTNISPQNYMARVTERIDFLKQKVYAWANRIRRYKRRVERYTQNRTFQSNERWVYRDWERPEQGVTDTCLPDDDAMCSFWRSIWSVPVSHTEGDWARDVERACDPIPEMGAITICPQDVACAVRPLPNWKSPGPDGLHNFWIKWFPRSHARLASQFQTALVSGSLPQFLTTGITHLLHKSGSTAEPKNYRPITCLPTVYKVLTSILKTKINKHIDSNSIMSASQNGCKSGSRGTKELLLIDMAISQQVRRSRKDLSTCWIDYRKAYDSVPHTWLMRVLELYKVDATLCTFLMSCMKTWRTVLRYPGCRNIQRNSEPIRIERGIFQGDSLSPLWFSLALNPLSTLLEDSGLGYRLRRGGQVISHLLYMDDLKLFAPNNSQLRELLKITETFSSSIRMEFGVDKCAVMHVKRGEIMESVGTQLTDSINLRALSASETYKYLGMSEALGINVTDMKQSLKERFFGRLKKVLNSLLSGGNKVRAFNGWVMPVLMYSFGILKWTQTELDALDQRVRTLLTANRLHHPRSSVMRLYIPRKCGGRGFLNAKTLHNREVCSLRDYFLVTDVGMHRDVVAADKGLTPLSLAKENWRKPVVLDTNDRMEVWKSKELHGRFFRALHGPDVDFQASVAWLRFGDLFGETEGFVFAIMDEVMMTNNYRRFIVKDGTVDICRACHRPGESIRHIISGCSRLANGEYLHRHNLVARIIHQQLALKYNLVESEVPYYRYTPDPVLENGYITLYWDRSIITDRTIVANKPDIVMVDRSERRAMIVDITIPHDENLVKAEKDKQIKYLDLAHEVVDMWEVDSAIIVPIVVTANGLIAKSLDQHLRRLSLGSWIKGLIQKAVLLDTARIVRKFLSLEP

SEQ ID NO: 12836 - protein, 1197 aa, Sesamia nonagrioides
MLTRSAARRARPPSPDSLLSSASPPPASSATVSAVTTPAAADASSSSDEYFSPPTTPPPARRRGGRRPPDRLGPRGPSASDRVPAPGGSVQRMRWTQSINENVMRSYYGATEGGNNLTAYRVRMLSLLQVLEPAVNVSAQRLSDQVRVIQRNHMLDDTVLDRLRNEMQSSRIIAHQSQTAEIPPQPTNYADEGSNDRATNVSTQCNEELINALEAAIREYRFTPAELRPRLPRLPMHNRNRALMAALDAQLSDYFDTCEDLTDTHSILYCAAVAACRVAHVKFPSDSRATRPKPVVPAWQHRIERRIGGARALIGKLICFREGNTRPRVMRFVRRAFAGTNISPQNYMARVTERIDFLKQKVYAWANRIRRYKRRVERYTQNRTFQSNERWVYRDWERPEQGVTDTCLPDDDAMCSFWRSIWSVPVSHTEGDWARDVERACDPIPEMGAITICPQDVACAVRPLPNWKSPGPDGLHNFWIKWFPRSHARLASQFQTALVSGSLPQFLTTGITHLLHKSGSTAEPKNYRPITCLPTVYKVLTSILKTKINKHIDSNSIMSASQNGCKSGSRGTKELLLIDMAISQQVRRSRKDLSTCWIDYRKAYDSVPHTWLMRVLELYKVDATLRTFLMSCMKTWRTVLRYPGCRNIQRNSEPIRIERGIFQGDSLSPLWFCLALNPLSTLLEDSGLGYRLRRGGQVISHLLYMDDLKLFAPNNSQLRELLKITETFSSSIRMEFGVDKCAVMHVKRGEIMESVGTQLTDSINLRALSASETYKYLGMSEALGINVTDMKQSLKERFFGRLKKVLNSLLSGGNKVRAFNGWVMPVLMYSFGILKWTQTELDALDQRVRTLLTANRLHHPRSSVMRLYIPRKCGGRGFLNAKTLHNREVCSLRDYFLVNDVGMHRDVVAADKGLTPLSLAKENWRKPVVLDTNDRMEVWKSKELHGRFFRALHGPDVDLQASVAWLRFGDLFGETEGFVFAIMDEVMMTNNYRRFIVKDGTVDICRACHRPGESIRHIISGCSRLANGEYLHRHNLVARIIHQQLALKYNLVESEVPYYRYTPDPVLENGYITLYWDRSIITDRTIVANKPDIVMVDRSERRAMIVDITIPHDENLVKAEKDKQIKYLDLAHEVVDMWEVDSAIIVPIVVTANGLIAKSLDQHLRRLSLGSWIKGLIQKAVLLDTARIVRKFLSLEP

SEQ ID NO: 12837 - protein, 1200 aa, Sesamia nonagrioides
MLTRSAARRARPPSPDSLLGSASSPPVSSATASAVTTPAAAVASSSSDEYFSPPTTPPPARRRGGRRPPDRLGPRGPSASDRVPAPGGSVQRMRWTQSINENVMRSYYGATEGGNNLTAYRVRMLSLFQVLEPAVNVSAQRLSDQVRVIQRNHMLDDVVLDRLRLESRNSHVTPASSLVAVQINSVSPRPNHVDEEDDDRAISVSPQCIEKLRSALEDAFCEYRSTPPELRPRLPRLPMHKKNKALVCALDSQLSNYLKDSKDLNDTHSILYCGAVAICRVAHVKFPDSDRATRPKSAVPAWQCRIERRIGETRALIGKLISFREGNTRPRVMRFVRRAFSGTDTSTRDYLFRVTERIDFFKQKIYAWANRIRRYRRRVERYSQNRNFQSDERRVYRAWERSDQGVTDTCLPDDDATCSFWRNIWSVPVSHTEGSWTRVVERACDPVPEMGAITICPQDVARAVRPLPNWKSPGPDGLHNFWIKWFSGSHARLASQFQTALESGSLPQFLTTGVTHLLHKSGSTAEPKNYRPITCLPTVYKVLTSILKSKINTHIDSNSIMSASQNGCRSGSRGTKELLLIDMAISQQVRRSRKDLSTCWIDYKKAYDSVPHTWLMRVLELYKVDATLRTFLMTCMRTWRTVLRYPGCRNIQRNSEPIRIERGIFQGDSLSPLWFCLALNPLSTLLEDSGLGYRLRRGGQVISHLLYMDDLKLFAHTDSQLKELLKITETFSSSIRMEFGVDKCAVMHVKRGEIMESVGTQLTSSINLRALSASETYKYLGMSEALGIDVTDMKQSLKERFFGRLKKVLNSLLSGGNKVRAFNGWVMPVLMYSFGILKWTQTELDALDRRVRTLLTANRLHHPRSSVMRLYIPRKCGGRGFLNAKTLHNREICSLREYFLTTDVGMHRDVVAVDKGLTPLSLAKENWRKPVVLDTNDRMEVWKSKELHGRFFKALHGPDVDLQASVAWLRFGDLFGETEGFVCAITDEVMMTNNYRRFIVKDGTVDICRACHRPGESIRHIISGCSRLANGEYLHRHNLVARIIHQQLALKYNLVESEVPYYRYTPDPVLENDHITLYWDRSIITDRTIVANKPDIVLVDRSERRAMIVDITIPHDENLVKAEKDKQIKYLDLAHEVVDMWEVDSAIIVPIVVTANGLIAKSLDQHLRRLSLGSWIKGLIQKAVLLDTARIVRKFLSLEP

SEQ ID NO: 12838 - protein, 965 aa, Sesamia nonagrioides
MHNRNSALMAALDAQLSNYFDTCEDLTDTHSILYCAAVAACRVAHVKFPSDSGATRPKPVVPAWQHRIERRIGGARALIGKLICFREGNTRPRVMRFVRRAFAGTNISPQNYMARVTERIDCLKQKVYAWANRIRRYKRRVERYTQNRTFQSNERWVYRDWERPEQGVTDTCLPDDDAMCSFWGSIWSVPVSHTEGDWARDVERTCDPIPEMGAITICPQDVACAVRPLPNWKSPGPDGLHNFWIKWFPRSHARLASQYQTALVSGSLPQFLTTGITHLLHKSGSTAEPKNYRPVTCLPTVYKVLTSILKTKINKHIDSNSIMSASQNGCRSGSRGTKELLLIDMAISQQVRRSRKDLSTCWIDYRKAYDSVPHTWLMRVLELYKVDATLRTFLMSCMRTWRAVLRYPGCRNIQRNSEPIRIERGIFQGDSLSPLWFCLALNPLSTLLEDSGLGYRLRRGGQVISHLLYMDDLKLFAPNNSQLRELLKITETFSSSISMEFGVDKCAVMHVKRGEIMESVGTQPTDSINLRALSASETYKYLGMSEALSINVTDMKQSLKERFFGRLKKVLNSLLSGGNKVRAFNGWVMPVLMYSFGILKWTQTELDALDQRVRTLLTANRLHHPRSSVMRLYIPRKCGGRGFLNAKTLHNREVCSLREYFLETNVGMHRDVVAADKGLTPLSLAKENWRKPVVLDTNDRLEVWKSKELHGRFFRALHGPDVDFQASVAWLRFGDLFGETEGFVFAIMDEVMMTNNYRRFIVKDGTVDICRACHRPGESIRHIISGCSRLANGEYLHRHNLVARIIHQQLALKYNLVESEVPYYRYMPDPVLENGHITLYWDRSIITDRTIVANKPDIVLVDRSERRAMIVDITIPHDENLVKAEKDKQIKYLDLAHEVVDMWEVDSAIIVPIVVTANGLIAKSLDQHLRRLSLGSWIKGLIQRAVLLDTARIVRKFLSLEPDRR

SEQ ID NO: 12839 - protein, 1197 aa, Sesamia nonagrioides
MLTRSAARRARPPSPDSLPSSASPPPASSTTVSAVTTPAAAVASSSSDEYFSPPTTPPPVRRRGGHRPPDCLGPRGPSASDRVPAPGGSVQRMRWTQSINENVMRSYYGATEGGNNLTAYRVRMLSLFQVLEPAVNVSAQRLSDQVRVIQRNHMLDDTVLDRLRNEMQSSRVITHQSQSAEIPPQPTNYADEGSNDRATNVSTQCNEELRNALEAAIREYRFMSAELRPRLPRLPMHNRNRALMAALDAQLSNYFDTCENLTDTNSILYCAAVAACRVAHVKFSSDSRATRTKPVVPAWQHRIERRIGGARALIGKLICFREGNTRPRVMRFVRRAFSGTNTSPQNYMARITERIDFLKQKVYAWANRIRRYKRRVERYTQNRTFQSNQRWVYRDWERPEQGVADTCLPDDDAMCSFWRSIWSVPVSHTEGDWARDVERACDPIPEMGAITICPQDVARAVRPLPNWKSPGPDGLHNFWIKWFPRSHASLASQFQTALVSGSLPQFLTTGITHLLHKSGSTTEPKNYRPITCLPTVYKVLTSILKAKINNHIDSNSIMSVSQNGCRSGSRGTKELLLIDMAISQQVRRSRKDLSTCWIDYKKAYDSVPHTWLMRVLELYKVDTTLRTFLMTCMGQWRTVLRYPGCRNILRNSEPIRIERGIFQGDSLSPLWFCLALNPLSTLLQDSGLGYRLRRGGQVISHLLYMDDLKLFAPNNLQLKELLKITETFSSAIRMEFGVDKCAVMHIKRGEIVESVGTQLTSSINLRALSASETYKYLGMSEALGINVTDMKQSLKERFFGRLKKVLNSLLSGGNKVRAFNGWVMPVLMYSFGILKWTQTELDTLDQRVRTLLTANRLHHPRSSVMRLYIPRKCGGRGFLNAKTLHNREICSLREYFLETDVGMHRDVVAVDKGLTPRSLAKENWRKPVVLDTNDRMEVWKSKELHGRFFRALHGPDVDLQASVAWLRFGDLFGETEGFVCAIMDEVMMTNNYRRFIVKDGTVDICRACHRPGESIRHIISGCSRLANGEYLHRHNLVARIIHQQLALKYNLVESEVPYYRYMPDPVLENGHITLYWDRSIITDRTIVANKPDIVMVDRSERRAMIVDITIPHDENLVKAEKDKQIKYLDLAHEVVDMWEVDSAIIIPIVVTANGLIAKSLDQHLRRLSLGSWIKGLIQKAVLLDTARIVRKFLSLEP

SEQ ID NO: 12840 - protein, 962 aa, Sesamia nonagrioides
MHNRNRALMAALDAQLSNYFDTCKDLTDTHSILYCAAVAACRVAHVKFPSDFRATRPKPVVPAWQHRIERRIGGARALIGKLICFREGNTRPRVMRFVRRAFSGTNTSPQYYMARVTERIDFLRQTVYAWANRIRRYKRRVERYTQNRTFQSNERRVYRDWERPEQGVTDTCLPDDDAMCSFWRSIWSVPVSHTEGDWARDVERACDPIPEMGAITICPQDVAHAVRPLPNWKSPGPDGLHNFWIKWFPRSHARLASQFQTALVSGSLPQFLTTGITHLLHKSSSTAEPKNYRPITCLPTVYKVLTSILKTKINKHIDSYSIVSTSQNGCRSGSRGTKELLLIDMAISQQVRRSRKDLSTCWIDYKKAYDSVPHTWLMRVLELYKVDATLRTFLMSCMRTWRTVLRYPGCRNIQRNSGPIRIERGIFQGDSLSPLWFCLALNPLSTLLEDSGLGYRLRRGGQVISHLLYMDDLKLFAHTDSQLKELLKITETFSSSIRMEFGVDKCAVMHVKRGEIMESVGTQLTSSINLRALSASETYKYLGMSEALGINVTDMKQSLKERFFGRLKKVLNSLLSGGNKVRAFNGWVMQVLMYSFGILKWTQTELDALDQRVRTLLTANRLHHPRSSVMRLYIPRKCGGRGFLNAKTLNNREICSLREYFLETDVGMHRDVVAVDKGLTPLSLAKENWRKPVVLDTNERLEVWKSKELHGRFFRALHGPDVDFQASVAWLRFGDLFGETDGFVFAIMDEVMMTNNYRRFIVKDGTVDICRACHRPGESIRHIISGYSRLANGEYLHRHNLVTRIIHQELALKYKLVESEVPYYRYMPDPVLENGHITLYWDRSIITDRTIVANKPEIVLVDRSERRAMIVDITIPHDENLVKAEKDKQIKYLDLVHEVVDMWEVNSAIIVPIVVTANGLIAKSLDQHLRRLSLGSWIKGLIQKAVLLDTARIVRKFLSLEP

SEQ ID NO: 12841 - protein, 1200 aa, Sesamia nonagrioides
MLTRSAARRARSPPPDSSPSSASPPPVSSPTVNAVMTPAAAVALSSSDEYFSPPTTPPPVRRRGGRRPPDCLGPRGPLASDRAPATGGNVQRMKWTQSINENVMRAYFGATEVGSNLTAYRGRMLSLFQVLEPAVNVSAQRLSDQVRVIQRNHMLDDVVLDRLRLESRNSHVTPASSLVAVQLNSVPSRPNLVDEEDDDEAISVTPQCNEKVRSALEDAFREYRSTPPELRPRLPRLPMHKKNKALVCALDSQLSNYLKDSKDLADTHSILYCGAVAICRVAHVKFPDSDRATRPKPAVPAWQCRIERRIGETRALIGKLISFREGNTRPRVMRFVRRAFSGTDVSTRDYLLRVTERIDFLKQKIYAWANRIRRYRRRVERYSQNRNFQSDERWVYRAWERSDQGVTDTCLPDDDATRSFWRNIWSVPVSHTEGGWTRDVERACDPVPEMGAITICPQDVARAVRPLPNWKSPGPDGLHNFWIKWFSGSHACLASQFQTALESGSLPQFLTTGITHLLHKSGSTAEPKNYRPITCLPTVYKVLTSILKAKINTHIDSNSIMSASQNGCRNGSRGTKELLLIDMAISQQVRRSRKDLSTCWIDYKKAYDSVPHTWLMRVLELYKVDATLRTFLMTCMSQWRTVLRYPGCRNIQRNSEPIRIERGIFQGDSLSPLWFCLALNPLSTLLEDSGLGYRLRRGGQVISHLLYMDDLKLFAHTNSQLKELLKITETFSSAIRMEFGVDKCAVMHVQRGEIVESVGTQLTGSINLRALSASETYKYLGMSEALGINVTDMKQSLKERFFGRLKKVLNSLLSGGNKVRAFNGWVMPVLMYSFGILKWTQTELDALDRRVRTLLTANRLHHPRSSVMRLYIPRKCGGRGFLNAKTLHNREICSLREYFLTTDVGMHRDVVAVDKGLTPLSLAKENWRKPVVLDTNDRMEVWKSKELHGRFFKALHGPDVDLQASVAWLRLGDLFGETEGFVCAITDEVMMTNNYRRFIVKDGTVDICRAYHRPGESIRHIISGCSRLANGEYLHRHNLVARIIHQQLALKYNLVESEVPYYRYTPDPVLENDHITLYWDRSIITDRTIIANKPDIVLVDRSERRAMIVDITIPHDENLVKAEKDKQIKYLDLAHEVVDMWEVDSAIIVPIVVTANGLIAKSLDQHLRRLSLGSWIKGLIQKAVLLDTARIVRKFLSLEP

SEQ ID NO: 12842 - protein, 893 aa, Sesamia nonagrioides
MRFVRRAFSGTDISTRDYLLRVTERIDFFKQKIYAWANRIRRYRRRVERYSQNRNFQSDERRVYRAWERSDQGVTDTCLPDDDATCSFWRNIWSVPVSHTEGGWTRDVERACDPVPEMGAITICPQDVARAVRPLPNWKSPGPDGLHNFWIKWFSGSHACLASQFQTALESGSLPQFLTTGIIHLLHKSGSTAEPKNYRPITCLPTVYKVLTSILKAKINTHIDSNSIMSASQNGCRNGSRGTKELLLIDMAIRQQVRRSRKDLSTCWIDYKKAYDSVPHTWLMRVLELYKVDATLRTFLMTCMSQWRTVLRYPGCRNIQMNSEPIRIERGIFQGDSLSPLWFCLALNPLSTLLEDSGLGYRLRRGGQVISHLLYMDDLKLFAHTNSQLKELLKITETFSSAIRMEFGVDKCVVMHVQRGEIVESVGTQLTGSINLRSLSASETYKYLGMSEALGINITDMKQSLKERFFGRLKKVLNSLLSGGNKVRAFNGWVMPVLMYSFGILKWTQTELDALDQRVRTLLTANRLHHPQSSVMRLYIPRKCGGRGFLNAKTLHNREICSLREYFLKTDVGMHRDVVAVDKGLTPLSLAKENWRKPVVLETNDRMEVWQSKELHGRFFRALRGPDVDFQAPIAWLRCGDLFGETEGFVCAIMDEVMMTNNYRRFIVKDGTVDICRACHRPGESIRHIISGCSRLANGEYLHRHNLVARIIHQQLALKYNLVESEVPYYRYMPDPVLENGHITLYWDRSIITDRTIVANKPDIVMVDRSERRAMIVDITIPHDENLVKAEKDKQIKYLDLAHEVVDMWEVDSAIIVPIVVTANGLIAKRPQEALVRRLGQGLDSESGTAGHGSHRQEVPLSGALTAGSLDPAPDTGKLLFFYIFKCFFYLFI

SEQ ID NO: 12843 - protein, 1197 aa, Sesamia nonagrioides
MLTRSAARCARPPPPDSSLSSASPPPVSSPTVNAVMTPAAVVASSSSDEYFSPPTTPPPVRRRGGRRPPDRLGPRGPSASDRVPAPGGSVQRMRWTQSINENVMRSYYGATEGGNNLTAYRVRMLSLFQVLEPAVNVSAQRLSDQVRVIQRNHMLDDTVLDRLRNEMQSSRVIAHQSQTAEIPPQSTNYADVGSNDRATNVSTQCNEELINALEAAIREYRSTSAELRPRLPRLPMHNRNRALMAALDAQLSNYFDTCEDLTDTHSILYCAAVAACRVAHVKFPSDSRATRPKPVVPAWQHRIERRIGGARALIGKLICFREGNTRPRVMRFVRRAFAGTNISPQNYMARVTERIDFLKQKVYAWANRIRRYKRRVERYTQNRTFQNNERWVYRDWERPEQGVTDTCLPDDDVMCSFWRSIWSVPVSHTEGDWARDVERACDLIPEMGAITICPQDVACAVRPLPNWKSPGPDGLHNFWIKWFPRSHARLASQFQTALVSGSLPQFLTTGITHLLHKSGSTAEPKNYRPITCLPTVYKVLTSILKTKINKHIDSNSIMSASQNGCKSGSRGTKELLLIDMAISQQVRRSRKDLSTCWIDYRKAYDSVPHTWLMRVLELYKVDATLRTFLMSCMRTWRTVLRYPGCRNIQRNSEPIRIERGIFQGDSLSPLWFCLALNPLSTLLEDSGLGYRLRRGGQVISHLLYMDDLKLFAPNNSQLRELLKITETFSSSIRMEFGVDKCAVMHVKRGEIMESVGTQLTGSINLRALSASETYKYLGMSEALGINVTDMKQSLKERFFGRLKKVLNSLLSGGNKVRAFNGWVMPVLMYSFGILKWTQTELDALDQRVRTLLTANRLHHPRSSVMRLYIPRKCGGRGFLNAKTLHNREVCSLREYFLETDVGMHRDVVAADKGLTPLSLAKENWRKPVVLDTNDRLEVWKSKELHGRFFRALHGPDVDFQASVAWLRFGDLFGETEGFVFAIMDEVMMTNNYRRFIVKDGTVDICRACHRPGESIRHIISGCSRLANGEYLHRHNLVARIIHQQLALKYKLVESEVPYYRYMPDPVLENGHITLYWDRSIITDRTIVANKPDIVLVDRSERRAMIVDITIPHDENLVKAEKDKQIKYLDLAHEVVDMWEVDSAIIVPIVVTANGLIAKSLDQHLRRLSLGSWIKGLIQKAVLLDTARIVRKFLSLEP

SEQ ID NO: 12844 - protein, 1197 aa, Sesamia nonagrioides
MLTRSAARRARPPSPDSLLGSASPPPVSSPTVSAVTSPAAAVALSSSDEYFSPPTTPPPVRRRGGRRPPDRLGPRGPSASDRVPAPGGSVQRMRWTQSINENVMRSYYGATEGGNNLTAYRVRMLSLFQVLEPAVNVSAQRLSDQVRVIQRNHMLDDTVLDRLRNEMQSSRVIAHKSQTAEIPPQSTNYADEGSNDRATNVSTQCNEELKNALEAAIREYRSTSAELRPRLPRLPMHNRNRALVAALDAQLSNYFDTCEDLTDTHSILYCAAVAACRVAHVKFPSDSRATRPKPVVPAWQHRIERRIGGARALIGKLICFREGNTRPRVMRFVRRAFAGTNISPQNYMARVTERIDFLKQKVYAWANRIRRYKRRVERYTQNRTFQNNERWVYRDWERPEQGVTDTCLPDDDVMFSFWRSIWSVPVSHTEGDWARDVERACDLIPEMGAITICPQDVACAVRPLPNWKSPGPDGLHNFWRKWFPRSHARLASQFQTALVSGSLPQFLTTGITHLLHKSGSTAEPKNYRPITCLPTVYKVLTSILKTKINKHIDSNSIMSASQNGCKSGSRGTKELLLIDMAISQQVRRSRKDLSTCWIDYRKAYDSVPHTWLMRVLELYKVDATLRTFLMSCMRTWRTVLRYPGCRNIQRNSEPIRIERGIFQGDSLSPLWFCLALNPLSTLLEDSGLGYRLRRGGQVISHLLYIDDLKLFAPNNSQLRELLKITETFSSSIRMEFGVDKCAVMHVKRGEIMESVGTQLTGSINLRALSASETYKYLGMSEALGINVTDMKQSLKERFFGRLNKVLNSLLSGGNKVRAFNGWVMPVLMYSFGILKWTQTELDALDQRVRTLLTANRLHHPRSSVMRLYIPRKCGGRGFLNAKTLHNREVCSLREYFLETDVGIHRDVVAADKGLTPLSLAKENWRKPVVLDTNDRLEVWKSKELHGRFFRALHGPDVDFQASVAWLRFGDLFGETEGFVFAIMDEVMMTNNYRRFIVKDGTVDICRACHRPGESIRHIISGCSRLANGEYLHRHNLVARIIHQQLALKYKLVESEVPYYRYMPDPVLENGHITLYWDRSIITDRTIVANKPDIVLVDRSERRAMIVDITIPHDENLVKAEKDKQIKYLDLAHEVVDMWEVDSAIIVPIVVTANGLIAKSLDQHLRRLSLGSWIKGLIQKAVLLDTARIVRKFLSLEP

SEQ ID NO: 12845 - protein, 1198 aa, Apamea monoglypha
MLTRSAARRARLPSPDSSLSSASPPPVPSPTVSAVTTPAAVVASSSSDEYFSPPTTPPPARRRGGRRPPDGLGPRGPLASDRVPAPGGSVQRMRWTRSINENVMRSYYGATEGGNNLTAYRVRMLSLFHVLEPAVNVSAQRLSDQVRVIQRNHMLDDTVLDRLRSEMQSSHVIAPQSQTAAVLPQSNTSHADEGSNDRATNVSIQCNEELRNALEGAIREYRFMSPELRPRLPRLPMHNKNRALVAVLDAQLSSHFDACEDLTDTHSILYCAAVAACRVAHVKFDSDSRATRPKPAIPAWQCRIERRIGGARALIGKLICFREGNTRPRVMRFVRRAFLGTDISSQDYLSRVTERIDFLKQKVYAWANRIRRYKRRVERYTQNRTFQSDERWVYRGWERPDQSVADTCLPDDDAMCSFWRSIWSAPVSHTEGDWTGKIERACELIPEMGAITICPQDVARAVRPLPNWKSPGPDGLHNFWIKWFQRSHAPLAAQFQSALESGLLPQFITTGITHLLHKSGSTADPKNYRPITCLPTIYKVLTSILRAKINKHIDSNSIMSISQNGCRNGSRGTKELLLIDMAISQQVRRSRKDLSTCWIDYKKAYDSVPHTWLMRVLELYKVDTTLRTFLMTCMGQWRTVLRYPGCRNIQRNSEPIRIERGIFQGDSLSPLWFCLALNPLSTLLDDSGLGYRLRRGGQVISHLLYMDDLKLFAPNNLQLMKLLKITETFSSAIRMEFGVDKCAVMHVKRGEIVESVGTQLSDFTNLRALSAAETYKYLGMSEALGINVTDMKQSLKERFFGRLKKVFNSLLSGGNKVRAFNSWVMPVLMYSFGILKWTQTELEALDRRVRTLLTANRMHHPRSSVMRLYIPRKCGGRGFLNAKTLHNREICSLREYFLETDVGMHRDVVAVDKGLTPLSLAKENWRKPVVLDTNDRMEVWQSKELHGRFYRALHGPDVDLLASVAWLRFGDLFGETEGFVCAIMDEVMMTNNYRRYIVKDGTVDICRACHRPGESIRHIISGCSRLANGEYLHRHNLVARIIHQQLALKYSLVESEVPYYRYVPDPVLENGNITLYWDRSIITDRTIVANKPDIVVVDRSERRAMIVDITVPHDENLVKAEKDKQIKYLDLAREVVDMWDVDSAIIVPIVVSANGLIAKSLDQHLRRLSLGSWIKGLIQKAVLLDTARIVRRFLSLEP

SEQ ID NO: 12846 - protein, 1200 aa, Apamea monoglypha
MMMLTRSAARRARPPPPDSSLSSASPPPVPSLTVSAVTTPAAVVASSSSDEYFSPPTTPPPARRRGGRRPPDGLGPRGPPASDRVPALGGSVQRMRWTQSINENVMRSYYGATEGGNNLTAYRVRMLSLFQVLEPAVNVTAQRLSDQVRVIQRNHMLDDTVLDRLRNEIQSSHVIAPQSQTAAVLPQSNTSHADEGSNDRATNVSIQCNEELRNALEGAIREYRFMSPELRPRLPRLPMHNKNRALVAVLDAQLSSYFDVCEDLTDTHSILYCAAVAACRVAHVKFVSDSRATRPKPAIPPWQCRIERRIGGARALIGKLICFREGNTRPRVMRFVRRAFSGTDISSQDYLSRVTERIDFLKQKVYAWANRIRRYKRRVDRYTQNRTFQSDERWVYRGWERPDQGVADTCLPDDDAMYSFWRSIWSVPVSHTEGDWAREVERACDPIPEMEAITICAQDVARAVRPLPNWKSPGPDGLHNFWVKWLTRSHARLASQFQIALESGSLPQFLTTGVTHLLHKSASTAEPKNYRPITCLPTVYKVLTSILRAKINKHIDTNSIMSASQNGCKNGSRGTKELLLIDMAISQQVRRSRKDLSTCWIDYKKAYDSVPHTWLMRVLELYKVDTTLRTFLMTCMGQWRTVLRYPGCRNIQRNSEPIRIERGIFQGDSLSPLWFCLALNPLSTLLEDSGLGYRLRRGGQVISHLLYMDDLKLFAPNNLQLMELLKITETFSSAIRMEFGVDKCAVMHVKRGEIVESVGTQLSDSTNLRALSASETYKYLGMSEALGINVTDMKQSLKERFFGRLKKVLNSLLSGGNKVRAFNSWVMPVLMYSFGILKWTQTELDALDRRVRTLLTANRLHHPRSSVMRLYIPRKCGGRGFLNAKTLHNREICSLREYFLETDVGMHRDVVAVDKGLTPLSLAKENWRKPVVLDTNDRMEVWQSKELHGRFYRALHGPDVDLLASVAWLRFGDLFGETEGFVCAIMDEVMMTNNYRRFIVKDGTVDICRACHRPGESIRHIISGCSRLANGEYLHRHNLVARIIHQQLALKYNLVESEVPYYRYVPDPVLENGNITLYWDRSIITDRTIVANKPDIVVVDRSERRAMIVDITVPHDENLVKAEKDKQIKYLDLAREVVDMWHVDSAIIVPIVVTANGLIAKSLDQHLRRLSLGSWIKGLIQKAVLLDTARIVRRFLSLEP

SEQ ID NO: 12847 - protein, 1032 aa, Apamea monoglypha
MQSSHVIAPQSQTAAVLPQSNTSHADEGSNDRATNVSIQCNEELRNALEGAIREYRFMSPELRPRLPRLPMHNKNRALVAVLDAQLSSHFDACEDLTDTHSILYCAAVAACRVAHVKFDSDSRATRPKPAIPAWQCRIERRIGGARALIGKLICFREGNTRPRVMRFVRRAFLGTDISSQDYLSRVTERIDFLKQKVYAWANRIRRYKRRVERYTQNRTFQSDERWVYRGWERPDQSVADTCLPDDDAMCSFWRSIWSAPVSHTEGDWTGKIERACELIPETGAITICPQDVARAVRPLPNWKSPGPDGLHNFWIKWFQRSHAPLAAQFQSALESGLLPQFITTGITHLLHKSGSTADPKNYRPITCLPTIYKVLTSILRAKINKHIDSNSIMSVSQNGCRNGSRGTKELLLIDMAISQQVRRSRKDLSTCWIDYKKAYDSVPHTWLMRVLELYKVDTTLRTFLMTCMGQWRTVLRYPGCRNIQRNSEPIRIERGIFQGDSLSPLWFCLALNPLSTLLDDSGLGYRLRRGGQVISHLLYMDDLKLFAPNNLQLMKLLKITETFSSAIRMEFGVDKCAVMHVKRGEIVESVGTQLSDFTNLRALSAAETYKYLGMSEALGINVTDMKQSLKERFFGRLKKVFNSLLSGGNKVRAFNSWVMPVLMYSFGILKWTQTELEALDRRVRTLLTANRMHHPRSSVMRLYIPRKCGGRGFLNAKTLHNREICSLREYFLETDVGMHRDVVAVDKGLTPLSLAKENWRKPVVLDTNDRMEVWQSKELHGRFYRALHGPDVDLLASVAWLRFGDLFGETEGFVCAIMDEVMMTNNYRRYIVKDGTVDICRACHRPGESIRHIISGCSRLANGEYLHRHNLLARIIHQQLALKYSLVESEVPYYRYVPDPVLENGNITLYWDRSIITDRTIVANKPDIVVVDRSERRAMIVDITVPHDENLVKAEKDKQIKYLDLAREVVDMWDVDSAIIVPIVVSANGLIAKSLDQHLRRLSLGSWIKGLIQKAVLLDTARIVRRFLSLEP

SEQ ID NO: 12848 - protein, 1200 aa, Apamea monoglypha
MMMLTRSAARRARPPPPDSSLSSASPPPVPSLTVSAVTTPAAVVASSSSDEYFSPPTTPPPARRRGGRRPPDGLGPRGPPASDRVPALGGSVQRMRWTQSINENVMRSYYGATEGGNNLTAYRVRMLSLFQVLEPAVNVTAQRLSDQVRVIQRNHMLDDTVLDRLRNEIQSSHVIAPQSQTAAVLPQSNTSHADEGSNDRATNVSIQCNEELRNALEGAIREYRFMSPELRPRLPRLPMHNKNRALVAVLDAQLSSYFDVCEDLTDTHSILYCAAVAACRVAHVKFVSDSRATRPKPAIPPWQCRIERRIGGARALIGKLICFREGNTRPRVMRFVRRAFSGTDISSQDYLSRVTERIDFLKQKVYAWANRIRRYKRRVDRYTQNRTFQSDERWVYRGWERPDQGVADTCLPDDDAMYSFWRSIWSVPVSHTEGDWAREVERACDPIPEMEAITICAQDVARAVRPLPNWKSPGPDGLHNFWVKWLTRSHARLASQFQIALESGSLPQFLTTGVTHLLHKSASTAEPKNYRPITCLPTVYKVLTSILRAKINKHIDTNSIMSASQNGCKNGSRGTKELLLIDMAISQQVRRSRKDLSTCWIDYKKAYDSVPHTWLMRVLELYKVDTTLRTFLMTCMGQWRTVLRYPGCRNIQRNSEPIRIERGIFQGDSLSPLWFCLALNPLSTLLEDSGLGYRLRRGGQVISHLLYMDDLKLFAPNNLQLMELLKITETFSSAIRMEFGVDKCAVMHVKRGEIVESVGTQLSDSTNLRALSASETYKYLGMSEALGINITDMKQSLKERFFGRLKKVLNSLLSGGNKVRAFNSWVMPVLMYSFGILKWTQTELDALDRRVRTLLTANRLHHPRSSVMRLYIPRKCGGRGFLNAKTLHNREICSLREYFLETDVAMHRDVVAVDKGLTPLSLAKENWRKPVVLDTNDRMEVWQSKELHGRFYRALHGPDVDLLASVAWLRFGDLFGETEGFVCAIMDEVMMTNNYRRFIVKDGTVDICRACHRPGESIRHIISGCSRLANGEYLHRHNLVARIIHQQLALKYNLVESEVPYYRYVPDPVLENGNITLYWDRSIITDRTIVANKPDIVVVDRSERRAMIVDITVPHDENLVKAEKDKQIKYLDLAREVVDMWHVDSAIIVPIVVTANGLIAKSLDQHLRRLSLGSWIKGLIQKAVLLDTARIVRRFLSLEP

SEQ ID NO: 12849 - protein, 1196 aa, Furcula furcula
MLTRSKARQRSPGSLPRSASQLPGRRSDGSPAAVASSESDEYFSPPTSPPPVCRRRGRPPRDLGRLGQPAPNRVLVPGGVVRRMRWTSTINESVMRAYYEATAGGTNLTAYRNRMLSLFQTLEPAVNVSAQRLSDQVRAIQRGNMLDDAVLDRLRSEVQGSRVAPCIPSSQAVAPVIYTAPAPRLEANSGNDGDDITTNVSTYKITQLRSILEDVVREYRTMPQNLRPRLPRLPMHKRNRALVCALDSLLLSYFDSSEDLADAHSLLYCAAMTACRVAHVKVPNADAATRPRPAVPAWQCRIERRVGEARVLIGKLTCFREGNTRPRVMRFVRRAFSGTGIGPREYLSRVTERIDFLKQKVCAWANRIRRYKARVDRYFQNNMFQRDQRWVYRSWERPSQTEGDVRRPDDDAMTTFWRNIWSVPVTHSEGDWIRDVEQVCEPLPEMGAITIWPQDVADAVRQLPNWKAPGPDGLHNFWLKWIRSSHICLASLFQSALESGSLPEFMTTGITHLLHKNNSTTDPKNYRPITCLPTVYKTLTSILRAKIYRHVEDNSIMSASQNGCRSGARGTKELLLIDMAICQQARRSRRDLSTCWIDYKKAYDSVPHTWLMRVLELYKVNATLRTFLASCMRQWRTVLLYPGSRQTLGNGDPIRIERGIFQGDSLSPLWFCLALNPLSTLLKSSGLGYRLRRGSQVISHLLYMDDLKLFAPTELQLMGLLKVTETFSNSIRMEFGVDKCAVMHVKRGRLVESRSVQLSDSTDLRTLSATETYKYLGMSQALGINETDMKQSLRERFLGRLRKVLKSLLSGGNRVRAYNGWVMPVLMYSFGILKWTQTELDTLDRTVRTLLTTYRMHHPRSSVMRLYIPRKCGGRGFLNAKTLHNREICNLREYFLHCGGEMHTDVVAVDNGLTPLSLAKGNWRKPVVLTTGDREAVWQSKELHGRFYRALHGPYIDFSASVAWLRFGDLFGETEGFVCAIMDEVVMTNNYRKYILRDGTIDICRACHRPGESLRHIISGCSRLANGEYLHRHNQVARIIHQQLALKYRLVTSEVPYYRYVPEPVLEDGHITLYWDRSIITDRTIVANKPDIVLIDRTERHAMIVDVTVPHDENLVKAEKDKECKYLDLAHEVVDMWDIDRAIIVPIVVSAHGLMAKSLDKHLKRLTLDGWIKGQMQKAVLLETARIVRKFLSLEP

SEQ ID NO: 12850 - protein, 1058 aa, Furcula furcula
MRTSCAPTTRQQRGELTSLRIVTGCCLCFRRLNQLSTFRRNDCPIRYGPSNVVTCWMTVCLIGYARRCKVAVSSPVYRRRKLWPQRLTPRPRHGSQLLAAMVPIIADMSTNISTNVSTQLRSTLEDVVREYRTMPQGLRPRLPRLPMHKRNRALVCALDSLLSSYFDSSEDLADAHSLLYCAAMTACRVARVKFPNSDAATRPRPAVPAWQCRIERRIGEARVLIGKLTCFREGNTRPRVMRFVRRAFSGTGIDPREYFSRVTERIDFLKQKVCAWANRIRRYRARVDRYSQNNMFQRDQRWVYRSWERPSQIGGEVLRPDDDAMIRFWRNIWSVPVTHSEGDWIRDVKQVCEPIPEMGAITIRPQDVADAVRPLPNWKAPGPDGLHNFWLKWLRSSHACLASLFQSAVESGSLPEFLTTGITHLLHKTNSTADPKNYRPITCLPTVYKTLTSILRAKIYRHVEGNSIMSASQNGCRSGACGTKELLLIDMAICQQARGNRKDLSTCWIDYKKAYDSVPHTWLMRVLELYKVNTTLRTFLASCMRQWRTVLLYPGSRQTLGDGEPIRIERGIFQGDSLSPLWFCLALNPLSTLLKGSGLGCRLRRGGQVISHLLYMDDLKLFAPTEPQLMGLLKVTETFSNSIRMGFGVDKCAVMHVKRGRLVESRSVQLSDSTDLRTLSATETYKYLGMSQALGINETDMKQSLRERFLGHLRKVLKSFLSGGNRVRAYNGWVMPVLMYSFGILKWTQTELDTLDRTVRTLLTTYRMHHPRSSVMRLYIPRKCGGRGFLNAKTLHNREIYNLREYFLHCGGEMHTDVVAVDIGLTPLSLAKGNWRKPVVLTTGDREAVWQSKELHGRFYRAVHGPDVDFSASVAWLRFGDLFGETEGSVCAIMDEVVMTNNYRKYILRDGTIDICRACHRPGESLRHIISGCSRLANGEYLHRHNQVARIIHQQLALKYRLVTSEVPYYRYVPEPVLEDGHITLYWDRSIITDRTIVANKPDIVLIDRTERYAMIVDVTVPHDENLVKAEKIKNANILISRTRLSTCGTLIGQSLYL

SEQ ID NO: 12851 - protein, 1202 aa, Spodoptera exigua
MLTRAAARRARPPPPASSLSSASPPPESSPTVSDVTPAVAAASSSSDEYYSPPTTPPPTRRRGGRRPPARLGPRGPPASDRVPAVGGSVQRMRWTQSINENVMRAYYGATEGGNNLTAYRVRMLSLFQVLEPAVNVSAQRLSDQVRVIQRNRMLDDTVLDRLQTEMGSRASASSSRTVVPATLPLTSHGIVSAVADEESTDTVAHVSTQCIDELRSALEYAIREYRYISPELRPRLPRLPMHNKNKALVAALDSQLSNYLDDCEDLGDTHSIMYCAAVAACRVAHVKFPTNDVTTRPKPAVPAWQRRIECRIAGARALIGKLICFREGNTRPRVMRSVRRAFSGTDISPRDYMSRVTERIDFLKQKVYAWANRIRRYRRRVERYTQNRTFRSNERWVYRTWERPDHGVTDRRLPDDDAMCSFWRSIWSVPVSHTEGDWIRDVERACDPIPQMGTINISPQDVARAVRPLPNWKSPGPDGLHNFWIKWFTRAHARLASQFQSAVESGSLPKFLTTGVTHLLHKSGSTAEPKNYRPITCLPTVYKVLTSILRSKINSHIDKNKIMSTAQNGCKNGSRGTKELLLIDMAISQQVRRARKDLSTCWIDYKKAYDSIPHTWLMRVLELYKIDTILRTFLMSCMRQWSTVLRYPGCRHTQRNSEPVRIERGIFQGDSLSPLWFCLALNPLSTLLENSGLGYRLKRGGQVISHLLYMDDLKLFAPNKLQLMELLKLTETFSSAIRMEFGVDKCAIMHVKRGEVVESVGTQLTDSINLRSLSPTETYKYLGMSEALGINVTDMKQSLKERFFGRLKKVFNSFLSGGNKVRAFNGWVMPVLMYSFGVLKWSQTELDALDRQVRTMLTAYRMHHPRSSVMRLYIPRKCGGRGFLNAKTLHNREVCSLREYFLAADVDMHRDVVAVDKGLTPLSLAIENWRKPVVLDTNARREVWQSKELHGRFFRALHGPDVDQVASVAWLRFGDLFGETEGFVCAIMDEVIMTNNYRRFIVKDGTVDICRACHRPGESIRHIISGCSRLANGEYLHRHNLVARIIHQQLALKYSLVESEVPYYRYEPDPVLDNGHITLYWDRSIITDRTIVANKPDIVVVDRKERRAMIVDIAVPHDENLVKAEKDKLIKYIDLAREVVDMWEVDSAIIVPIVVSANGLIAKSLDQHLRRLSLGGWIKGLIQKVVLLDTARIVRRFLSLEP

SEQ ID NO: 12852 - protein, 1112 aa, Arctia plantaginis
MKWTNSINENVMRAYYRATEMGTNLTAYRVRLVSLFQELEPAVNVSAQRLSDQVRAIQRCHLLDDAVLERIRSDIRNSLIIPSSSHTVDLVANSTPQLVSHTNDVDELVEGEVISVSTQYNDRIRSALEDAILEYRYVNWNNRPRLSRLPIHKRNLALVGALDSLLPDYLDNSEDLGDTHSILYCAAVAVCRVAGVNIVENVTTTRPKSTVPAWQCRIERRIAETRVLIGKLISFRSGNTRPRVMRFVKQAFLGTSIGPQQYMSCVTERIDFLKQKIYAWANRIRRYKKRIDRYNQNRMFQRNEKWVYRKWEEPDPCVSHGHLPDENVTHTFWRNIWSVPVTHIEGDWLRDVRRSCESVTPMEPVIIDKDDVSCAVRSLPNWKSPGLDGLHNFWLKWFRSSHACLASQFQAALNSGSLPQFLTTGITHLLYKSGSVMDPKNFRPITCLPTMYKLLTSILRLKITLHINNNSIMSVSQNGCRSGSRGTKDLLIIDRAISQQVRRNRKSLATCWIDYKKAYDSVPHTWLLRVLELYKIDTTLCTFLKSCMGQWRTALRYPGCRQTTVIDAPIKIERGIFQGDSLSPLWFCLALNPLSTLLEGSGLGYRLQKDDQVISHLLYMDDLKLLAPTKLQLSALLKVTENFSYSIKMEFGVDKCAVMYVKKGEIVESEGIELSDSTKLRSLSATETYKYLGISQSLGIPESDMKQTLQERFFGRLKKVLKSLLSGGNKVRACNGWVMPILMHSFGILKWTQTELDALDRRVRTLLTAFRMHHPRSSVMRLYIPRKLGGLGLLNIKTLHNREICNLREYFLHTDVGMHRNVVAVDIGFIPLALAKENWRKPVVFSTNDRREVWKGKELHGRFYRALNGSDIDFKASTTWLRYGDLFGETEGFVCAIMDEVIMTNNYRKYILKDGTVDICRACHRPGESIRHIISGCSRLANGEYLHRHNQVARIVHQQLALKYHLVNLEVPYYRYVPDPVLENGRATLYWDRSIITDRTIVANKPDIVVIDRLERRAIIVDIAVPHDENLVKVEKEKQIKYLDLSHEIVDMWNVDSVIIVPIVVSAHGLIAKSLDQHLKRLTLDSWIKGLIQKAVLLDTARIVRRFLSLQS

SEQ ID NO: 12853 - protein, 960 aa, Mamestra configurata
MHNKNRTLVCALDSQLANCFDSSEDLADTHSILYCAAAAACRVAHVKFPNSDRATRPAVPAWQCRIERRIGEARALIGKLICFREGNTRRRVMRFVRRAFSGTDTSPRDYLTRVTERIDFLKQKIYAWANRIRRYKRRVERYTQNRTFQSNERWVYRAWERPDQGVTDTRLPDDDVMCSFWRNIWSVPVSHTEGDWTREVERACDPIPEMGAITISPQDVARAVRPLPNWKSPGPDGLHNFWIKWFKRSHARLASQFQSALESGSLPQFLTTGITHLLHKSGSTAEPKNYRPITCLPTVYKVLTSILRAKINQHIETNSIMSASQNGCRNRSRGTKELLLIDVAISQQVRRSRRDLSTCWIDYKKAYDSVPHTWLMRVLELYKVDAVLRTFLMSCMGQWRTVLRYPGCRQIQANSDPIRIERGIFQGDSLSPLWFCLALNPLSTLLEGSGQGYRLRRGGQVISHLLYMDDLKLFAPNNLQLMKLLKVTETFSSAISMEFGVDKCAVMHVKRGEIMESVGTQLSDSINLRSLSSTETYKYLGMSEALGINAADVKQSLKERFFGRLNKVLNSLLSGGNKVRAFNGWVMPVLMYSFGILKWTQTELDALDRRVRSLLTANRMHHPRSSVMRLYIPRKCGGRGFLNAKTLHNREICSLREFFLEADVGMHRDVVAVDKGLTALSLANENWRKPVVLDTNDRREVWQSKELHGRFYRVLHGPDVDFLASVAWLRFGDLFGETEGFVCAIMDEVMMTNNYRKYIVKDGTVDICRACHRPGESIRHIISGCSSLANGDYLHRHNLVARIIHQQLALKYNLVESEVPYYRYVPDPVLENGNCTLYWDRSIITDRTIVANKPDIVVIDRLERRAMIVDIAVPHDENLVKTEKDKQTKYLDLAREVVDMWDVNTAVIVPIVVTANGIIAKSLDQHLKRLSLGSWIKGLIQKAVLLDTARIVRRFLSQGP

SEQ ID NO: 12854 - protein, 1200 aa, Mamestra configurata
MLTRSRARAQTAQPTSSGSSLSSASQPPGPAPAVSPEIPVAAVASSSSDEYFSPPTTPPPARRRGRGRPPTSLGPRGPPASDRVPAIGGSVQRMRWTQTINENVMRSYYGATEGGTNLTAYRGRMLSLFQVLEPAVNVSAQRLSDQVRVILRNRMLDDAVLDRLRLESRSGRVSPASPPAAVQIQSSVSPRPNNVGEDDDDGAISVSTQCNERLRSALEDAFREYRSTPPELRPRLPRLPMHNKNRALVCALDSQLTNCFDSSEDLADTHSILYCAAAAACRVAHVKFPNSDRATRPAVPAWQCRIERRIGEARALIGKLICFREGNTRRRVMRFVRRAFSGTDTSPRDYLTRVTERIDFLKQKIYAWANRIRRYKRRVERYTQNRTFQSNERWVYRAWERPDQGVTDTRLPDDDVMCSFWRNIWSVPVSHTEGDWTREVERACDPIPEMGAITISPQDVARAVRPLPNWKSPGPDGLHNFWIKWFKRSHARLASQFQSALESGSLPQFLTTGITHLLHKSGSTAEPKNYRPITCLPTVYKVLTSILRAKINHHIETNSIMSASQNGCRNGSRGTKELLLIDVAISQQVRRSRRDLSTCWIDYKKAYDSVPHTWLIRVLELYKVDAVLRTFLMSCMGQWRTALRYPGCRRIQANSDPIRIERGIFQGDSLSPLWFCLALNPLSTLLEGSGQGYRLKRGGQVISHLLYMDDLKLFAPNNLQLMKLLKVTETFSSAISMEFGVDKCAVMHVKRGEIMESVGTQLSDSINLRSLSSTETYKYLGMSEALGINAADVKQSLKERFFGRLNKVLNSLLSGGNKVRAFNGWVMPVLMYSFGILKWTQTELDALDRRVRSLLTANRMHHPRSSVMRLYIPRKCGGRGFLNAKTLHNREICSLREFFLEADVGMHRDVVAVDKGLTALSLANENWRKPVVLDTNDRREVWQSKELHGRFYRVLHGPDVDFLASVAWLRFGDLFGETEGFVCAIMDEVMMTNNYRKYIVKDGTVDICRACHRPGESIRHIISGCSSLANGDYLHRHNLVARIIHQQLALKYNLVESEVPYYRYVPDPVLENGNCTLYWDRSIITDRTIVANKPDIVVIDRLERRAMIVDIAVPHDENLVKTEKYKQTKYLDLAREVVDMWDVNTAVIVPIVVTANGIIAKSLDQHLKRLSLGSWIKGLIQKAVLLDTARIVRRFLSQGP

SEQ ID NO: 12855 - protein, 1205 aa, Amphipyra berbera
MLTRSRAKALTETTRPRSSAPSLSSASQPPDSSIVSDVTPAAAVASSSSDEYFSPPTSPPLARRRGRGRPPDSLRPRGPLASDRVPAAGGSVQRMRWTPTMNENCMRAYFGATEGGTNLTAYRGRMLSLFQVLEPTVNVSAQRLSDQVRVIQRDHRLTDAALDRLRSEVQSNAIISLQSQTAAQPRTPTVVPPLPTHANEESDDRVTNVSTQCNEQLRSALELAIREYRFTPPNIRPRIPRLPMHRKNRALMCALDSLLSSYFDNSENLEDTHSILYCAAVAACRVAHAKFDNNDKATRPKPAVPAWQCRIERRINEARALIGKLICFREGNTRPRVMRFVRRAFSGTDINPRDYMSRVTERIDFLKQKVYAWANRIRRYKRRVERYTQNRMFHSDERWVYRTWERPDHDVSDAHPPDNDVMNTFWRNIWSMPVTHTEGDWMQEVQRACEPIKEMGDITIVPQDVTSAVRPMANWKSPGPDGLHNFWIKWLRSSHARLASQFQSSLESGSLPEFLTTGVTHLLHKSGSTAEPKNYRPITCLPTVYKLLTSILRAKINSHILYNSIMSVSQNGCKNGSRGTKELLLIDMAISQQVRRSRKDLSTCWIDYKKAYDSVPHTWLMRVLELYKVNTTLCAFLTSCMGQWRTVLHYPGCRQIQGRGEPIRIERGIFQGDSLSPLWFCLALNPLSTLLEGSGLGYRLRRGGQVISHLLYMDDLKLFAPNNLQLMKLLKVTETFSNSIRMEFGVDKCAVMHVKRGGIMESVGTQLSDSIHLRSLSSTETYKYLGMSEALGINETDMKQSLRERFYGRLKKVLKSLLSGGNKVRAFNGWVMPVLMYSFGILKWTQTELDALDRRVRTLLTAYRMHHPRSSVMRLYIPRKCGGRGFLNAKTLHNREVCSLREYFLQADVGMHRDVVAVDNGFTPLSLAKENWRKPVVLDTNGRREVWQSKELHGRFYRALHGPDVDFLASVAWLRFGDLFGETEGFVCAIMDEVMMTNNYRKYIVKDGTVDICRACHCPGESIRHIISGCSRLANGEYLHRHNLVARIIHQQLALKYNLVDAEVLYYKYVPDPVLENGHITLYWDRSIITDRTIVANKPDIVVIDRTERLTMIVDITVPHDENLVKAEKDKEIKYQDLAHEVVDMWEVDSAVIVPIVVTANGLIAKSLDHHLTRLSLGSWVKGLIQKAVLLDTARIVRKFLSLRP

SEQ ID NO: 12856 - protein, 1203 aa, Amphipyra berbera
MLTRARARKQTAHSRSPDSSLSSASQPPESSPPVSAVTPAAAVASSSSDEYYSPPSSPPPVRRRGGARPPACLGPRGQPATNRVPAAGGNVSRMRWTQSINENVMRAYYGATEGGINLTAYRERMLFLFQVLEPAINVSAQRLSDQVRVVQRNRRLDDTVLERLRSEARNSQTVTFPVQAAVQMQPLAVPPRPIHVDGEGDGETINVSNQCSEELRSALDDAILEFRTTPPEIRPRLPRLPMHGKNRALMCALDSLLSNYFDGSEDLADTHSILYCAAIAACRVAHVKFTENERATRPKPAVPAWQSRIERRIGGARVLIGKLICFREGNNRPRVMRFVRRAFSGTDISPRDYMSRVTERIDFLKQKVYAWANRIRRYRRRVERYTQNRIFQSDQRRVYRAWERPDPGGGDVRLPDDDALSSFWRSIWSVPIAHTEDGWMRDIEQACEPIAEMEPITITPQDVADAARPLPNWKSPGPDGLHNFWLKWLRSSHARLASQFQSSLESGSLPQFLTTGVTHLLYKSGSTAEPKNYRPITCLPTVYKLLTSILRVKITTHIDNNCIMSASQNGCRKGSRGTKELLLIDMAISQQVRRSQKDLSTCWIDYKKAYDSVPHSWLMRVLELYKINTTLRTFLMSCMRHWRTVLRYPGCRRIRGSGEQIRIERGIFQGDSLSPLWFCLALNPLSTLLEGTGLGYQLRRGGQVISHLLYMDDLKLFAPTDLQLMELLKVTENFSNSIRMEFGVDKCAVMHVKRGRIAESEGIQLPNSVQLRSLSPTETYKYLGMSEALGISETDMRQSLRERFFGRLNKLLKSLLSDGNKVRAFNGWVMPVLMYSFGTLKWTQADLDALDRRVRALLTAHRMHHPRSSVMRLYIPRKCGGRGFLNAKTLHNREVYSLREYFLQAEGVMHRDVVAVDKGFTPLALARENWRKPAVLSTNDREVVWQSKELHGRYYRALHGPDVDFSASVSWLRSGNLFGETEGFVCAIMDEVMMTNNYRKYIVKDGTVDICRACHRPGESIRHIVSGCSRLANGEYLHRHNLVARIIHQQLALKYNLVESEVPYYRYVPDPVLENGHATLYWDRSIITDRTIVANKPDIVVIDRSERRTMIVDITVPHDENLVKAEKDKQIKYLDLAHEVVGMWDVDSAVIVPIVVTANGIIAKSLDIHLMRLSLGGWIKGLIQRAVLLDTARIVRRFLSLEP

SEQ ID NO: 12857 - protein, 1111 aa, Amphipyra berbera
MRWTPTMNENCMRAYFGATEGGTNLTAYRGRMLSLFQVLEPTVNVSAQRLSDQVRVIQRDHRLTDAALDRLRSEVQSNAIISLQSQTAAQPRTPTVVPPLPTHGNEESDDRVTNVSTQCNEQLRSALELAIQEYRFTPPNIRPRIPRLPMHRKNRALMCALDSLLSSYFDNSENLEDTHSILYCAAVAACRVAHAKFDNSDKATRPKRAVPAWQCRIERRINEARALIGKLICFREGNTRPRVMRFVRRAFSGTDINPRDYMSRVTERIDFLKQKVYAWANRIRRYKRRVERYTQNRMFHSDERWVYRTWERPDHDVNDTHPPDNDVMNTFWRNIWSMPVTHTEGDWMQEVQRACEPIEEMGDITIVPQDVTSAVRPMANWKSPGPDGLHNFWIKWLRSSHARLASQFQSSLESGSLPEFLTTGVTHLLHKSGSTAEPKNYRPITCLPTVYKLLTSILRAKINSHIINNSIMSVSQNGCKNGSRGTKELLLIDMAISQQVRRSRKDLSTCWIDYKKAYDSVPHTWLMRVLELYKVNTTLCAFLTSCMGQWRTVLHYPGCRQIQGRGEPIRIERGIFQGDSLSPLWFCLALNPLSTLLEGSGLGYRLRRGGQVISHLLYMDDLKLFAPNNLQLMKLLKVTETFSNSIRMEFGVDKCAVMHVKRGGIMESVGTQLSDSIHLRSLSSTETYKYLGMSEALGINETDMKQSLRERFYGRLKKVLKSLLSGGNKVRAFNGWVMPVLMYSFGILKWTQTELDALDRRVRTLLTAYRMHHPRSSVMRLYIPRKCGGRGFLNAKTLHNREVCSLREYFLQADVGMHRDVVAVDKGFTPLSLAKENWRKPVVLDTNGRREVWQSKELHGRFYRALHGPDVDFLASVAWLRFGDLFGETEGFVCAIMDEVILTNNYRKYIVKDGTVDICRACHCPGESIRHIISGCSRLANGEYLHRHNLVARIIHQQLALKYNLVDAEVPYYKYVPDPVLENGHITLYWDRSIITDRTIVANKPDIVVIDRSERLAMIVDITVPHDENLVKAEKDKEIKYQDLAHEVVDMWEVDSAVIVPIVVTANGLIAKSLDQHLTRLALGSWIKGLMQKAVLLDTARIVRKFLSLRP

SEQ ID NO: 12858 - protein, 1210 aa, Amphipyra berbera
MLTRSRTKTQDTRTRPRPSASSLSSASQPPDSSIVSDVTPAAAVASSSSDEFYSPPTSPPPPPPPRRGRRGRGRPPACMGPRGPPASDRVPAPGGSVQRMRWTLTMNENCMRAYFGATEGGTNLTAYRGRMLSLFQVLEPTVNVSAQRLSDQVRVIQRDHRLTDAALDRLRSEVQSNRIISLQSQTAAQPQTPTVVPPLPIQADEESDDRVTNVSTQCNEQLRSALELAIREYRFTPPNIRPRIPRLPMHRKNRALMCALDSLLSSYFDNSENLEDTHSILYCAAVAACRVAHAKFDNNDRATRPKPAVPAWQCRIERRINEARALIGKLICFREGNTRPRVMRFVRRAFSGTDINPRDYLSRVTERIDFLKQKVYAWANRIRRYKRRVERYTQNRMFHSDERWVYRTWERPDHDVSDTHLPDNDVMNTFWRNIWSMPVTHTEGDWMQEVQRACEPIEEMGDITIVPQDVTSAVRPMANWKSPGPDGLHNFWLKWLRSSHARLASQFQSSLESGSLPEFLTTGVTHLLHKSGSTAEPKNYRPITCLPTVYKLLTSILRAKINSHIINNSIMSVSQNGCKNGSRGTKELLLIDMAISQQVRRSRKDLSTCWIDYKKAYDSVPHTWLMRVLELYKVNTTLCAFLTSCMGQWRTVLHYPGCRQIQGRGEPIRIERGIFQGDSLSPLWFCLALNPLSTLLEGSGLGYRLRRGGQVISHLLYMDDLKLFAPNNLQLMKLLKVTETFSNSIRMEFGVDKCAVMHVKRGGIMESVGTQLSDSIHLRPLSSTETYKYLGMSEALGINETDMKQSLRERFYGRLKKVLKSLLSGGNKVRAFNGWVMPVLMYSFGILKWTQTELDALDRRVRTLLTAYRMHHPRSSVMRLYIPRKCGGRGFLNAKTLHNREVCSLREYFLQADVGMHRDVVAVDKGYTPLSLAKENWRKPVVLDTNGRREVWQSKELHGRFYRALHGPDVDFLASVAWLRFGDLFGETEGFVCAIMDEVMMTNNYRKYIVKDGTVDICRACHCPGESIRHIISGCSRLANGEYLHRHNLVARIIHQQLALKYNLVDAEVPYYKYVPDPVLENGHITLYWDRSIITDRTIVANKPDIVVIDRTERLTMIVDITVPHDENLVKAEKDKEIKYQDLAHEVVDMWEVDSAVIVPIVVTANGLIAKSLDHHLTRLSLGSWVKGLIQKAVLLDTARIVRKFLSLRP

SEQ ID NO: 12859 - protein, 1211 aa, Amphipyra berbera
MLTRSRTKTQDTRTRLRPSASSLSSASQPPDSSIVSDVTPAAAVASSSSDEFYSPPTSPPPPPPPPRRGRRGRGRPPACMGPRGPPASDRVPAPGGSVQRMRWTLTMNENCMRAYFGATEGGTNLTAYRGRMLSLFQVLEPTVNVSAQRLSDQVRVIQRDHRLTDAALDRLRSEVQSNRIISLQSQTAAQPQTPTVVPPLPIHADEESDDRVTNVSTQCNEQLRSALELAIREYRFTPPNIRPRIPRLPMHRKNRALMCALDSLLSSYFDNSENLEDTHSILYCAAVAACRVAHAKFDNNDRATRPKPAVPAWQCRIERRINEARALIGKLICFREGNTRPRVMRFVRRAFSGTDINPRDYLSRVTERIDFLKQKVYAWANRIRRYKRRVERYTQNRMFHSDERWVYRTWERPDHDVSDTHLPDNDVMNTFWRNIWSMPVTHTEGDWMQEVQRACEPIEEMGDITIVPQDVTSAVRPMANWKSPGPDGLHNFWLKWLRSSHARLASQFQSSLESGSLPEFLTTGVTHLLHKSGSTAEPKNYRPITCLPTVYKLLTSILRAKINSHIINNSIMSVSQNGCKNGSRGTKELLLIDMAISQQVRRSRKDLSTCWIDYKKAYDSVPHTWLMRVLELYKVNTTLCAFLTSCMGQWRTVFHYPGCRQIQGRGEPIRIERGIFQGDSLSPLWFCLALNPLSTLLEGSGLGYRLRRGGQVISHLLYMDDLKLFAPNNLQLMKLLKVTETFSNSIRMEFGVDKCAVMHVKRGGIMESVGTQLSDSIHLRPLSSTETYKYLGMSEALGINETDMKQSLRERFYGRLKKVLKSLLSGGNKVRAFNGWVMPVLMYSFGILKWTQTELDALDRRVRTLLTAYRMHHPRSSVMRLYIPRKCGGRGFLNAKTLHNREVCSLREYFLQADVGMHRDVVAVDKGFTPLSLAKENWRKPVVLDTNGRREVWQSKELHGRFYRALYGPDVDFLASVAWLRFGDLFGETEGFVCAIMDEVMMTNNYRKYIVKDGTVDICRACHCPGESIRHIISGCSRLANGEYLHRHNLVARIIHQQLALKYNLVDAEVPYYKYVPDPVLENGHITLYWDRSIITDRTIVANKPDIVVIDRSERLTMIVDITVPHDENLVKAEKDKEIKYQDLAHEVVDMWEVDSAVIVPIVVTANGLIAKSLDQHLTRLALGSWVKGLIQKAVLLDTARIVRKFLSLRP

SEQ ID NO: 12860 - protein, 1205 aa, Amphipyra berbera
MLTRSRSKLQDPKTRPRPSASSLSSASQPPDSSIVSDVTPAAAVASSSSDEYFSPPSSPPPPRRRGRGRPPACMGPRGPPASDRVPAPGGSVQRMRWTQSMNENCMRAYFGATEGGTNLTAYRGRMLSLFQVLEPAVNVSAQRLSDQVRVIQRDHRLTDAALDRLRSEVQSNRIISPQSQTAAQPQAPTVVLPPPIHADEESDDRVTNVSTQCNERLRSALELAIQEYRFAPPNLRPRIPRLPMNKKNRALMCALDSLLSSYFDNSESLEDTHSILYCAAVAACRVAHAKFDNNDRATRPKPAVPAWQCRIERRINEARALIGKLICFREGNTRPRVMRFMRRAFSGTDINPRDYLSRVTERIDFLKQKVYAWANRIRRYKRRVERYTQNRMFHSDERWVYRTWERPDHNVSDTHLPDNDVMNTFWRNIWSMPVTHTEGDWMQEVQRACEPIEEMGDITIVPQDVTSAVRPMANWKSPGPDGLHNFWLKWLRSSHARLASQFQSSLESGSLPEFLTTGVTHLLHKSGSTAEPKNYRPITCLPTVYKLLTSILRAKINSHIINNSIMSVSQNGCKNGSRGTKELLLIDMAISQQVRRSRKDLSTCWIDYKKAYDSVPHTWLMRVLELYKVNTTLCAFLTSCMGQWRTVLHYPGCRQIQGRGEPIRIERGIFQGDSLSPLWFCLALNPLSTLLEGSGLGYRLRRGGQVISHLLYMDDLKLFAPNNLQLMNLLKVTETFSNSIRMEFGVDKCAVMHVKRGGIMESVGTQLSDSIHLRSLSSTETYKYLGMSEALGINETDMKQSLRERFYGRLKKVLKSLLSGGNKVRAFNGWVMPVLMYSFGILKWTQTELDALDRRVRTLLTAYRMHHPRSSVMRLYIPRKCGGRGFLNAKTLHNREVCSLREYFLQADVGMHRDVVAVDKGFTPLSLAKENWRKPVVLDTNGRREVWQSKELHGRFYRALHGPDVDFLASVAWLRFGDLFGETEGFVCAIMDEVMMTNNYRKYIVKDGTVDICRACHCPGESIRHIISGCSRLANGEYLHRHNLVARIIHQQLALKYNLVDAEVPYYKYVPDPVLENGHITLYWDRSIITDRTIVANKPDIVVIDRRERLTMIVDITVPHDENLVKAEKDKEIKYQDLAHEVVDMWEVDSAVIVPIVVTANGLIAKSLDHHLTRLSLGSWVKGLIQKAVLLDTARIVRKFLSLRP

SEQ ID NO: 12861 - protein, 868 aa, Amphipyra berbera
MRFVRRAFSGTDINPRDYMSRVTERIDFLKQKVYAWANRIRRYKRRVERYTQNRMFHSDERWVYRTWERPDHDVNDTHPPDNDVMNTFWRNIWSMPVTHTEGDWMQEVQRACEPIEEMGDITIVPQDVTSAVRPMANWKSPGPDGLHNFWIKWLRSSHARLASQFQSSLESGSLPEFLTTGVTHLLHKSGSTAEPKNYRPITCLPTVYKLLTSILRAKINSHIINNSIMSVSQNGCKNGSRGTKELLLIDMAISRQVRRSRKDLSTCWIDYKKAYDSVPHTWLMRVLELYKVNTTLCAFLTSCMGQWRTVLHYPGCRQIQGRGEPIRIERGIFQGDSLSPLWFCLALNPLSTLLEGSGLGYRLRRGGQVISHLLYMDDLKLFAPNNLQLMKLLKVTETFSNSIRMEFGVDKCAVMHVKRGGIMESVGTQLSDSIHLRSLSSTETYKYLGMSEALGINETDMKQSLRERFYGRLKKVLKSLLSGGNKVRAFNGWVMPVLMYSFGILKWTQTELDALDRRVRTLLTAYRMHHPRSSVMRLYIPRKCGGRGFLNAKTLHNREVCSLREYFLQADVGMHRDVVAVDKGFTPLSLAKENWRKPVVLDTNGRREVWQSKELHGRFYRALHGPDVDFLASVAWLRFGDLFGETEGFVCAIMDEVILTNNYRKYIVKDGTVDICRACHCPGESIRHIISGCSRLANGEYLHRHNLVARIIHQQLALKYNLVDAEVPYYKYVPDPVLENGHITLYWDRSIITDRTIVANKPDIVVIDRSERLAMIVDITVPHDENLVKAEKDKEIKYQDLAHEVVDMWEVDSAVIVPIVVTANGLIAKSLDQHLTRLALGSWIKGLMQKAVLLDTARIVRKFLSLRP

SEQ ID NO: 12862 - protein, 962 aa, Amphipyra berbera
MHRKNRALMCALDSLLSSYFDNSENLEDTHSILYCAAVAACRVAHAKFDNNDRATRPKPTVPAWQCRIERRINEARALIGKLICFREGNTRPRVMRFVRRAFSGTDINPRDYMSRVTERIDFLKQKVYAWANRIRRYKRRVERYTQNRMFHSDERRVYRTWERPDHVVSDTHLPDNDVMNTFWRNIWSMPVTHTEGDWMQEVQRSCEPIEEMGDITIVPQDVTSAVRPMANWKSPGPDGLHNYWLKWLRSSHARLASQFQSSLESGSLPQFLTTGVTHLLHKSGSTAEPKNYRPITCLPTVYKLLTSILRSKISKHIANNSIMSVSQNGCTNGSRGTKELLLIDMAISQQVRRSRKNLSTCWIDYKKAYDSVPHTWLMRVLELYKVNTTLCAFLTSCMGQWRTVLHYPGCRQIQGRGEPIRIERGIFQGDSLSPLWFCLALNPLSTLLEGSGLGYRLRRGGQVISHLLYMDDLKLFAPNNLQLMKLLKVTETFSNSIRMEFGVDKCAVMHVKRGGIMESVGTQLSDSIHLRSLSSTETYKYLGMSEALGINEIDMKQSLRERFYGRLKKVLKSLLSGGNKVRAFNGWVMPVLMYSFGILKWTQTELDALDRRVRTLLTAYRMHHPRSSVMRLYIPRKCGGRGFLNAKTLHNREVCSLREYFLQSDVGMHRDVVAVDKGFTPLSLAKENWRKPVVLDTNGRREVWQSKELHGRFYRALHGPDVDFLASVAWLRFGDLFGETEGFVCAIMDEVMMMNNYRKYIVKDGTVDICRACHCPGESIRHIISGCSRLANGEYLHRHNLVARIIHQQLALKYNLVDAEVPYYKYVLDPVLENGHITLYWDRSIITDRTIVANKPDIVVIDRSERLTMIVDITVPHDENLVKAKKDKEIKYQDLAHEVVDMWEVDSAVIVPIVVTANGIIAKSLDQHLTRLSLGSWVKGLIQKAVFLDTARIVRKFLSLRP

SEQ ID NO: 12863 - protein, 962 aa, Amphipyra berbera
MNKKNRALMCALDSLLSSYFDNSEGLEDTHSILYCEAVAACRVAHAKFDNNDRDTRPKPAVPAWQCRVERRINEARALIGKLICFREGNTRPRVMRFVRRAFSGTDINPRDYMSRVTERIDFLKQKVYAWANRIRRYKRRVERYTQNRMFHSDERRVYRTWERPDHDVSDTHLPDSDVMNTFWRNIWSMPVTHTEGDWMQEVQRACEPIEEMGDVTIVPQDVTSAVRPMSNWKSPGPDGLHNFWLKWLRSSHARLASQFQSSLESGSLPQFLTTGVTHLLHKSGSTVEPKNYRPITCLPTVYKLLTSILRSKISTHITNNFIMSTSQNGCKNGSRGTKELLLIDMTISQQVRRSRKDLSTCWIDYKKAYDSVPHTWLMRVLELYKVNTTLCAFLTSCMGQWRTVLHYPGCRQIQGRGEPIRIKRGIFQGDSLSPLWFCLALNPLSTLLEGSGLGYRLRRGGQVISHLLYMDDLKLFAPNNLQLVKLLKVTETFSNSIRMEFGVDKCAVMHVKRGGIMESVGTQLSDSIHLRSLSSTETYKYLGMSEALGINVADMKQSLRERFYGRLKKVLKSLLSGGNKVRAFNGWVMPVLMYSFGILKWTQTELDALDRRVRTLLTAYRMHHPRSSVMRLYIPRKCGGRGFLNAKTLHNREVCNLREYFLQADVGMHRDVVAVDKGFTPLSLAKENWRKPVVLDTTGRRDVWQSKELHGRFYRALHGPDVDFLASVAWLRFGDLFGETEGFVCAIMDEVIMTNNYRKYIVKDGTVDICRACHCPGESIRHIISGCSRLANGEYLHRHNLVARIIHQQLALKYNLVDAEVPYYKYVPDPVLENGHITLYWDRSIITDRTIIANKPDIVVIDRSERLTMIVDITVPHDENLVKAEKDKEIKYQDLAHEVVDMWEVDSAVIVPIVVTANGLIAKSLDQHLMRLSLGSWVKGLIQKAVLLDTARIVRKFLSLRP

SEQ ID NO: 12864 - protein, 1197 aa, Noctua janthe
MLTRSATRRARLSPPDPSLSSASPPPESSPIVSAVTPAVAVASSSSDEYFSPPTTPPPVRRRGGRRPPDGLGPRGPPASDRVPAPGGSVPRMRWTQSINANVMRAYYGATEGGNNLTAYRVRMLSLFQMLEPAVNVSAQRLSDQVRVIQRNGMLDDTVLDRLRTEMQSSHVIATPPQTVVPPQSTIIPTHDNNVSNDMVTNVSTQCNEEMRCALEGAIREYRFMQPDLRPRVPRLPMHNKNKVLVAVLDSQLSNYFDNCENLTDAHSVLYCAAVAACRVAHVKFSDDRATRPKPAVPSWQYRIERRIGEARALIGKLICFREGNTRPRVMRFVRRAFSGTDISARDYMSRVTERIDFLKQKVYAWANRIRRYKRRVDRYTQNRTFQRDERWVYRAWERPDQGVADTHLPDDDAMCSFWRSIWSVPVSHTEGEWTREVERACDLVPEMGAITISPQDVVRAVRPLPNWKSPGPDGLHNFWIKWFTRSHARLAILFQSALESGSLPEFLTTGITHLLHKSGSTAEPKNYRPIACLPTVYKVLTSILRAKINKHIDDNSVMSASQNGCRNGSRGTKELLLIDMAISQQVRRSRRDLSTCWIDYKKAYDSVPHTWLMRVLELYKVDSTLRIFLMSCMGQWRTVLRYPGCRQIQRNSEPIRIERGIFQGDSLSPLWFCLALNPLSTLLEDSGLGYRLRRGGQVISHLLYMDDLKLFAPNDLQLMELLKVTETFSSAIRMEFGVDKCAVMHVKRGEIVESVGTQLSDSINLRSLSATETYKYLGMSEALGINVADMKQSLKERFFGRLKKVFNSLLSGGNKVRAFNGWVMPVLMYSFGILKWTQTELDALDRRVRTLLTTYRMHHPRSSVMRLYIPRRCGGRGFLNAKTLHNREIYSLREYFLETDVGMHRDVVAVDKGLTPLSLAKENWRKPVVLDTNDRMKVWQSKELHGRFFRALHGPDVDLPASVAWLRSGDLFGETEGFVCAIMDEVMMTNNYRRFIVKDGTVDICRACHRPGESIRHIISGCSRLANGEYLHRHNLVARIIHQQLALKYNLVESEVPYYKYVPDPVLENGNITLYWDRSIVTDRTIVANKPDIVVVDRSERRAMIVDITVPHDGNLVKAEKDKQIKYLDLAHEVVDMWDVDSAIIVPIVVSAHGLIAKSLDQYLRRLSLGSWIKGLIQKAVLLDTARIVRRFLSLVP

SEQ ID NO: 12865 - protein, 868 aa, Noctua janthe
MRFVRRAFSGTDISARDYMSRVTERIDFLKQKVYAWANRIRRYKRRVDRYTQNRTFQRDERWVYRAWERPDQGVADTRLPDDDAMCSFWRSIWSVPVSHTEGEWTREVERACDLVPEMGAITISPQDVVRAVRPLPNWKSPRPDGLHNFWIKWFTRSHARLAILFQSALESGSLPEFLTTGITHLLHKSGSTAEPKNYRPITCLPTVYKVLTSILRAKINKHIDDNSVMSASQNGCRNGSRGTKELLLIDMAISQQVRRSRRDLSTCWIDYKKAYDSVPHTWLMRVLELYKVDSTLRIFLMSCMGQWRTVLRYPGCRQIQRNSEPIRIERGIFQGDSLSPLWFCLALNPLSTLLEDSGLGYRLRRGGQVISHLLYMDDLKLFAPNDFQLMELLKVTETFSSAIRMEFGVDKCAVMHVKRGEIVESVGTQLSDSINLRSLSATETYKYLGMSEALGINVADMKQSLKERFFGRLKKVFSSLLSGGNKVRAFNGWVMPVLMYSFGILKWSQTELDALDRRVRTLLTAYRMHHPRSSVMRLYIPRRCGGRGFLNAKTLHNREICSLREYFLETDVGMHRDVVAVDKGLTPVSLAKENWRKPVVLDTNDRMEVWQSKELHGRFFRALHGPDVDLPASVAWLRSGDLFGETEGFVCAIMDEVMMTNNYRRFIVKDGTVDICRACHRPGESIRHIISGCSRLANGEYLHRHNLVARIIHQQLALKYNLVESEVPYYKYVPDPVLENSSITLYWDRSIVTDRTIVANKPDIVVVDRSERRAMIVDITVPHDGNLVKAEKDKQIKYLDLAHEVVDMWDVDSAIIVPIVVSAHGLIAKSLDQYLRRLSLGSWIKGLIQKAVLLDTARIVRRFLSLEP

SEQ ID NO: 12866 - protein, 1197 aa, Noctua janthe
MLTRSATRRARLSPPDPSLSSASPPPESSPIVSAVTPAVAVASSSSDEYFSPPTTPPPVRRRGGRRPPDGLGPRGPPASDRVPAPGGSVPRMRWTQSINANVMRAYYGATEGGNNLTAYRVRMLSLFQVLEPAVNVSAQRLSDQVRVIQRNGMLDDTVLDRLRTEMQSSHVIATPPQTVVPPQSTIIPTHDNNVSNDMVTNVSTQCNEEMRCALEGAIREYRFMQPDLRPRVPRLPMHNKNKVLVAVLDSQLSNYFDNCENLTDAHSVLYCAAVAACRVAHVKFSDDRATRPKPAVPSWQYRIERRIGEARALIGKLICFREGNTRPRVMRFVRRAFSGTDISARDYMSRVTERIDFLKQKVYAWANRIRRYKRRVDRYTQNRTFQRDERWAYRAWERPDQGVADTHLPDDDAMCSFWRSIWSVPVSHTEGEWTREVERACDLVPEMGAITISPQDVVRAVRPLPNWKSPGPDGLHNFWIKWFTRSHARLAILFQSALESGSLPEFLTTGITHLLHKSGSTAEPKNYRPIACLPTVYKVLTSILRAKINKHIDDNSVMSASQNGCRNGSRGTKELLLIDMAISQQVRRSRRDLSTCWIDYKKAYDSVPHTWLMRVLELYKVDSTLRIFLMSCMRQWRTVLRYPGCRQIQRNSEPIRIERGIFQGDSLSPLWFCLALNPLSTLLEDSGLGYRLRRGGQVISHLLYMDDLKLFAPNDLQLMELLKVTETFSSAIRMEFGVDKCAVMHVKRGEIVESVGTQLSDSINLRSLSATETYKYLGMSEALGINVADMKQSLKERFFGRLKKVFNSLLSGGNKVRAFNGWVMPVLMYSFGILKWTQTELDALDRRVRTLLTTYRMHHPRSSVMRLYIPRRCGGRGFLNAKTLHNREIYSLREYFLETDVGMHRDVVAVDKGLTPLSLAKENWRKPVVLDTNDRMEIWQSKELHGRFFRALHGPDVDLPASVAWLRSGDLFGETEGFVCAIMDEVMMTNNYRRFIVKDGTVDICRACHRPGESIRHIISGCSRLANGEYSHRHNLVARIIHQQLALKYNLVESEVPYYKYVPDPVLENGNITLYWDRSIVTDRTIVANKPDIVVVDRSERRAMIVDITVPHDGNLVKAEKDKQIKYLDLAHEVVDMWDVDSAIIVPIVVSAHGLIAKSLDQYLRRLSLGSWIKGLIQKAVLLDTARIVRRFLSLEP

SEQ ID NO: 12867 - protein, 1200 aa, Mythimna ferrago
MLTRSRARQQQTHPTSSDSSFSSASQPPGPAPAVSPVIPVAAVASSSSDEYFSPPTTPPPARRRGRGRPPACLGPRGPPASGGVPAAGGSVQRMRWTKSINENVMRSYFGATEGGTNLTAYRGRMLSLFQVLEPAVNVSAQRLSDQVRVIQRNRMLDDAVLDRLRLESRNGRVSPVSPPAAVQLQPSVSPRPDHVGEDDDDGAISVSTQCNARLRSALEDAFREYRSIPPELRPRLPRLPMHRKNRALVCALDSQLSNCFDSSEDLTDTHSILYCAAAAACRVAHVKIPNSDRATRPAKPAWQCRIERRIGEARALIGKLICFREGNTRPRVMRFVRRAFSGTDVSPRDYLPRITERIDFLRQKVYAWANRIRRYKRRVERYTQNRAFQSNERWVYRAWERPDQSVIDTRLPDDDAMYSFWRSIWSVPVSHTEGDWTRGVERECELIPEMGAITISPQDVARAVRPLPNWKSPGPDGLHNFWLKWFKSSHARLASQFQSALESGSLPQFLTTGITHLLHKSGSTVEPKNYRPITCLPTVYKVLTSILRAKINSHIETNSIMSASQNGCRNGSRGTKELLLIDVAISQQVRRSRRDLSTCWIDYKKAYDSVPHTWLMRVLELYKIDVTLRTFLLSCMGQWRTVLHYPGCRRVSENSEPLRIERGIFQGDSLSPLWFCLALNPLSTLLEGSGLGYRLRREGQVISHLLYMDDLKLFASNNLQLMELLKVTETFSSAIRMEFGLDKCAVMHVKRGEIMESVGTQLSDSIHLRSLSSTETYKYLGMSEALGINAADVKQSLGERFFCRLNKVLKSLLSGGNKVRAFNGWVMPVLMYSFGILKWTQTELDALDRRVRTLLTANRMHHPRSSVMRLYIPRKCGGRGFLNAKTLHNREVCSLREYFLETDVGMHRDVVAVDKGLTPLSLASENWRKPIIMDTNERKEVWKGKELHGRFYRALHGPDVDLLASVSWLRFGNLFGETEGFVFAIMDEVMMTNNYRKYIVKDGTVDICRACHRPGESIRHIISGCSHLANGDYLHRHNLVARIIHQQLALKYNLVESEVPYYRYVPDPVLENGSVTLYWDRSIITDRTIVANKPDIVVIDRLERRTMIVDIAVPHDENLVKAEKDKQTKYLDLAREVVDMWEVDRAIIVPIVVTANGLIAKSLDQHLRRLSLGSWIKGLIQKAVLLDTARIVRRFLSQEP

SEQ ID NO: 12868 - protein, 1200 aa, Mythimna ferrago
MLTRAAARRARLPPPASSLSSASPPPEPSPIVSAVTPAVAAASSSSDEYYSPPTTPPPTRRRGGRRPPDCLGPRGPPASDRVPAPGGSVQRMRWTQSINENVMRSYYGATEGGNNLTAYRVRMLSLFQVLEPAVNVSAQRLSDQVRVILRNHMLDDTVLDRLRTEMSDRVITPPSQPVVPAVVPPSSYISFHTDEVSSDTVTNVSNQCNSELRSALECAIREYRNIPPELRPRIPRLPMCNKNRALVAVLDSQLSNYFDDCEDLTDTHSIMYCAAVAACRVAHVKFPNSDVATRPKPAVPAWQCRIERRIGGARALIGKLICFREGNTRPRVMRFVRRAFSGTDISPRDYMSRVTERIDFLKQKVYAWANRIRRYKRRVERYTQNRTFRSNERWVYRAWERPDQGVTDARLPDDDAMSSFWRSIWSVPVSHTEGDWTREVERACDPIPQMGAIDISPQDVARAVRPLPNWKSPGPDGLHNFWIKWFTRSHARLAYQFQSALESGSLPQFLTTGITHLLHKSGSTAEPKNYRPITCLPTVYKVLTSILRSKINSHIDENSIMSPSQNGCRNGSRGTKELLLIDMTISQQVRRSRKDLSTCWIDYRKAYDSVPHTWLMRVLELYKIDTTLRTFLMSCMRQWSTVLRYPGCRNIQRNSEPVRIERGIFQGDSLSPLWFCLALNPLSTLLENSGLGYRLKRGGQVISHLLYMDDLKLFAPNNLQLMELLKVTEIFSSAIRMEFGVDKCAVMHVKRGEVVESVSTQLTDSINLRSLSPTETYKYLGMSEALGISITGMKQSLRERFFGRLKKVFNSLLSGGNKVRAFNGWVMPVLMYSFGVLKWTQTELDALDRRVRTLLTAYRMHHPRSSVMRLYIPRKCGGRGFLNAKTLHNREVCSLREYFLAADVGMHRDVVAVDKGLTPLSLANENWRKPIVLDTNDRREVWQSKELHGRFFRALHGPDVDQLASVAWLRFGDLFGETEGFVCAIMDEVIMTNNYRRFIVKDGTVDICRACHRPGESIRHIISGCSRLANGEYLHRHNLVARIIHQQLALKYSLVESEVPYYRYEPDPVLDNGHITLYWDRPIITDRTIVANKPDIVVVDRSERRAMIVDISVPHDENLVKAEKDKQIKYIDLAREVVDMWEVDSAVIVPIVVSANGLIAKSLDQHLRRLSLGDWIKGLIQKAVLLDTARIVRRFLSLEP

SEQ ID NO: 12869 - protein, 1019 aa, Mythimna ferrago
MVPPSNHVANPADEESTDMVIEVSTQCTNELRSALECAIREYRNMPSVLRPRLPRLPMHNKNKALVAALDMQLSNYFDNCKDLTDTHSIMYCAAVAACRVAHVKFPNSDVATRPKPAVPAWQCRIERRIGGARALIGKLICFREGNTRPRVMRFVRRAFSGTDISPRDYMPRVTERIDFLKQKVYAWANRIRRYKRRVERYTQNRAFQSNERWVYRAWERPDQGVTDTRLPDDDAMCSFWRNIWSVPVSHTEGSWTGEVERACESITEMGAITISPQDVARAVRPLPNWKSPGPDGLHNFWIKWLQRSHARLASQYQAALESSSLPEFLTTGVTHLLHKSGSTAEPKNYRPITCLPTVYKVLTSILRDKINNHIDNNSIMSASQNGCRKGSRGTKELLLIDMAISQQVRRSRKDLSTCWIDYKKAYDSVPHTWLMRVLELYKVDATLRTFLMSCMRQWRTVLRYPGCRNIQRNSEPVRIERGIFQGDSLSPLWFCLALNPLSTLLENSGLGYRLKRGGQVISHLLYMDDLKLFAPNNLQLMELLKVTETFSSAIRMEFGVDKCAVMHIKRGEIVESAGTQLSDSIHLRSLSSTETYKYLGMSEALGINATVMKQSLKERFFGRLKKVLNSLLSGGNKVRAFNGWVMPVLMYAFGVLKWTQTELDALDRRVRTLLTAYRMHHPRSSVMRLYIPRKCGGRGFLNAKTLHNREVCSLREYFLAADVGMHRDVVAVDKGLTPLSLANENWRKPVVLDTNVRKEVWQSKELHGRFFRALHGPDVDKLASVAWLRVGDLFGETEGFVCAIMDEVIMTNNYRRFIVKDGTVDICRACHRPGESIRHIISGCSRLANGEYLHRHNLVARIIHQQLALKYSLVESEVPYYRYVPDPVLDNGDITLYWDRSIITDRTIVANKPDIVVVDRSERRAMIVDISVPHDGNLVKAEKDKQIKYIDLAREVVDMWEVDSAIIVPIVVSANGLIAKSLDQHLRRLSLGDWIKGLIQKAVLLDTARIVRRFLSLEP

SEQ ID NO: 12870 - protein, 1096 aa, Mythimna ferrago
MRAYFGATEGGNNLTAYRVRMLSLFQVLEPTVNVSAQRLSDQVRVIQRNHMLDDTVLDRLRTEMGSHAVTSSSQTVVPPQVSNHLSINADEEITDMVTHVSTQCNNELRSALECAIREYRNIPPELRPRIPRLPMCNKNRALVAALDSQLSNYFDDCEDLTDTHSIMYCAAVAACRVAHVKFPNTDVATRPKPAVPAWQCRIERRIGGARALIGKLICFREGNTRPRVMRFVRRAFSGTDISPRDYMSRVTERIDFLKQKVYAWANRIRRYKRRVERYIQNSTFRSNERWVYRTWERPDQGVTDTHLPDDDAMCSFWRNIWSVPVSHTEGGWTREVERACESITEMGAITISPQDVARAVRPLPNWKSPGPDGLHNFWIKWLQRSHARLASQYQTALESGSLPEFLTTGVTHLLHKSGSTAEPKNYRPITCLPTVYKVLTSILRAKINNHVDNNAIMSASQNGCRNGSRGTKELLLIDMAISQQVRRSRKDLSTCWIDYKKAYDSVPHTWLMRVLELYKVDATLCAFLMSCMRQWRTVLRYPGCRNIQRNSEPVRIERGIFQGDSLSPLWFCLALNPLSTLLENSGLGYRLKRGGQVISHLLYMDDLKLFAPNNLQLMELLKVTETFSSAIRMEFGVDKCAVMHIKRGEIVESVGTQLSDSIHLRSLSPTETYKYLGMSEALGINATDMKQSLKERFFGRLKKVLNSLLSGGNKVRAFNGWVMLVLMYAFGVLKWTQTELDALDRKVRTLLTAYRMHHPRSSVMRLYIPRKCGGRGFLNAKTLHNREVCSLREYFLAADVGMHRDVVAVDKGLTPLSLANENWRKPVVIDTNVRKEVWQSKELHGRFFRALHEPGVDQLASVAWLRVGDLFGETEGFVCAIMDEVIMTNNYRRFIVKDGTVDICRACHRPGESIRHIISGCSRLANGEYLHRHNLVARIIHQQLALKYSLVESEVPYYRYVPDPVLDNGDITLYWDRSIITDRTIVANKPDIVVVDRSERRAMIVDISVPHDENLAKAEKDKQIKYIDLAREVVDMWEVDSAIIVPIVVSANGLIAKSLDQHLRRLSLGDWIKGLIQKAVLLDTARIVRRFLSLEP

SEQ ID NO: 12871 - protein, 1048 aa, Mythimna ferrago
MLDDSVLDRLRTEMSDRVITPPSQPVVPVVVPPSSHISFHTDEVSTDMVTNVSTQCNNELRSALECAIREYRNIPPELRPRIPRLPMCNKNRTLVAALDSQLSNYFDDCEDLTETHSIMYCAAVAACRVAHVKFPDSDEATRPKSAVPAWQCRIERRIGGARALIGKLICFREGNTRPRVMRFVRRAFSGTNISPRDYMSRVTERIDFLKQKVYAWANRIRRYKRRVERYTQNRTFRSNERWVYRAWERPDQGVTDARLPEDDAMCSFWRSIWSVPVSHTEGDWTREVERACDPIPQMGAIDISPQDVARAVRPLPNWKSPGPDGLHNFWIKWFTRSHARLAYQFQSALESGSLPQFLTTGITHLLHKSGSTAEPKNYRPITCLPTVYKVLTSILRSKINSHIDENSIMSPSQNGCRNGSRGTKELLLIDMTISQQVRRSRKDLSTCWIDYKKAYDSVPHTWLMRVLELYKIDTTLRTFLMSCMRQWSTVLRYSGCRNIQRNSEPVRIERGIFQGDSLSPLWFCLALNPLSTLLENSGLGYRLKRGGQVISHLLYMDDLKLFAPNNLQLMELLKVTETFSSAIRMEFGVDKCAVMHVKRGEVVESVGVQLTDSINLRSLSPTETYKYLGMSEALGISTIDMKQSLKERFFGRLKKVFNSLLSGGNKVRAFNGWVMPVLMYSFGVLKWTQTELDALDRRVRTLLTAYRMHHPRSSVMRLYIPRKSGGRGFLNAKTLHNREVCSLREYFLAADVGMHRDVVALDKGLTPLSLANENWRKPIVLDTDDRREVWQSKELHGRFFRALHGPDVDQLASVAWLRFGDLFGETEGFVCAIMDEVIMTNNYRRFIVKDGTVDICRACHRPGESIRHIISGCSRLANGEYLHRHNLVARIIHHQLALKYSLVESEVPYYRYEPDPVLDNGHITLYWDRPIITDRTIVANKPDIVVVDRSERRAMIVNISVPHDENLVKAEKDKQIKYIDLAREVVDMWEVDSAIIVPIVVSANGLIAKSLDQHLRRLSLGDWIKGLIQKAVLLDTARIVRRFLSLES

SEQ ID NO: 12872 - protein, 1200 aa, Mythimna ferrago
MLTRAAARRARPPPPASSLSSASPPPEPSLNASAVTPAATVASSSSDEFYSPPTSPPPARRRRGRRPPSSLGPRGPPASDRVPAPGGSVQRMRWTQSINENVMRSYYGATEGGNNLTAYRVRMLSLFQVLEPAVNVSAQRLSDQVRVILRNHMLDDSVLDHLRTEMSDRVITPPSQPVVPVVVPPSSHISFHTDEVSTDMVTNVSTQCNNELRSALECAIREYRNIPPELRPRIPRLPMCNKNRALVAALDSQLSNYFDDCEDLTETHSIMYCAAVAACRVAHVKFPDSDEATRPKSAVPAWQCRIERRIGGARALIGKLICFREGNTRPRVMRFVRRAFSGTNISPRDYMSRVTERIDFLKQKVYAWANRIRRYKRRVERYTQNRTFRSNERWVYRAWERSDQGVTDARLPEDDAMCSFWRSIWSVPISHTEGDWTREVERACDPIPQMGAIDISPQDVARAVRPLPNWKSPGPDGLHNFWIKWFTRSHARLAYQFQSALESGSLPQFLTTGITHLLHKSGSTAEPKNYRPITCLPTVYKVLTSILRSKINSHIDENSIMSPSQNGCRNGSRGTKELLLIDMTISQQVRRSRKDLSTCWIDYKKAYDSVPHTWLMRVLELYKVDATLCTFLMSCMRQWRTVLRYPGCRNIQRNSEPVRIERGIFQGDSLSPLWFCLALNPLSTLLENSGLGYRLKRGGQVISHLLYMDDLKLFAPNNLQLMELLKVTETFSSAIRMEFGVDKCAVMHIKRGEIVESVGTQLSDSIHLRSLSPTETYKYLGMSEALGINATDMKQSLRERFFGRLKKVLNSLLSGGNKVRAFNGWVMPVLMYAFGVLKWTQTELDALDRKVRTLLTAYRMHHPRSSVMRLYIPRKCGGRGFLNAKILHNREVCSLREYFLAADVGMHRDVVAVDKGLTPLSLANENWRKPVVLDTNVRKEVWQSKELHGRFFRALHGPDVDQLASVAWLRVGDLFGETEGFVCAIMDEVIMTNNYRRFIVKDGTVDICRACHRPGESIRHIISGCSRLANGEYLHRHNLVARIIHQQLALKYSLVESEVPYYRYVPDPVLDSGDITLYWDRSIITDRTIVANKPDIVVVDRSERRAMIVDISVPHDENLVKAEKDKQIKYIDLAREVVDMWEVDSAIIVPIVVSANGLIAKSLDQHLRRLSLGDWIKGLIQKAVLLDTARIVRRFLSLEP

SEQ ID NO: 12873 - protein, 1200 aa, Mythimna ferrago
MLTRAAARRARPPPPASSLSSASPPPDPSPTVSAVTPAVAAASSSSDEYYSPPTTPPPARRRGGRRPPACFGPQGPPASDRVPATGGSVPRMRWTQSTNENVMRAYYGATEGGNNLTAYRVRMLSLFQVLEPAVNVSAQRLSDQVRVIQRNHMLDDTVLDRLRTEMSNHVIAPSSQPVVPVMVPPSNHVANPADVESTDMVIQVSTQCTNELRSALECAIREYRNMPSVLRPRLPRLPMHNKNKALVAALDMQLSNYFDNCKDLTDAHSIMYCAAVAACRVAHVKFPNSDVATRPKPAVPAWQCRIERRIGGARALIGKLICFREGNTRPRVMRFVRRAFSGTDICPRDYMLRVTERIDFLKQKVYAWANRIRRYKRRVERYTQNRAFQSNERWVYRAWERPDQGVTDTRLPDDDAMCSFWRNIWSVPVSHTEGGWTREVEQACEPITEMGAITISPQDVARAVRPLPNWKSPGPDGLHNFWIKWLQRSHACLASQYQAALESSSLPEFLTTGVTHLLHKSGSTAEPKNYRPITCLPTVYKVLTSILRDKINNHIDNNSIMSASQNGCRKGSRGTKELLLIDMAISQQVRRSRKDLSTCWIDYKKAYDSVPHTWLMRVLELYKIDATLRTFLMSCMRQWRTVLRYPGCRNIQRSSEPVRIERGIFQGDSLSPLWFCLALNPLSTLLENSGLGYQLKRGGQVTSHLLYMDDLKLFAPNKLQLMELLKVTETFSSAIRMEFGVDKCAVMHVKRGEIVESVSTQLSDSISLRSLSATETYKYLGMSEALGINATDMKQSLRERFFGRLKKVFNSLLSGGNKVRAFNGWVMPVLMYSFGVLKWTQTELDALDRRVRSLLTANRMHHPRSSVMRLYIPRKCGGRGFLNAKTLHNREVCSLREYFLAADVGMHRDVVAVDKGLTPLSLANENWRKPVVLDTNDRKEVWQSKELHGRFFRALHGPDVDQLASVAWLRVGDLFGETEGFVCAIMDEVIMTKNYRRFIVKDGTVDICRACHRPGESIRHIISGCSRLANGEYLHRHNLVARIIHQQLALKYSLVESEVPYYRYVPDPVLDNGDITMYWDRSIITDRTIVASKPDIVVVDRSERRAMIVDISVPHDENLVKAEKDKQIKYIDLAREVVDMWDVDSAIIVPIVVSGNGLIAKSLDQHLRRLALGSWIKGLIQRAVLLDTARIVRRFLSLEP

SEQ ID NO: 12874 - protein, 1198 aa, Mythimna ferrago
MLTRAAARRARPPPPASSLSSASPPPEPSLNASAVTPAATVASSSSDEFYSPPTSPPPARRRRGRRPPSSLGPRGPPASDRVPAPGGSVQRMRWTQSINVMRSYYGATEGGNNLTAYRVRMLSLFQVLEPAVNVSAQRLSDQVRVILRNHMLDDSVLDRLRTEMSDRVITPPSQPVVPVVVPPSSHISFHTDEVSTDMVINVSTQCNNELRSALECAIREYRNIPPELRPRIPRLPMCNKNRALVAALDSQLSNYFDDCEDLTETHSIMYCAAVAACRVAHVKFPDSDEATRPKSAVPAWQCRIERRIGGARALIGKLICFREGNTRPRVMPFVRRAFSGTNISPRDYMSRVTERIDFLKQKVYAWANRIRRYKRRVERYTQNRTFRSNERWVYRAWERPDQGVTDARLPEDDAMCSFWRSIWSVPVSHTEGDWTREVERACDPIPQMGAIDISPQDVARAVRPLPNWKSPGPDGLHNFWIKWFTRSHARLAYQFQSALESGSLPQFLTTGITHLLHKSGSTAEPKNYRPITCLPTVYKVLTSILRSEINSHIDENSIMSPSQNGCRNGSRGTKELLLIDMTISQQVRRSRKDLSTCWIDYKKAYDSVPHTWLMRVLELYKIDTTLRTFLMSCMRQWSTVLRYPGCRNIQRNSEPVRIERGIFQGDSLSPLWFCLALNPLSTLLENSGLGYRLKRGGQVISHLLYMDDLKLLAPNNLQLMELLKVTETFSSAIRMEFGVDKCAVMHVKRGEVVESVGVQLTDSINLRSLSPTETYKYLGMSEALGISTIDMKQSLKERFFGRLKKVFNSLLSGGNKVRAFNGWVMPVLMYSFGVLKWTQTELDALDRRVRTLLTAYRMHHPRSSVMRLYIPRKCGGRGFLNAKTLHNREVCSLREYFLAADVGMHRDVVALDKGLTPLSLANENWRKPIVLDTDDRREVWQSKELHGRFFRALHGPDIDQLASVAWLRFGDLFGETEGFVCAIMDEVIMTNNYRRFIVKDGTVDICRACHRPGESIRHIISGCTRLANGEYLHRHNLVARIIHQQLALKYSLVESEVPYYRYEPDPVLDNGHITLYWDRPIITDRTIVANKPDIVVVDRSERRAMIVDISVPHDENLVKAEKDKQIKYIDLAREVVDMWEVDSAIIVPIVVSANGLIAKSLDQHLRRLSLGDWIKGLIQKAVLLDTARIVRRFLSLEP

SEQ ID NO: 12875 - protein, 1200 aa, Mythimna ferrago
MLTRAAARRARPPPLASSLSSASLPPEPSLTVSAVTPAAAAASSSSDEYYSPPTTPPPARRRGGRRPPACLGPRGPPVSDRVPAAGGSVPRMRWTQSTNENVMRAYYGATEGGNNLTAYRVRMLSLFQVLEPAVNVSAQRLSDQVRVIQRNNMLDDTVLDRLRTEMSNRVITPPSQPVVPVVVPQSSHISLHTDEVSTDTVTNVSTQCNNELRSALECAIREYRNMPLELRPRLPRLPMHNKNKALVAALDSQLSNYFDDCEDLTDTHSIMYCAAVAACRVAHVKFPNSDVATRPKPAVPAWQYRIERRIGGARALIGKLICFREGNTRPRVMRFVRRAFSGTDISPRDYMSRVTERIDFLKQKVYAWANRIRRYKRRVERYIQNSTFRSNERWVYRAWERPDQGVTDTRPPDDDAMCSFWRNIWSVPVSHTEGGWTREVERACESVTEMGAITISPQDVARAVRPLPNWKSPGPDGLHNFWIKWLQRSHARLASQYQAALESGSLPEFLTTGVTHLLHKSGSTAEPKNYRPITCLPTVYKVLTSILRAKINHHVDNNAIMSASQNGCRNGSRGTKELLLIDMAISQQVRRSRKDLSTCWIDYKKAYDSVPHTWLMRVLELYKVDATLRTFLMSCMRQWKTVLRYPGCRNIQRNSEPVRIERGIFQGDSLSPLWFCLALNPLSTLLENSGLGYRLKRGGQVISHLLYMDDLKLFAPNNLQLMELLKVTETFSSAIRMEFGVDKCAVMHIKRGEIVESVGIQLSDSIHLRSLSPTETYKYLGMSEALGINATDMKQSLRERFFGRLKKVLNSLLSGGNKVRAFNGWVMPVLMYAFGVLKWTQTELDALDRRVRTLLTAYRMHHPRSSVMRLYIPRKCGGRGFLNAKSLHNREVCSLREYFLAADGGMHRDVVAVDKGLTPLSLANENWRKPVVLDTNVRREVWQSKELHGRFFRALHGPDVDQLASVAWLRVGDLFGETEGFVCAIMDEVIMTNNYRRFIVKDGTVDICRACHRPGESIRHIISGCSRLANGEYLHRHNLVARIIHQQLALKYSLVQSEVPYYRYVPDPVLDSGDITLYWDRSIITDRTIVANKPDIVVVDRSERRAMIVDISVPHDENLAKAEKDKQIKYIDLAREVVDMWEVDSAIIVPIVVSANGLIAKSLDQHLRRLSLGDWIKGLIQKAVLLDTARIVRRFLSLEP

SEQ ID NO: 12876 - protein, 1192 aa, Eilema sororculum
MLTRAQAKRNGSAPITSPDSSLSSAAQPPTVEPAASSSSSSDEFFSPPTSPTPVRRPGRGRPPTCLGPRRPPASNGAPATGGDVHRMRWTNSINENVMRAYFAATEGGTNLSAYRTRMLPLFQALEPSINVSAQRLSDQVRVIQRNRMLNETVLETLRLECLRNICVTPAPVPVPASTVELNDDTCVAPDDTPIPVSIQYNEEIKEALECALREYRSMPVHVRPRLPRLPIHRRNIALVSALDSLLPRYLENSENLGDTHSILYCTAVAACRMAGAKFPIKDPAIRPKSAIPAWQCRIERRVTEARVLIGKLICFRSGNTRPRVMRYVTRAFAGTDISPQDYTSRVTERIDFLKQKVYAWANRIRRYKKRVDRYTVNRMFQRDQRWVYRSWERTEESVDDVRRPDAEVTNAFWRSIWSVPVSHTEGDWMHEVKRACETIPEMEEINIDAIDVDCAVRSLSNWKSPGPDGLHNFWLKWLRSSHVVLASQFQSAVESGTLPAFMTTGVTHLLHKTGSTLEPNNYRPITCLPTVYKLLTSILRAKINNHINNNSIMCASQNGCRNGARGTKELLLIDMAISQQARRNRKDLTACWIDYKKAFDSVPHTWLLRVLELYKVNTTLCTFLRSCMGQWRTVLFYPGCRQALGGGVPITIERGIFQGDSLSPLWFCLALNPLSTLLVNSGLGYRLRREGQMVSHLFYMDDLKLFAHTNPQLITLLKITETFSNSIKMAFGVDKCAVIHVKRGRVVESEGIQLSDSTNLRSLLVTETYKYLGMSQALCINEVDMKQMLQERFFGRLKKVLNSLLSGGNKVRACNSWVMPLLMYSFGILKWTQTELDTIDRKVRTQLTAFRMHHPRSSVMRLYIPRKCGGRGFLNAKTLHNREVCNLRDYFLKSNVDMHRDVVNVDTGLTPLGLAKENWRRPTIVSTDSRREVWQSKELHGRFYRALHRPEVDLLASVSWLRFSDLFGETEGFVCAIADEVIKTNNYRKYIMRDGTIDICRACHQPGESLRHITSGCSRLANGEYLHRHNQVARIIHQRLALKYNLVEFEVPYYRYVPEPVLENTHITLYWDRSIITDRTVVANKPDIVVIDRSERRALIVDVTIPHDENLVKAEKDKQVKYLDLAHEVVDMWNVDSAIIVPIVVSVNGLIAKSLDQHLKRLGLDGWVKGQMQKAVLLDTARIVRKFLSLEP

SEQ ID NO: 12877 - protein, 1191 aa, Eilema sororculum
MLTRAQARNRNAQTTSPDSSLSSAAQPPAMEPAASSSSSSDEFFSPPTSPTPVRRPGRGRPPTCLGPRRPPASNRAPAAGGNVHRMRWTNSINENVMRAYFAATEGGTNLSAYRTRMLPLFQALEPSINTSAQRLSDQVRVIQRNRMLNETVLETLRQECLRNICVTPAPAPAPASTAVINNDTCVAPDDTPIPVSIQYNEEIKEALECALREYRSVPVHVRPRLPRLPIHRRNIALVSALDSLLPRYLENSENLGDTHSILYCTAVAACRMAGAKFPIKDPAIRPKSAIPAWQCRIERRVAEARVLIGKLICFRSGNTRPRVMRYVTRAFAGTDISPQDYTSRVTERIDFLKQKVYAWANRIRRYKRRVDRYTVNHMFQRDQRWVYRSWERTDESVDDVRRPNAEATNAFWRSIWSMPVSHTEGDWMREVERACETIPEMEEIYIDATDVDCAVRSLSNWKSPGPDGLHNFWLKWLRSSHVVLASQFQSAIESGTLPAFMTTGVTHLLHKTGSTLEPNNYRPITCLPTVYKLLTSILRAKINNHINNNSIMCASQNGCRNGARGTKELLLIDMAISQQARRNRKDLTACWIDYKKAFDSVPHTWLLRVLELYKVNTTLCTFLRSCMGQWRTVLFYPGCRQALGGGVPITIERGIFQGDSLSPLWFCLALNPLSTLLVNSGLGYRLRREGQMVSHLFYMDDLKLFAHTNPQLIALLKVTETFSNSIKMAFGVDKCAVIHVKRGRVVESEGIQLSDSTNLRSLLVTETYKYLGMSQALCINEVDMKQMLQERFFGRLKNVLNSLLSGGNKVRACNSWVMPLLMYSFGILRWTQTELDTIDRKVRTQLTAFRMHHPRSSVMRLYIPRKCGGRGFLNAKTLHNREVCNLRDYFLKSNVDMHRDVVNVDTGLTPLGLAKENWRRPTIVSTDSRREVWQSKELHGRFYRALHRPEVDLLASVSWLRFSDLFGETEGFVCAIADEVIKTNNYRKYIMRDGTIDICRACHQPGESLRHITSGCSRLANGEYLHRHNQVARIIHQRLALKYNLVEVEVPYYKYVPEPVLQNSHITLYWDRSIITDRTVVANKPDIVVIDRSERRALIVDVTIPHDENFVKAEKDKQVKYLDLAHEVVDMWNVDSAIIVPIVVSVNGLIAKSLDQHLKRLGLDGWVKGQMQKAVLLDTARIVRKFLSLEP

SEQ ID NO: 12878 - protein, 1197 aa, Eilema sororculum
MLTRAKAKQIINYAQPTPSDSSCSSASQPPESTSPRPATVEASSSDEYFSPPTSPTPVRRPGRGRPPSSLGSRGPPASNRAPATGGNVRRMRWTSSINENVMRAYFAATGGGANLTAYRDRMLILFQDLEPTVNVSAQRLSDQVRAIQRCHLLDSSVLDRLRSDLQNNDITPSPPQAVMQVVPQETQPVQTDCELDNVATSVSTQYIEQIRNALECAVRDYRSMNYQIRPRLPRLPVHKRNIALVCALDSLLPNYLDNCEHLGDTHSILYCAAYAACRVAGVKFPECNTAIRPKSGKPRWQCRIERRIAETRALIGKLICFRSGNTRPRVMRFVNRVFSGTGVSPFDYTSRVTERIDFLKQKVYAWANRIKRYKKRCDRYTLNRTFQRDERWVYRNWERADSVGDEHFPDVTATNTFWRNIWSVPVAHTEGDWVRKVKRSCEAIETMEPVIISEDDIACVVRSLPNWKAAGPDGLHNFWLKWLRSSHARLAFQFQSALESGSLPSFMTTGITHLLFKSGCAMNPKNYRPITCLPTVYKLLTSVLRVKIASHITRNSILSYSQNGCRSGARGTKELLIIDTAVNQQVRRNRRDMATCWIDYKKAYDSVPHTWLLRVLELYKVDTTLCTFLEACMGQWSTALRYPGCRHIPDDGELIKIERGIFQGDSLSPLWFCLALNPLSTILEDSGLGYCLRRGSQVISHLLYMDDLKLFAPNNRQLMELLKVTETFSTSIRMEFGVDKCAVMHVKKGEIVESEGIELSDSTKLRSLSVNDTYKYLGISQALGVNESDMKQSLRERFFCRLKKVLKSLLSGGNKVRAYNDWVIPVLTYSFGILRWTQTELEALDRRVRTLLTAYRMHHPRSSVMRLYIPRKFGGRGFLNIKTLHNREICNLREYFLKVNVDVHRDVVAVDRGLTPLALAKENWRKPAILSINDRKEVWKSKELHGRFHRALYGPDVDLKASVSWLRFGDLFGETEGFVCAITDEVVMTNNYRRYILKDGTVDICRACHRPGESLRHIISGCSRLANGEYLHRHNQVARIVHQQLALKYKLVDSEVPYYRYVPDPVLDDGRVTLYWDRSVITDRTIVANKPDIVVIDRLERRAIIIDVTIPHDENLVKAEKDKQIKYLDLAHEVVDMWNVDSAIIVPIVVSVHGLIAKSLDQHLKRLALDSWVKGLMQKAVLLDTARIVRRFLSLEP

SEQ ID NO: 12879 - protein, 1045 aa, Eilema sororculum
MLNETVLETLRLECLRNICVTPAPAPAPASTAERNDDTRVAPDDTPIPVSIQYNEEIKEALECALREYRSMPVHVRPRLPRLPIHRRNIALVSALDSLLPRYLENSENLGDTHSILYCTAVAACRMAGAKFPIKDPAIRPKFTIPAWQCRIERRVAEARVLIGKLICFRSGNTRPRVMRYVTRAFAGTDISPQDYTSRVTERIDFLKQKVCAWANRIRRYKKRVDRYTVNRMFQRDQRWVYRSWERTEESVDDVRRPDAEATNAFWRSIWSVPVSHTEGDWMREVERACETIPEMEEIYIDATDVDCAVRSLSNWKSPGPDGLHNFWLKWLRSSHVVLASQFQSAIESGTLPAFMTTGVTHLLHKTGSTLEPNNYRPITCLPTVYKLLTSILRAKINNHINNNSIMCASQNGCRNGARGTKELLLIDMAISQQARRNRNDLTACWIDYKKAFDSVPHTWLLRVLELYKVNTTLCTFLRSCMRQWRTVLFYPGCRQALGGGVPITIERGIFQGDSLSPLWFCLALNPLSTLLVNSGLGYRLRREGQMVSHLFYMDDLKLFAHTNPQLIALLKVTETFSNSIKMAFGVDKCAVIHVKRGRVVESEGIQLSDSTNLRSLLVTETYKYLGMSQALCINEVDMKQLLQERFFGRLKKVLNSLLSGGNKVRACNSWVMPLLMYSFGILKWTQTELDTIDRKVRTQLTAFRMHHPRSSVMRLYIPRKCGGRGFLNAKTLHNREVCNLRDYFLKSNVDMHRDVVNVDTGLTPLGLAKENWRRPTIVSTDSRREVWQSKELHGRFYRALHRPEVDLLASVAWLRFSDLFGETEGFVCAIADEVIKTNNYRKYIMRDGTIDICRACHQPGESLRHITSGCSRLANGEYLHRHNQVARIIHQRLTLKYNLVEVEVPYYRYVPEPVLENSHITLYWDRSIITDRTVVANKPDIVVIDRSERRALIVDVTIPHDENLVKAETDKQVKYLDLAHEVVDMWNVDSAIIVPIVVSVNGLIAKSLDQHLKRLGLDGWVKGQMQRAVLLDTARIVRKFLSLEP

SEQ ID NO: 12880 - protein, 1075 aa, Eilema sororculum
MLPLFQALEPSINTSAQRLSDQVRVIQRNRMLNETVLETLRQECLRNICVTPAPAPAPASTAVINNDTCVAPDDTPIPVSIQYNEEIKEALECALREYRSVPVHVRPRLPRLPIHRRNIALVSALDSLLPRYLENSENLGDTHSILYCTAVAACRMAGAKFPIKDPAIRPKSAIPAWQCRIERRVAEARVLIGKLICFRSGNTRPRVMRYVTRAFAGTDISPQDYTSRVTERIDFLKQKVYAWANRIRRYKRRVDRYTVNHMFQRDQRWVYRSWERTDESVDDVRRPNAEATNAFWRSIWSMPVSHTEGDWMREVERACETIPEMEEIYIDATDVDCAVRSLSNWKSPGPDGLHNFWLKWLRSSHVVLASQFQSAIESGTLPAFMTTGVTHLLHKTGSTLEPNNYRPITCLPTVYKLLTSILRAKINNHINNNSIMCASQNGCRNGARGTKELLLIDMAISQQARRNRKDLTACWIDYKKAFDSVPHTWLLRVLELYKVNTTLCTFLRSCMGQWRTVLFYPGCRQALGGGVPITIERGIFQGDSLSPLWFCLALNPLSTLLVNSGLGYRLRREGQMVSHLFYMDDLKLFAHTNPQLIALLKVTETFSNSIKMAFGVDKCAVIHVKRGRVVESEGIQLSDSTNLRLLLVTETYKYLGMSQALCINEVDMKQMLQERFFGRLKKVLNSLLSGGNKVRACNSWVMPLLMYSFGILRWTQTELDTIDRKVRTQLTAFRMHHPRSSVMRLYIPRKCGGRGFLNAKTLHNREVCNLRDYFLKSNVDMHRDVVNVDTGLTPLGLAKENWRRPTIVSTDSRREVWQSKELHGRFYRALHRPEVDLLASVSWLRFSDLFGETEGFVCAIADEVIKTNNYRKYIMRDGTIDICRACHQPGESLRHITSGCSRLANGEYLHRHNQVARIIHQRLALKYNLVKVEVPYYKYVPEPVLQNSHITLYWDRSIITDRTVVANKPDIVVIDRSERRALIVDVTIPHDENLVKAEKDKQVKYLDLAHEVVDMWNVDSAIIVPIVVSVNGLIAKSLDQHLKRLGLDGWVKGQMQKAVLLDTARIVRKFLSLEP

SEQ ID NO: 12881 - protein, 1192 aa, Eilema sororculum
MLTRAQAKRNGSAPITSPDSSLSSAAQPPTVEPAASSSSSSDEFFSPPTSPTPVRRPGRGRPPTCLGPRRPPASNGAPATGGDVHRMRWTNSINENVMRAYFAATEGGTNLSAYRTRMLPLFQALEPSINVSAQRLSDQVRVIQRNRMLNETVLETLRLECLRNICVTPAPVPVPASTVELNDDTCVAPDDTPIPVSIQYNEEIKEALECALREYRSMPVHVRPRLPRLPIHRRNIALVSALDSLLPRYLENSENLGDTHSILYCTAVAACRMAGAKFPIKDPAIRPKSAIPAWQCRIERRVTEARVLIGKLICFRSGNTRPRVMRYVTRAFAGTDISPQDYTSRVTERIDFLKQKVYAWANRIRRYKKRVDRYTVNRMFQRDQRWVYRSWERTEESVDDVRRPDAEVTNAFWRSIWSVPVSHTEGDWMHEVKRACETIPEMEEINIDAIDVDCAVRSLSNWKSPGPDGLHNFWLKWLRSSHVVLASQFQSAVESGTLPAFMTTGVTHLLHKTGSTLEPNNYRPITCLPTVYKLLTSILRAKINNHINNNSIMCASQNGCRNGARGTKELLLIDMAISQQARRNRKDLTACWIDYKKAFDSVPHTWLLRVLELYKVNTTLCTFLRSCMGQWRTVLFYPGCRQALGGGVPITIERGIFQGDSLSPLWFCLALNPLSTLLVNSGLGYRLRREGQMVSHLFYMDDLKLFAHTNPQLITLLKITETFSNSIKMAFGVDKCAVIHVKRGRVVESEGIQLSDSTNLRSLLVTETYKYLGMSQALCINEVDMKQMLQERFFGRLKKVLNSLLSGGNKVRACNSWVMPLLMYSFGILKWTQTELDTIDRKVRTQLTAFRMHHPRSSVMRLYIPRKCGGRGFLNTKTLHNREVCNLRDYFLKSNVDMHRDVVNVDTGLTPLGLAKENWRRPTIVSTDSRREVWQSKELHGRFYRALHRPEVDLLASVSWLRFSDLFGETEGFVCAIADEVIKTNNYRKYIMRDGTIDICRACHQPGESLRHITSGCSRLANGEYLHRHNQVARIIHQRLALKYNLVEFEVPYYRYVPEPVLENTHITLYWDRSIITDRTVVANKPDIVVIDRSERRALIVDVTIPHDENLVKAEKDKQVKYLDLAHEVVDMWNVDSAIIVPIVVSVNGLIAKSLDQHLKRLGLDGWVKGQMQKAVLLDTARIVRKFLSLEP

SEQ ID NO: 12882 - protein, 1193 aa, Eilema depressum
MLTRAQARRNASAPATPPDSSLSSAAQPPPTEPAASSSSSSDEFFSPPTSPTPVRRPGRGRPPICLGPRRPPASNRAPAAGGDVHRMRWTPSINENVMRAYFAATEGGTNLSAYRTRMLPLFQALEPSVNTSSQRLSDQVRVIQRNRMLNETVLETLRQECLRNICVTPAPAPASTPAPVPVSHMNEETGDDTLIPVSIQYNEQIKEALECALREYRSMPLNDRPRLPRLPIHRRNMTLVGALDSLLPGYLDNSENLGDTHSILYCTAVAACRMAGVKFPNKDPAIRPKSTIPAWQCRIERRVAEARVLISKLICFRSGNTRPRVMRYVTRAFAGTGISPQEYTSWITERIDFLKQKVCAWANRIRRYRKRVDRFTVNRMFRRDQRWVYRSWEQPDESVDDVRRPEAAATNTFWRSIWSVPVSHIEGDWMCEVERACESIPEMEDIYIDAIDVDCAVRPLSNWKSPGPDGLHNFWLKWLRSSHALLASQFQSAVESGTLPAFMTTGVTHLLHKTGSTLEPNNYRPITCLPTVYKLLTSILRVKINNHINNNSIMCASQNGCRNGARGTKELLLIDMAISQQARRRTKDLAACWIDYKKAFDSVPHTWLLRVLELYKVNATLCTFLRSCMRQWRTVLFYPGCCQALGDGEPITIERGIFQGDSLSPLWFCLALNPLSTLLVNSGLGYRLRREGQMVSHLLYMDDLKLFAHTNPQLMALLKITENFSNSIKMGFGVEKCAVIHVKRGRVVESQGIQLSDSTSLRSLLVTETYKYLGMSQALCINEAGMKQMLQERFFGRLKKVLNSLLSGGNKVRACNSWVMPLLMYSFGILKWTQTELDTIDRRVRTQLTAFRMHHPRSSVMRLYIPRKCGGRGFLNAKTLHNREVCNLRDYFLKSNVDMHRDVVSVDTGLTPLGLAKENWRRPIVVGTDSRREVWQSKELHGRFYRALHRPEVDLLASVSWLRFGDLFGETEGFVCAIADEVIKTNNYRKYIMRDGTIDICRACHQPGESLRHITSGCSRLANGEYLHRHNQVARIIHQRLALKYNLVELEVPYYRYVPEPVLENSHITLYWDRSIITDRTVVANKPDIVVIDRSERRALIVDVTIPHDENLVKAEKDKQVKYLDLAHEIVDMWNVDSAIIVPIVVTVNGLIAKSLDQHLKRLGLDGWVKGQMQKAVLLDTARIVRKFLSLEP

SEQ ID NO: 12883 - protein, 1212 aa, Ptilodon capucinus
MTDAPRRNPRRLCRQRTVNEPNAQSTPPDPSPRSASPSPASIIRTSVTAVASSESDEYFSPPTSPPPVRQQRGRPPGHLGLLGQPAPNRVLVPSGVVRRMRWTSSINENVMRAYYEATEGGTNLTAYRNRMLPLFQSLEPAVNVSAQRLSDQVRVIQRGNMLADTVLDRLRSEMQSRRVVPVASSQPAAQPVASATVTSRLAADSDVDRDNAPINVSNQYNELLRSTLEDVVRVYRSMPNHLRPRIPRLPMHKGNRALVGALDSLLSIYFNSSDNLADTHSILYCAAITVCRVARVKVFNTDTATRPKPAVPTWQCRIERRISEARALIGKLSCFREGNTRPRVMRFVKRAFAGTDVSPREYISRVTERIDFLKQKIYAWANRIRRYKVRVDRYSQNSMFQRDQRWVYRSWERPSEPVSELQRPDDNATTTFWRDIWSVPVTHYEGDWIGDVERMCEPIKEMEAISIGPLDVANAVRSLPNWKAPGPDGLHNFWLKWLRSSHVRLASQFQSALQSGSLPEFITTGVTHLLHKTGSTTDPKNYRPITCLPTIYKTLTSILRAKIARHVEDNSIMSASQNGCRSGSRGTKELLLIDMTICQQARRNRKDLSTCWIDYKKAYDSVPHTWLVRVLELYKIDTTLRTFLESCMRQWKTVLLCPGSRQILGNGEPIRIERGIFQGDSLSPLWFCLALNPLSTLLEESGFGFRLRRGGQVISHLLYMDDLKLFAPTALQLTGLLKVTETFSNSIRMEFGVDKCAVMHAKQGRLVESEGIQLSDSIQLRSLAATETYKYLGMSQGLGISETDMKQLLRDRFLGRLKKVLKSLLSGGNKVRAYNGWVMPVLMYSFGILKWTQTELDTLDRTVRTTLTSYRMHHPRSSVMRLYIPRKCGGRGFLNVKTLHNREICSLREYFLRADGEMHVDVVAVDNGLTPLSLAKENWRKPVVLTTDDRRLVWQGKELHGRYYRALHGPDVDLAASVAWLRFGDLFGETEGFVCAIMDEVVMTNNYRKYILRDGTIDICRACHRPGESLRHIISGCSRLANGQYLHRHNQVARIIHQQLALKYRLVISEVPYYRYEPQPVLEEGHISLYWDRSIITDRTIVANKPDIVLIDRQERRAMIVDITVPHDENLVKAEKDKESKYLDLAHEVVDMWDIDAAIIVPIVVSAHGLLAKSLDKHLKRLALGGWIKGQIQKAVLLETARIVRKFLSLEP

SEQ ID NO: 12884 - protein, 1113 aa, Ptilodon capucinus
MRWTSSINENVMRAYYEATEGGTNLTAYRNRMLPLFQSLEPAVNVSAQRLSDQVRVIQRGNMLADTVLDRLRSEMQSRRVVPVASSQPAAQPVASATVTSRLAADSDVDRDNAPINVSNQYNELLRSTLEDVVRVYRSMPNHLRPRIPRLPMHKGNRALVGALDSLLSIYFDSSDNLADTHSILYCAAITVCRVARVKVFNTDTATRPKPAVPAWQCRIERRISEARALIGKLSCFREGNTRPRVMRFVKRAFAGTDVSPREYISRVTERIDFLKQKIYAWANRIRRYKVRVDRYSQNSMFQRDQRWVYRSWERPSEPVSELQRPDDNATTTFWRDIWSVPVTHYEGDWIGDVERMCEPIKEMDAISIGPLDVANAVRSLPNWKAPGPDGLHNFWLKWLRSSHVRLASQFQSALQSGSLPEFITTGVTHLLHKTGSTTDPKNYRPITCLPTIYKTLTSILRAKIARHVEDNSIMSASQNGCRSGSRGTKELLLIDMTICQQARRNRKDLSTCWIDYKKAYDSVPHTWLVRVLELYKIDTTLRTFLESCMRQWKTVLLCPGSRQILGNGEPIRIERGIFQGDSLSPLWFCLALNPLSTLLEESGFGFRLRRGGQVISHLLYMDDLKLFAPTALQLTGLLKVTETFSNSIRMEFGVDKCAVMHAKQGRLVESEGIQLSDSIQLRTLAATETYKYLGMSQGLGISETDMKQLLRDRFLGRLKKVLKSLLSGGNKVRAYNGWVMPVLMYSFGILKWTQTELDTLDRTVRTTLTSYRMHHPRSSVMRLYIPRKCGGRGFLNVKTLHNREICSLREYFLRADGEMHVDVVAVDNGLTPLSLAKENWRKPVVLTTDDRRLVWQGKELHGRYYRALHGPDVDLAASVAWLRFGDLFGETEGFVCAIMDEVVMTNNYRKYILRDGTIDICRACHRPGESLRHIISGCSRLANGQYLHRHNQVARIIHQQLALKYRLVTSEVPYYRYEPQPVLEEGHISLYWDRSIITDRTIVANKPDIVLIDRQERRAIIVDITVPHDENLVKAEKDKESKYLDLAHEVVDMWDIDAAIIVPIVVSAHGLLAKSLDKHLKRLALGGWIKGQIQKAVLLETARIVRKFLSLEP

SEQ ID NO: 12885 - protein, 1203 aa, Agrochola circellaris
MLTRSATRRARPPPPDSSLSSALPPPVSSPIISAVTTPVAVVASSSSDEYFSPPTSPTPVRRQGRGRPPRSLGLRGQPAPNRVPAAGGCVRRMRWTQNVNENVMRAYFGATEGGSNLTAYRGRMLSLFQVLEPAVNVSAQRLSDQVRVIQRNHMLDDAVLDRLRLESRNNRVTPASPLVAVQLQNSPSATPRADHVGEEDDDGVISVSSQCNARLRNALEDAFRDYRSTPPGLRPRLPRLPMHKKNKALVCTLDSLLSNYFDGSKDLADTHSILYCAAVAACRVAHVKFPSSDRAPRPKPAVPAWQCRIERRIGEARVLIGKLICFREGNTRPRVMRFVKRAFSGTDTSSRDYLARVTERIDFLKQKICAWANRIRRYRRRVERYTQNRTFQSDERWVYRTWERLDQGVIDTRLPDDDAMCSFWRSIWSAPVNHTEGDWTGKIERACERIPEMGAITISPQDVACAVRPLPNWKSPGPDGLHNFWIKWFQRSHARLASQFQSALESGSLPQFLTTGITHLLHKSGSTAEPKNYRPITCLPTVYKVFTSILRTKINKHIDTNSIMSASQNGCKNGSRGTKELLLIDMAISQQVRRSRRDLSTCWIDYKKAYDSVPHTWLMRVLELYKVDATLRTFLISCMGQWRTVLRYPGCRQIQRNSEPIRIERGIFQGDSLSPLWFCLALNPLSTLLEDSGLGYRLRRGGQVISHLLYMDDLKLFAPNNLQLVELLKVTETFSSAIRMEFGVDKCAVMHVKRGGIVESGGTQLSDSIHLRSLSSIETYKYLGMSEALGINTADMKQSLRERFFNRLNKVLNSLLSGGNKVRAFNGWVMPVLMYSFGILKWTQTELDALDRRVRTLLTVNRMHHPRSSVMRLYIPRKCGGRGFLNAKTLHNREVCSLREYFLEADVGMHRDVVSVDKGLTPLSLANENWRKPIVLDTKDRREVWQSKELHGRFYRALHGPDVDLLASVSWLRFGDLFGETEGFVFAIMDEVMMTNNYRKYIVKDGTVDICRACHRPGESIRHIISGCSRLANGDYLHRHNLVARIIHQQLALKYSLVESEVPYYRYMPDPVLENGNITLYWDRSIITDRTIVANKPDIVVIDRLERRTMIIDIAVPHDENLVKAEKDKQIKYLDLAREVVDMWDVDTAVIVPIVVTANGIIAKSLDQHLRRLSLGSWIKGLIQKAVLLDTARIVRRFLSQEP

SEQ ID NO: 12886 - protein, 980 aa, Hydraecia micacea
MPILPKDDTEGIRTRSQRQQETDQRRFGGAAPQMSEGQLPTTEAGPSAAAPGSSAPDLAALMMMLQEQARRQEEQARRQEEQARRLEEQLQRDKEEQARRQEEQARRQEEQARRQEEQALRQEEQARRLEEQLQRDKEEQARRQEEQMLLMKDLHATFGKDMKEVKDKVAQHDNRLSEAETRIDQVNNRVDNVMADVKKTVMADVKKTLDYLHLGDGIAAPVATTPSLRGFKVPPLIIIIIIRQSVRCLTGNLQPDGLHNFWIKWFKRSHVRLASQFQSALESGSLPQFLMTGITHLLYKSGSTADPKNYRPITCLPTVYKVLTSILRAKINKHIDTNSIMSVSQNGCKNGSRGTKELLLIDMTINQQVRRSRKDLSTCWIDYKKAYDSVPHTWLMRVLELYKVDTTLCTFLMSCMGQWRTVLRYPGCRNIQRNSEPIRIERGIFQGDSLSPLWFCLALNPLSTLLEDSGLGYRLRRGGQVISHLLYMDDLKLFAPNNLQLMELLKITETFSSAIRMEFGVDKCAVMHVKRGEIVESVGNQLSDSTNLRALSASDTYKYLGMSEALGINVTDMKQSLKERFFGRLKKVFNSLLSGGNKVRAFNDWVMPVLMYSFGILKWTQTELDALDRKVRTLLTANRMHHPRSSVMRLYIPRKCGGRGFLNAKTLHNREICSLREYFLETDVGMHRDVVVVDNGLTPLSLGKENWRKPVVLDTNDRMEVWQSKELHGRFFRALHGLDVDLLASVAWLRFGDLFGETEGFVCAIMDEVMMTNNYRRFIVKDGTVDICRACHRPGESIRHIISGCSRLANGEYLHRHNLVARIIHQQLALKYSLVESEVPYYRYVPDPVLENGNITLYWDRSITTDRTIVANKPDIVVMDRLERRAMIVDITIAHDENLVKAEKDKQIKYLDLAREVVDMWDVDSAIIVPIVVTANGLIAKSLDQHLRRLSLASWIKGLIQKAVLLDTARIVRRFLSLEP

SEQ ID NO: 12887 - protein, 1201 aa, Hydraecia micacea
MLTKSATARRARIPPPDSSLSSASPPAPLVSSPTVSAVMTPAAAVASSSSDEYFSPPTTPPPARRRGGRRPPDGLGPRGPPASDRVPAPGGSVQRMRWTRSINENVMRSYYGATEGGSNLTAYRVRMLSLFQVLEPAVNVSAQRLSDQVRVIQRNHMLDDTVLDRLRNEIQSSHAIAPQSQTAVILPQSNTSHADEGSNDRATNVSTQCNEELRSALEDAIQEYRFMSPELRPRLPRLPMHNKNRALVAVLNSQLSKYFDDCEDLTDTHSILYCAAVAACRVAHVKFTNDSRATRPKPAVPAWQCRIERRIGGARALIGKLICFREGNTRPRVMRFVRRAFLGTDISPQDYTSCVTERIDFLKQKVYAWANRIRRYKRRVERYTQNRTFQSDERWVYRDWERPDQSVADTCLPDDDAMCSFWRSIWSVPVSHTEGDWARDVERACDPIPEMEAITICPQDVARAVRPLPNWKSPGPDGLHNFWIKWFSRSHARLASQFQTALESGSLPQFLTTGITHLLHKSGSTAEPKNYRPITCLPTVYKVLTSILRAKINKHIDTNFIMSASQNGCRNGSRGTKELLLIDMTISQQVRRFRKDLSTCWIDYKKAYDSVPHTWLMRVLELYKVDTTLRTFLMSCMGQWRTVLRYPGCRNIQRNSEPIRIERGIFQGDSLSPLWFCLALNPLSTLLEDSGLGYRLRRGGQVISHLLYMDDLKLFAPNNLQLMELLKVTQTFSNAIRMEFGVDKCAVMHVKRGEIVESVGNQLSDSTNLRALSASETYKYLGMSEALGINVTDMKKSLKERFFGRLKKVLNSLLSGGNKVRAFNGWVMPVLMYSFGILKWTQTELDALDRRVRTLLTANRMHHPRSSVMRLYIPRKCGGRGFLNSKTLHNREICSLREYFLETDVGMHRDVVMVDKGLTPLSLAKENWRKPVVLDTNDRMEVWQSKELHGRFFRALHGPDVDLLASVAWLRFGDLFGETEGFVCAIMDEVMMTNNYRRFIVKDGTVDICRACHRPGESIRHIISGCSRLANGEYLHRHNLVARIIHQQLALKYSLVESEVPYYRYVPDPVLENGNITLYWDRSIITDRTIVANKPDIVVVDRSERRAMIVDITVPHDENLVKAEKDKQIKYLDLAREVVDMWDVDSAIIVPIVVTANGLIAKSLDQHLRRLSLASWIKGLIQKAVLLDTARIVRRFLSLEP

SEQ ID NO: 12888 - protein, 989 aa, Amphipyra tragopoginis
MRSALEDALREFRSTPPELRPRLPRLPMHNKNRALVCALDLLLSNVFESSEDLGDTHSILYCAAVAACRVAHVKFPNDNRATRPKSAVPAWQCRIERRIDEARVLIGKLTCFREGNRRPRVMRFVRRAFSGTDIGPGEYVSRITERIDFLKHKVYAWANRIRRYRRRVDRYTQNRIFQSDQRWVYRTWERPDQGVSDAHLPDNDVMNAFWRNIWSVPVTHTEGDWMQEVQRACEPIQEMGAITIGPQDVASAVRPMPNWKSPGPDGLHNFWIKWLRSSHARLASQFQSSLESGSLPSFLTTGVTHLLFKSGSTAEPKNYRPITCLPTVYKLLTSILRAKLNHHIDSNAIMCATQNGCKNGSRGTKELLLIDMAISQQVRRSRKDLSTCWIDYKKAYDSVPHTWLMRVLELYKINATLRTFLMSCMGQWRTVLHYPGCRQIQGNGELIRIERGIFQGDSLSPLWFCLALNPLSTLLEGSGLGYRLRRGGQVISHLLYMDDLKLFAPNNLQLLELLKVTETFSNSIRMEFGVDKCAVMHVKRGRIMESVGTQLSDFIHLRSLSSTETYKYLGMSEALGINEADMKQSLRERFFGRLIKVLKSLLSGGNKVRAFNGWVMPVLMYSFGILRWTQTELDALDRRVRTLLTAYRMHHPRSSVMRLYIPRKCGGRGFLNAKTLHNREVCSLREYFSQADVGMHRDVVAVDKGLTPLSLAKENWRKPVVLDTNGRRDVWRSKELHGRFYRAFHGPDVDFLASVAWLRFGDLFGETEGFVCAIMDEVMMTNNYRKYIVKDGTVDICRACHCPGESIRHIVSGCSRLANGEYLHRHNLVARIIHQQLALKYNLVDTEVPYYRYVPDPVLENGHVTLYWDRSIITDRTIVANKPDIVVIDRLERRTVIVDITVPHDENLVKAENDKKIKYLDLAHEVVDMWDVDSAVIVPIVVTANGLIAKSLDQHLMRLSLGSWIKGLIQKAVLLDTARIVRKFLSLEP

SEQ ID NO: 12889 - protein, 1200 aa, Amphipyra tragopoginis
MLTRSKARARDAHPPPPDSSPSSASQQQGLDPASPAAAVASSSSDEYYSPPSSPPPARRRGGTRPPGGLGLRGPLASDRVPAPGGIVPRMKWTQKINESVMRAYYGATEGGTNLTAYRGRMLSLFQVLEPAVNVSAQRLSDQVRVIQRGHMLDDTVLDRIRSEVQSSPVISPSPQVLEQSQNLAATLPRPNPADEEDDDRATNVSTQCNEELRSALEDAMREYRYTRSDLRPRIPRLPMHRKNRALVCALDSLLSNYFDGSEDLGDTHSILYCAAVAACRVAHVKFIDNERVTRPKNAVPAWQCRIERRIAEARALIGKLVCFREGNTRPRVMRFVRRAFSGTDVSPREYMSRVTERIDFLKQKVYAWASRIRRYRRRVDRYTQNRLFQSDERWVYRTWERPDQRVSDTHLPDNDVISAFWRNIWSVPVTHTEGDWMQEVQRACEPIQEMGDIIISPQDVASAVRPMSNWKSPGPDGLHNFWLKWLRSSHACLASQFQSSLESESLPQFLTTGVTHLLHKSGSTAEPKNYRPITCLPTVYKLLTSILRSKINFHIENNCIMSPSQNGCRNGSRGTKELLLIDMAISQQVRRTRKDLSTCWIDYKKAYDSVPHTWLMRVLELYKVNTTLCAFLTSCMRQWRTVLRYPGCRQIQGIGEPIRIERGIFQGDSLSPLWFCLALNPLSTLLEGSGLGYRLRRGGQVISHLLYMDDLKLFAPNKLQLLELLKVTETFSNSIRMEFGVDKCAVMHVKRGRIMESAGTQLTDSIHLRSLSSTETYKYLGMSEALGINGTDMKQSLRERFCGRLKKVLNSLLSGGNKVRAFNGWVMPVLMYSFGILKWTQTELDALDRRVRSLLTANRMHHPRSSVMRLYIPRKCGGRGFLNAKTLHNREVCSLREYFSQADVGMHRDVVAVDKGFTPLSLAKENWRKPVVLDTNDRREVWRSKELHGRFYRALHGPDVDFLASVAWLRFGDLFGETEGFVCAIMDEVMMTNNYRKYIVKDGTVDICRACHCPGESIRHIVSGCSRLANGEYLHRHNLVARIIHQQLALKYNLVDAEVPYYKYVPDPVLENGHITLYWDRSIITDRTIVANKPDIVVIDRSERLTMIVDITVPHDENLVKAEKDKEIKYQDLAHEVVAMWDVDSAIIVPIVVTANGLIAKSLDQHLKRLSLGSWIKGLVQKAVLLDTARIVRKFLSLRP

SEQ ID NO: 12890 - protein, 1206 aa, Amphipyra tragopoginis
MLTRSRAKAQNTRPPSSASSLSSASQPPEPASIVNDVTPAAAVASSSSDEYFSPATSPSPPPARRRGRGRPPTCLGPRGPPASDRVPAPGGSVQRMRWTQSMNENCMRAYFGATEGGTNLTAYRGRMLSLFQALEPAVNVSAQRLSDQVRVIQRDHRLDDAALDRLRSEMQNSHAAPLPSQIRTQTLVPPAVPLESNYADEEGEDRAISAGTQYSEIMRSALEDALREFRSTPPELRPRLPRLPMHNKNRALVCALDSLLPNVFESSEDLGDTQSILYCAAVAACRVAHVKFPNDNRATRPKSAVPAWQCRIERRIDEARVLIGKLTCFREGNRRPRVMRFVRRAFSGTDIGPGEYASRVTERIDFLKQKVYAWANRIRRYRRRVDRYTQNRIFQSDQRWVYRTWERPDQGVSDTHLPDSDVMNAFWRNIWSVPVTHTEGDWMQEVQRACEPIQEMGAVTIGPQDVTSAVRPMPNWKSPGPDGLHNFWIKWLRSSHARLASQFQSSLESGSLPAFLTTGITHLLFKSGSTAEPKNYRPITCLPTVYKLLTSILRAKLNHHIDSNAIMCATQNGCKNGSRGTKELLLIDMAISQQVRRSRKDLSTCWIDYKKAYDSVPHTWLMRVLELYKVNATLRTFLMSCMGQWRTVLHYPGCRQIQGNGELIRIERGIFQGDSLSPLWFCLALNPLSTLLEGSGLGYRLRRGGQVISHLLYMDDLKLFAPNNLQLVELLKVTETFSNSIRMEFGVDKCAVMHVKRGRIMESVGTQLSDSIHLRSLSSTETYKYLGMSEALGINEADMKQSLRERFFGRLIKVLKSLLSGGNKVRAFNGWVMPVLMYSFGILRWTQTELDALDRRVRTLLTAYRMHHPRSSVMRLYIPRKCGGRGFLNAKTLHNREVCSLREYFSQADVGMHRDVVAVDKGLTPLSLAKENWRKPVVLDAKGRMEVWRSKELHGRFYRALHGPDVDFLASVAWLRFGDLFGETEGFVCAIMDEVMMTNNYRKYIVKDGTVDICRACHCPGESIRHIVSGCSRLANGEYLHRHNLVARIIHQQLALKYNLVDTEVPYYKYVPDPVLENGHVTLYWDRSIITDRTIVANKPDIVVIDRLERRTMIVDITVPHDENLVKAENDKKIKYLDLAHEVVDMWDVDSAVIVPIVVTANGLIAKSLDQHLMRLSLGSWIKGLIQKAVLLDTARIVRKFLSLEP

SEQ ID NO: 12891 - protein, 1206 aa, Amphipyra tragopoginis
MLTRSRAKAQNTRPPSSASSLSSASQPPEPASIVSDVTPAAAVASSSSDEYFSPATSPSPPPARRRGRGRPPTCLGPRGPPASDRVPAPGGSVQRMRWTQSMNENCMRAYFGATEGGTNLTAYRGRMLSLFRALEPAVNVSAQRLSDQVRVIQRDHRLDDAALDRLRSEMQNSHAAPLPSQIRTQTLVPPAVPLESNYADEEGEDRAISAGTQYSEIMRSALEDALREFRSTPPELRPRLPRLPMHNKNRALVCALDSLLPNVFESSEDLGDTQSILYCAAVAACRVAHVKFPNDNRATRPKSAVPAWQCRIERRIDEARVLIGKLTCFREGNRRPRVMRFVRRAFSGTDIGPGEYASRVTERIDFLKQKVYAWANRIRRYRRRVDRYTQNRIFQSDQRWVYRTWERPDQGVSDTHLPDNDVMNAFWRNIWSVPVTHTEGDWMQEVQRACEPIQEMGAVTIGPQDVTSAVRPMPNWKSPGPDGLHNFWIKWLRSSHARLASQFQSSLESGSLPAFLTTGITHLLFKSGSTAEPKNYRPITCLPTVYKLLTSILRAKLNHHIDSNAIMCATQNGCKNGSRGTKELLLIDMAISQQVRRSRKDLSTCWIDYKKAYDSVPHTWLMRVMELYKVNATLRTFLMSCMGQWRTVLHYPGCRQIQGNGELIRIERGIFQGDSLSPLWFCLALNPLSTLLEGSGLGYRLRRGGQVISHLLYMDDLKLFAPNNLQLVELLKVTETFSNSIRMEFGVDKCAVMHVKRGRIMESVGTQLSDSIHLRSLSSTETYKYLGMSEALGINEADMKQSLRERFFGRLIKVLKSLLSGGNKVRAFNDWVMPVLMYSFGILRWTQTELDALDRRVRTLLTAYRMHHPRSSVMRLYIPRKCGGRGFLNAKTLHNREVCSLREYFSQADVGMHRDVVAVDKGLTPLSLAKENWRKPVVLDAKGRMEVWRSKELHGRFYRALHGPDVDFLASVAWLRFGDLFGETEGFACAIMDEVMMTNNYRKYIVKDGTVDICRACHCPGESIRHIVSGCSRLANGEYLHRHNLVARIIHQQLALKYNLVDTEVPYYKYVPDPVLENGHVTLYWDRSIITDRTIAANKPDIVVIDRLERRTMIVDITVPHDENLVKAENDKKIKYLDLAHEVVDMWDVDSAVIVPIVVTANGLIAKSLDQHLMRLSLGSWIKGLIQKAVLLDTARIVRKFLSLEP

SEQ ID NO: 12892 - protein, 1204 aa, Amphipyra tragopoginis
MITRSRAKTQSTQPPPSASSLSSASQPPEPASIVSDVTPAAAVASSSSDEYYSPPTSPPPARRRGRGRPPACLGPRGPPASDRVPASGGSVQRMRWTQSMNENCMRAYFGATEGGTNLTAYRGRMLSLFQALEPAVNVSAQRLSDQVRVIQRDHRLDGAALDRLRSEMRSSHVVPLQSQTAMQSQAPSVVAPRSIPADEESDDRVTNVSTQSNEQLRSALELAFREYRSTLPDLRPRLPRLPMNNKNKALMCALDSLLSSYFDGSEDLADTHSILYCAAVAACRVAHVKVDNNDRATRPKPAVPAWQCRIERRIGEARALIGKLICFREGNTRPRVMRFVRRAFSGTDTSPRDYMSRVAERIDFLKQKVYAWANRIRRYKRRVERYTQNRMFQRDQRWVYRAWERPDQGVRDVHLPDDDAMNSFWRSIWSVPVSHAEGDWMRDVERVCEPILDMGAISISPQDVASAARPLPNWKSPGPDGLHNFWLKWLRSSHARLASQFQSSLETGTLPQFLTTGVTHLLHKSGSTAEPKNYRPITCLPTVYKLLTSILRRKISSHIENNSIMSASQNGCRNGSRGTKELLLIDMAISQQVRRSRKDLSTCWIDYKKAYDSVPHTWLLRVLELYKVNTTLCAFLTSCMGQWRTVLRYPGCRQIQGIGEPIRIERGIFQGDSLSPLWFCLALNPLSTLLEGSGLGYRLRRGGQVISHLLYMDDLKLFAPNNLQLLDLLKVTETFSNSIRMEFGVDKCAVMHVKRGRIMESVGTQLSDSIQLRSLSSTETYKYLGMSEALGINEADMKQSLRERFYGRLKKVLKSLLSGGNKVRAFNGWVMPVLMYSFGILKWTQTELDALDRRVRTLLTAYRMHHPRSSVMRLYIPRKCGGRGFLNAKTLHNREVCSLREYFSQADVGVHRDVVAVDKGLTPLSLAKENWRKPAVLDTNGRKDVWRSKELHGRFYRVLHGPDVDFLASVAWLRFGDLFGETEGFVCAIMDEVMMTNNYRKYVVKDGTVDICRACHCPGESIRHIVSGCSRLANGEYLHRHNLVARIIHQQLALKYNLVDAEVPYYRYVPDPVLENGHITLYWDRSIITDRTIVANKPDIVVIDRSERRAVIVDITVPHDENLVKAENDKKIKYLDLAHEVVDMWEIDSAVIVPIVVTANGLIAKSLDQHLMRLSLGSWIKGLIQRAVLLDTARIVRKFLSLEP

SEQ ID NO: 12893 - protein, 1204 aa, Noctua pronuba
MLTRLRAKQLAHPPSPGSSLSSASQPPGRATSVSTLSPVAAVASSSSDEFFSPPSTPPPPQRRRGRGRPPAGLGPRGQQAPNRVPAAGGNVSRMRWTQSINEQVMRAYYGATEGGSNLTAYRGRMLSLFQVLEPTVSVSAQRLSDQVRVIQRNHMSDDTVLDRLRSESRSNPVTPASPMIAGLLQSATSTSPRSDHGGEEDDSEVISVSTQCNAQLRSALEGAFREYRSTPPELRPRLPRLPMHKKNKALMCALDSQLSNYFDSSKDLADTHSILYCGAVAACRVAHVKFPNNDRATRPKLAVPAWQCRIERRIGEARALIGKLICFREGNTRPRVMRFVRRAFSGIDITFRDYLARVTERIDFLKQKICAWASRIRRYKRRVERYTQNRTFQSDERWVYRAWERPDQGVTDTRLPGDDAMCLFWRSIWSVPVSHTEGDWTREVEQACDPIQEMGAIIISPQDVACAVRPLPNWKSPGPDGLHNFWIKWFQRSHACLASQFQLALESGSLPQFLTTGITHLLHKSGSTAEPKNYRPITCLPTVYKVLTSILRAKINHHIDSNSIMSASQNGCRNGSRGTKELLLIDMAISQQVRRSRKDLSTCWIDYKKAYDSVPHTWLMRVLELYKVDATLRTFLMSCMRHWRTVLRYPGCRQIQRNSEPIRIERGIFQGDSLSPLWFCLALNPLSTLLEGSGLGYRLRRGGQVISHLLYMDDLKLFAPNNLQLMKLLKVTETFSSAIRMEFGVDKCAVMHVKRGEIMESVGTQLSDSIHLRSLTSTETYKYLGMSEALGINTADMKQSLRERFFGRLNKVLGSLLSGGNKVRAFNGWVMPVLMYSFGILKWTQTELDALDRRVRALLTANRMHHPRSSVMRLYIPRKCGGRGFLNAKTLHNREVCSLREYFLEADVGMHRDVVSVDKGLTPLSLANENWRKPKVLVTNDRKEVWQGKELHGRFYRALHGPDVDFLASVSWLRFGDLFGETEGFVCAIMDEVMMTNNYRKYIVKDGTVDICRACHRPGESIRHIISGCSRLANGEYLHRHNLVARIIHQQLALKYNLVQSEVPYYKYAPDPVLDDGNITLYWDRPVVTDRTIVANKPDIVVIDRLERRAMIVDITVPHDENLVKAEKDKQFKYLDLAREVVDMWDVNTAVIVPIVVSANGLIAKSLDQHLRRLALGSWIKGLIQKAVLLDTARIVRRFLSQEP

SEQ ID NO: 12894 - protein, 1204 aa, Noctua pronuba
MLTRRRAKLLETHPPSPGSSLSSASQPPGRATSVSAASPVAAVASSSSDEFFSPPSTPPSPRRRRRRPPAGLGPRGQQAPNRIPAAGGNVSRIRWTQSMNENVMRAYYGATEGGINLTAYRCRMLSLFQALEPAVNVSAQRLSDQVRVIQNNHRLDDATLDRLRSELRISPASNPLPSQNVTHVPAALPLRANQHAEEEDDRAVSADNLCNEELRSALEDAIREYRFTSPDLRPRLPRLPMNKKNRALVCALDALLPNFIESSANLCDTHSILYCTAIAACRVANVKFPNTDSATRPKSAVPVWQCRIERRINEARVLIGKLICFREGNTRPRVMRFVRRAFSGTDVSPREYMSRVTERIDFLKQKVYAWANRIRRYRRRVDRYTQNRMFQSDERWVYRIWERPVTIQGVTDAHLPDNDAMSAFWRSIWSVPVSHTEGDWMRVVEQACDSIPEMEAISISPLDVARAVRPLPNWKSPGPDGLHNFWIKWLQSSHACLASQFQSSLETGSLPSFFTTGVTHLLHKSGSTAEPKNYRPITCLPTVYKVLTSILRAKIVRHIDSNSIMSVSQNGCRNGSRGTKELLLIDMAISQQVRRSRRDLSTCWIDYKKAYDSVPHTWLRRVLELYKIDATLRTFLVSCMGQWSTVLLYPGCRQVLGNDEPIRIERGIFQGDSLSPLWFCLALNPLSTLLEDSGLGYRLRRGGQVISHLLYMDDLKIFAPSNLQLMELLKVTETFSSAIRMEFGVDKCAVMHVKRGEIMESVGTQLSDSIYLRSLSSTETYKYLGMSEALGINSADMKQSLKERFFGRLNKVLKSLLSGGNKVRAFNGWVMPVLMYSYGILKWTQTELDALDRKVRTLLTANRMHHPRSSVMRLYIPRKCGGRGFLNAKTLHNREVCSLREYFLETDVGMHRDVVSVDKGLTPLSLANENWRKPVVLDTNDRKEVWQSKELHGRFFRALHGPDVDLLASVSWLRFGDLFGETEGFVCAIMDEVIMTNNYRKYIVKDGTVDICRACHRPGESIRHIVSGCSRLANGEYLHRHNLVARIIHQQLALQYNLVGTEVPYYKYVPDPVLENGHATLYWDRSIITDRTILANKPDIVVIDRRERRAMIVDITVPHDENLVKAENDKKIKYLDLAHEVVDMWDVGSAIIVPIVVTVNGLIAKSLDQHLRRLSLRGWVNGLIQKAVLLDTARIVRRFLSLEP

SEQ ID NO: 12895 - protein, 1204 aa, Noctua pronuba
MITRSRAKQQKAHPPSPGSSLSSASQPPGRATSVSSVSPVAAVASSSSDEFFSPPSTPSPPRRRGRGRPPAGLGPRGQQAPNRVPAAGGNVSRMRWTQSINENVMRAYYGATEGGSNLTAYRGRMLSLFQVLEPGVSVSAQRLSDQVRVIQRNHMLDDTVLDRLRFDSRSNLVTPASPMIAVQLQNVSSAPPRSDHDGEEDDDEVISVSTQCNAQLRSALEGAFREYRSIPPELRPRLPRLPMHKKNKALVCALDSQLSTCFDSSKDLADTHSILYCGAVAACRVAHVKFPNNDRATRPKLAVPVWQRRIERRIGEARALIGKLICFREGNTRPRVMRFVRRAFSGTGISFRDYLARVTERIDFLKQKICAWANRIRRYKRRVERYTQNRTFQSDERWVYRAWERPDQGVTDTRLPDADAMCLFWRSIWSVPVSHTEGDWTREVEQACDPIPEMGAIIISPQDVACAVRALPNWKSPGPDGLHNFWIKWFQRSHARLASQFQSALESGSLPQFLTTGITHLLHKSGSTAEPKNYRPITCLPTVYKVLTSILRAKINHHIDSNSIMSASQNGCRNGSRGTKELLLIDMAISQQVRRSRRDLSTCWIDYKKAYDSVPHTWLMRVLELYKVDATLRTFLKSCMGHWRTVLRYPGCRQIQGNSEPIRIERGIFQGDSLSPLWFCLALNPLSTLLEGSGLGYRLRRGGQVISHLLYMDDLKLFAPNNLQLMKLLKVTETFSSAIRMEFGVDKCAVMHVKRGEIMESVGTQLSDSIHLRSLSSTETYKYLGMSEALGINTTDMKQSLRERFFGRLNKVLGSLLSGGNKVRAFNGWVMPVLMYSFGILKWTQTELDALDRRVRALLTANRMHHPRSSVMRLYIPRKCGGRGFLNAKTLHNREVCSLREYFLEADVGMHRDVVSVDKGLTPLSLANENWRKPRVLDTNDRKEVWQGKELHGRFYRALHGPDVDFLASVSWLRFGDLFGETEGFVCAIMDEVMMTNNYRKYIVKDGTVDICRACHRPGESIRHIISGCSRLANGEYLHRHNLVARIIHQQLALKYNLVESEVPYYKYAPDPVLDDGNITLYWDRSIITDRTIVANKPDIVVIDRLERRAMIVDITVPHDENLVKAEKDKLFKYLDLAREVVDMWDVSTAVIVPIVVSANGLIAKSLDQHLRRLSLGSWIKRLIQKAVLLDTARIVRRFLSQEP

SEQ ID NO: 12896 - protein, 1200 aa, Tinea trinotella
MLTRSRARNQSAQLTSSGSSLSSASQPPRSTPTVSPVISVAAVASSSSDECFSPPTTPPSARRRGGGRPPASLEPRGPSASGGVPATSGRVQRMRWTQSINENVMRSYFGATEGGISLTAYRGRMLTLFQVLEPAVNVSAQRLSDQVRVIQRNRMLDDVVLDRLRLESRSSHVSPVSPPVAVQLQPSALPRPNNIEENDDDVTISVSNQYNEQLRSALEDAFREYRSTPPGLRPRIPRLPMHKKNRALVCALDSQLVNHFKSSKDLADTHSILYCAAVAVCRVAHVQFPNNDRAARLAVPAWQCRIERRIGEARALIGKLISFREGNTRPRVMRFVRRAFSGTDISSRDYQTRVTERIDFLKQKIYAWANRIRRYKRRVERYTQNRTFQSNERWVYRAWERPDQDVSDMCLPDDDAMSLFWRNIWSVPVGHTEGEWTREVERACDLIPEMGAIIISPQDVACAVRPLSNWKSPGLDGLHNFWIKYFQRSHARLAAQFQSALELGSLPQFLTTGITHLLHKSGSTAEPKNYRPITCLPTVYKVLTSILRAKIDKHIDTNCIMSASQNGCRTGSRGTKELLLIDVAISQQVRRSRRDLSTCWIDYKKAYDSVPHTWLMRVLELYKVDAALRTFLVSCMGQWRTVLHYPGCRRILGNGEPIKIERGIFQGDSLSPLWFCLALNPLSTLLDGSGQGYRLRRDGQVISHLLYMDDLKLFAPNNLQLMKLLKVTETFSSAISMEFGVDKCAIMHVKRGEIMESVGTQLSDFIHLRSLCSTETYKYLGMSEALGINAVDVKQSLRDRFFGRLNKVLNSLLSGGNKVRAFNGWVMPVLMYSFGILKWTQTELDALDRRVRTLLTANRMHHPRSSVMRLYIPRKCGGRGFLNAKTLHNREVCSLREYFLKTDVGMHRDVVAVDKGLTSLSLANENWRKPVVLDANDRREVWQSKELHGRFYRALHGPDVDFLASVSWLRFGDLFGETEGFVCAIMDEVMMTNNYRKYIVKDGTVDICRACHRPGESIRHIISGCSRLANGDYLHRHNLVARIIHQQLALKYNLVESEVPYYRYVPDPVLENGNITLYWDRSIITDRTIVANKPDIVVIDRLERRTIIVDVAVPHDENLVKAEKDKQIKYLDLAREVVDMWEVDTAIIVPIVVTANGLIAKSLDEHLKRLSLGSWIKRLIQKAVLLDTARIVRRFLSQEP

SEQ ID NO: 12897 - protein, 1196 aa, Ochropleura plecta
MITRLAARQHARLPPPDSPLSSASPPPEPSLIVSAVTPAVAVASSSSDEYFSPPTTPPPACRRGGRRPPDGLGLRGPLASDRVPAPGGSVQRMRWTSSINENVMRSYYGATEGGNNLTAYRVRMLSLFQVLEPAVNVSAQRLSDQVRVIQRNRMLDDTVLDRLRTEMQSSQVITSSSQAVVPPQSHQLVSHADEVSNDMATNVSTQCNEEMRIALEGAIQEYRYISPELRPRLPRLPMHNKNRALVAVLDSQLSNYFDNCENLTDAHSILYCAAVAACRVAHVKFPDDGATRPKPAVPFWQCRIERRIGVARALIGKLICFREGNTRPRVMRFVRRAFAGTDISPPDYMSHITERIDFLKQKVYAWANRIRRYKRRVERYTLNRTFQSDERWVYRAWERPDQGVSDTHLPDDDAMCLFWRNIWSVPVSHTEGEWTREVERACDPIPEMGALTISPQDVACAVRPLPNWKSPGPDGLHNFWLKWIQRSHARLATLFQTALESGSLPKFLTTGITHLLHKSGSTTEPKNYRPITCLPTIYKVLTSILRAKITKHIDDNSIMSASQNGCRNGSRGTKELLLIDMAISQQVRRSRRHLSTCWIDYKKAYDSVPHTWLMRVLELYKVDATLCTFLSSCMRQWNTVLRYPGCRQIQRNSEPIRIERGIFQGDSLSPLWFCLALNPLSTLLEDSGLGYRLRRGGRVISHLLYMDDLKLFAPNDSQLMELLKVTETFSSAISMEFGVDKCAVMHVKRGEIVESVGTQLSDSIHLRSLSANETYKYLGMSEALGINVADMKQSLKERFFGRLRKVFNSLLSGGNKVRAFNGWVMPVLMYSFGILKWTQTELDALDRKVRTLLTAYRMHHPRSSVMRLYIPRSCGGRGFLNAKTLHNREICSLREYFLEADVGMHRDVVTVDKGFTPLSLAKENWRKPVVLDTNDRREVWQSKELHGRFFRALHGPDVDQPASVAWLRSGDLFGETEGFVCAIMDEVMMTNNYRRFIVKDGTVDICRACHRPGESIRHIISGCSRLANGEYLHRHNLVARIIHQQLALKYSLVESEVPYYRYEPDPVLEHGNITLYWDRSIITDRTIVANKPDIVVVDRSERRAMIVDITVPHDENLVKAEKDKQIKYIDLAREVVDMWDVDSAIIVPIVVSANGLIAKSLDQHLRRLSLGSWIKGLIQKAVLLDTARIVRRFLSL

SEQ ID NO: 12898 - protein, 961 aa, Ochropleura plecta
MHNKNRALVTVLDSQLSNYFDNCENLTDAHSILYCAAVAACRVAHVKFPDDGATRPKPAVPFWQCRIERRIGVARALIGKQICFREGNTRPRVMRFVRRAFAGTDISPPDYMSHITERIDFLKQKVYAWANRICRYKRQVERYTLNRTFQSDERWVYRAWERPDQGVSDTHLPDDDAMCLFWRNIWSMPVSHTEGEWTREVERACDPIPEMGALTISPQDVACAVRPLPNWKSPEPDGLHNFWLKWIQRSHARLATLFQTALESGSLPKFLTTGITHLLHKSGSTTEPKNYRPITCLPTIYKVLTSILRAKITKPIDDNSIMSASQNGCRNGSRGTKELLLIDMAISQQVRRSRRHLSTCWIDYKKAYDSVPHTWLMRVLELYKVDATLRTFLSSCIRQWNTVLRYPGCRQIQRNSEPIRIARGIFQGDSLSPLWFCLALNPLSTLLEDSGLGYRLRRGGRVISHLLYMDDLKLFAPNDSQLMELLKVTETFSSAISMEFGVDKCAVMHVKRGEIVESVGTQLSDSIHLRSLSANETYKYLGMSEALGINVADMKQSLKERFFGRLRKVFNSLLSGENKVRAFNGWVMPVLMYSFGILKWTQTELDALDRKVRTLLTAYRMHHPRSSVMRLYIPRSCGGRGFLNAKTLHNREICSLREYFLEADVGMHRDVVTVDKGFIPLFLAKENWRKPVVLDTNDRKDLWQSKELHGRFFRALHGPDVDQSASVAWLRSGDLFGETEGFVCAIMDEVMMTNNYRRFIVKDGTVDICRACHRPGESIRHIISGCSRLANGEYLHRHNLVARIIHQQLALKYNLVESRVPYYRYEPDPVLEHGNITLYWDRSIITDRTVVANKPDIVVVDRSERRAMIIDITVPHDENLVKAEKDKQIMYIDLAREVVDMWDVDSAIIVPIVVSANGLIAKSLDQYLRRLSLGSWIKGLIQKAVLLDTARIVRRFLSLEP

SEQ ID NO: 12899 - protein, 1200 aa, Hecatera dysodea
MLTRSRAQAQTAQATSSGSSLSSASQPPGPAPPVSPEIPVAAVASSSSDEYFSPPTTPPPARRRGRGRPPTSLGPRGPPASDRVPAIGGSVQRMRWTETINENVMRSYYGATEGGTNLTAYRGRMLSLFQVLEPAVNVSAQRLSDQVRVIQRNRMLDDAVLDRLRLESRNSRVSPASPPAAVQIQPSISPRPDHVSEDVDDGTISVSTQCNERLRSALEDAFREYRSTPPELRPRLPRLPMHKKNRALVCALDSQLSIYFDSSENLTDTHSILYCGAAAACRVAHVKFPNSDRVARPAVPAWQCRIERRIGEARALIGKLICFREGNTRRRVMRFVRRAFSGTDISPRDYLTRVTERIDFLKQKVYAWANRIRRYKRRVERYTQNRTFQGNERWVYRAWERPDQGVTDTRLPDDEAMLSFWRNIWSVPVSHTEGDWTREVERACDPIPEMGAINISPQDVARAVRPLPNWKSPGPDGLHNFWIKWFKGSHARLASQFQSALGSGSLPKFLTTGITHLLHKSGSTAEPKNYRPITCLPTVYKVLTSILRAKINNHIDNNSIMSASQNGCRNGSRGTKELLLIDVAISQQVRRSRRDLSTCWIDYKKAYDSVPHTWLMRVLELYKVDAVLRTFLMSCMGQWSTVLHYPGCRQTQANSEPIRIERGIFQGDSLSPLWFCLALNPLSTLLEGSGQGYRLRRGGQVISHLLYMDDLKLFAPNNLQLMKLLKVTETFSSDISMEFGVDKCAVMHVKRGEIMESVGTQLSDSILLRSLCSTETYKYLGMSEALGINATGVKQSLKERFFGRLNKVLNSLLSGGNKVRAFNGWVMPVLMYSFGILKWTQTELDALDRRVRSLLTANRMHHPRSSVMRLYIPRKCGGRGFLNAKTLHNREICSLREYFLEADVGMHRDVVAVDKGLTPLSLANENWRKPVVLDTNDRRVVWQSKELHGRFYRVLHGPDVDFLASVAWLRFGDLFGETEGFICAITDEVMMTNNYRKYIVKDGTVDICRACHRPGESIRHIISGCSSLANGDYLHRHNLVARIIHQQLALKYNLVESEVPYYRYAPDPVLENGNCTLYWDRSIITDRTIVANKPDIVVIDRLERRAMIVDIAVPHDENLVKAEKDKQSKYLDLAREVVDMWNVNTAVIVPIVVTANGIIAKSLDQHLKRLSLGSWIKGLIQKAVLLDTARIVRRFLSREP

SEQ ID NO: 12900 - protein, 1200 aa, Hecatera dysodea
MLTRSRTRCQNTRLTPSDSSLSSASQPPGPTPAVSPEIPVAAVASSSSDEYFSPPTTPPPARRRGRGRPPTSLGPRGPPASDRVPAIGGSVQRMRWTHSINENVMRSYFGATEGGTNLTAYRGRMLSLFQVLEPAVNVSAQRLSDQVRVIQRNRMLDDAVLDRLRLESRSSRVSPASPPAAVQIQPSISPRPDHVSEDVDDGTISVSTQCNERLRSALEDAFREYRSTPPELRPRLPRLPMHNKNRALVCALDSQLSIYFDSSENLTDTHSILYCGAAAACRVAHVKLPNSDRVARPAVPAWQCRIERRIAEARALIGKLICFREGNTRRRVMRFVRRAFSGTDISPRDYLTRVTERIDFLKQKVYAWANRIRRYKRRVERYTQNRIFQNNERWVYRAWERPDQGVTDTRLPDDEAMLSFWRNIWSVPVSHTEGDWTREIERACDSIPEMGAINISPQDVARAVRPLPNWKSPGPDGLHNFWIKWLTRSHARLASQFQSALESRSLPQFFTTGITHLLHKSGSTAEPKNYRPITCLPTVYKVLTSILRAKINDHIESNSIMSTSQNGCRSGARGTKELLLIDVAISQQVRRSRKDLSTCWIDYKKAYDSVPHTWLMRVLELYKVDAVLRAFLMSCMGQWRTVLHYPGCRQTQVNSEPIRIERGIFQGESLSPLWFCLALNPLSTLLEGSGQGYRLRRGGQVISHLLYMDDLKLFAPNNLQLMKLLKVTETFSSDISMEFGVDKCAVMHVKRGEIMESVGTQLSDSIHLRSLCSTETYKYLGMSEALGINATSVKQSLKERFFGRLNKVLNSLLSGGNKVRAFNGWVMPVLMYSFGILKWTQTELDALDRRVRSLLTANRMHHPRSSVMRLYIPRKCGGRGFLNAKTLHNREVCSLREYFLEADVGMHRDVVAVDKGFTPLSLANENWRKPVVLDTNDRREVWQSKELHGRFYRVLHGPDVDFLASVAWLRFGDLFGETEGFICAITDEVMMTNNYRKYIVKDGTVDICRACHRPGESIRHIISGCSSLANGDYLHRHNLVARIIHQQLALKYNLVESEVPYYRYAPDPVLENGNCTLYWDRSIITDRTIVANKPDIVVIDRLERRAMIVDIAVPHDENLVKAEKDKQSKYLDLAREVVDMWDVNTAVIVPIVVTANGIIAKSLDQHLKRLSLGSWIKGLIQKAVLLDTARIVRRFLSWEP

SEQ ID NO: 12901 - protein, 1109 aa, Mythimna impura
MRWTQSINENVMRAYYGATDGGNNLTAYRVRMLSLFQVLEPAVNVSAQRLSDQVWVIQRNHMLDDTVLDRLRTEMSNHAIAPSSQPVVPVMVPPSYHLSDHADEEITDMVTHVSAQCNNELRSALECAIREYRNMPLELRPRLPRLPMHNKNNVLVAALDLQLSNYFDDCEDLTDTHSIMYCAAVAACRVAHVKFPSCDVSTRPKPAVPAWQCRIERRIGGARALIGKLICFREGNTRPRVMRFVRRVFSGTDISPRDYMSRVTERIDFLKQKVYAWANRIRRYKRRVERYTQNRTFRSNERWVYRAWERPDQGVTDTRLPDDDAMSSFWRSIWSVPVSHTEGDWTREVERACDPIPQMGAIDISPQDVARAVRPLPNWKSPGPDGLHNFWIKWFTRSHARLAYQFQSALESGSLPQFLTTGITHLLHKSGSTAEPKNYRLITCLPTVYKVLTSILRSKINSHIDKNLIMSPSQNGCRNGSRGTKELLLIDMTISQQVRRFRKDLSTCWIDYKKAYDSVPHTWLMRVLELYKIDTTLRTFLMSCMRQWSTVLRYPGCRHIQRNSEPVRIERGIFQGDSLSPLWFCLALNPLSTLLENSGLGYRLKRGGQVISHLLYMDDLKLFGPNNLQLMELLKVTETFSSAIRMEFGVDKCAVMHVKRGEVVESVGTQLTDSINLRSLSPTETYKYLGMSEALGINITDMKQSLKERFFGRLKKVFNSLLSGGNKVRAFNGWVMPVLMYSFGVLKWTQTELDALDRRVRTLLTAYRMHHPRSSVMRLYIPRKCGGRGFLNAKTLHNREVCSLREYFLATDVGMHRDVVTVDKGLTPLSLANENWRKPVVLDTNDRREVWQSKELHGRFFRAFHGPDVDQLASVAWLRFGDLFGETEGFICAIMDEVIMTNNYRRFIVKDGTVDICRACHRPGESIRHIISGCSRLANGEYLHRHNLVARIIHQQLALKYSLVESEVPYYRYEPDPVLDNGHITLYWDRSIITDRTIVSNKPDIVVVDRSERRAMIVDISVPHDENLVKAEKDKQIKYIDLAREVVDMWDVDSAIIVPIVVSANGLIAKSLDQHLRRLALCGWIKALIQKAVLLDTARIVRRFLFLEP

SEQ ID NO: 12902 - protein, 1200 aa, Mythimna impura
MLTSAAARRARLPPPASSLSSASPPPESSPTVSAVTPAVAVASSSSDEYFSPPTSPPPARRRRGRRPPSGLGPRGPPASDRVPAPGGSVQRMRWTQSINENVMRAYYGATEGGNNLTAYRVRMLSLFQVLEPAVNVSAQRLSDQVRVIQRNHMLDDTVLDRLRTEMSNHAIAPSLQPVVPVMVPPSYHLSDHADEEITDMVTHVSTQCNNELRSALECAIREYRNMPLELRPRLPRLPMHNKNKALVAALDLQLSNYFDDCEDLTDTHSIMYCAAVAACRVAHVKFPSCDVSTRPKPAVPAWQCRIERRIGGARALIGKLICFREGNTRPRVMRFVRRAFSGTDISPRDYMSRVTERIDFLKQKVYAWANRIRRYKRRVERYTQNRTFRSNERWVYRAWERPDQGVTDTRLPDDDAMSSFWRSIWSVPVSHTEGDWTREVERACDPIPQMGAIDISPQDVARAVRPLPNWKSPGPDGLHNFWIKWFTRSHARLAYQFQSALESGSLPQFLTTGITHLLHKSGSTAEPKNYRPITCLPTVYKVLTSILRSKINSHIDKNLIMSPSQNGCRNGSRGTKELLLIDMTISQQVRRFRKDLSTCWIDYKKAYDSVPHTWLMRVLELYKIDTTLRTFLMSCMRQWSTVLRYPGCRHIQRNSEPVRIERGIFQGDSLSPLWFCLALNPLSTLLENSGLGYRLKRGGQVISHLLYMDDLKLFAPNNLQLMELLKITETFSSAIRMEFGVDKCAVMHVKRGEVVESVGTQLTDSINLRSLSPTETYKYLGMSEALGINITDMKQSLKERFFGRLKKVFNSLLSGGNKVRAFNGWVMPVLMYSFGVLKWTQTELDALDRRVRTLLTAYRMHQPRSSVMRLYIPRKCGGRGFLNAKTLHNREVCSLREYFLATDVGMHRDVVTVDKGLTPLSLANENWRKPLVLDTNDRREVWQSKELHGRFFRGFHGPDVDQLASVAWLRFGDLFGETEGFVCAIMDEVIMTNNYRRFIVKDGTVDICRACHRPGESIRHIISGCSRLANGEYLHRHNLVARIIHQQLALKYSLVESEVPYYRYEPDPVLDNGHITLYWDRSIITDRTIVANKPDIVVVDRSERRAMIVDISVPHDENLVKAEKDKQIKYIDLAREVVDMWDVDSAIIVPIVVSANGLIAKSLDQHLRRLALGGWIKALIQKAVLLDTARIVRRFLSLEP

SEQ ID NO: 12903 - protein, 868 aa, Mythimna impura
MRFVRRAFLGTGISPQEYMSRVTERIDFLKQKVCAWASRIRRYKRRVDRYSQNRMFQSDERWVYRAWERPEQNVIDGRRPDDFATITFWRNIWSVPVSHTEGDWMRDVERVCEAIPEMEKVVITPADVPKAVRPLPNWKSPGLDGLQNFWLKWFSNSHAPLASQFQSTLESGSLPEYLTTGVTHLLHKTGNPVEPKNYRPITCLSTVYKLLTSILRAKINRHIENNLIMSASQNGCRNGSRGTKELLLIDMAISQQARRSRKDLSTCWIDYKKAYDSVPHTWLMRVLELYKVDMTLRTFLESCMRQWKTVLRYPGCRPIQGNDEPIRIKRGIFQGDSLSPLWFCLALNPLSTLLEESGLGYRLRRGGQAISHLLYMDDLKLFAPSNLQLMELLKVTETFSSAIRMEFGVDKCAAMHVKRGEIMESEGIQLPDSIHLRSLSSTETYRYLGMSEALGINNADMKQSLKERFFGRLKKVLNSLLSGGNKVRAFNGWVMPVLMYSFGILKWTQTELDALDRRVRTLLTANRMHHPRSSVMRLYISRKCGGRGFLNAKTLHNREVCSLREYFLKTDVGMHRDVVAVDKGLTPLSMAKEDWRKPVILTTDDRKEIWKGKELHGRFYRALHEPDVDFLASVAWLRFSDLFGETEGFICAIMDEVILTNNYRRYIMKDGTVDVCRACHRPGESIRHIISGCSRLANGEYLHRHNQVARIIHQQLALKYNLVDSEVPYYKYVPDPVLENHHVTLYWDRSIITDRTIVANKPDIVVIDRLARRAVIVDVTIPHDENLVKAEKEKQIKYLDLAHEVVDMWNVDSAVIVPMVVTANGLIAKSFDDHLSKLSLRGWIKGLIQKAVLLDTARIVRRFLSLEP

SEQ ID NO: 12904 - protein, 1199 aa, Mythimna impura
MLTRSRAKKANTHPTSSGSSLSSASQPPGPAPTVSPEIPVAAVASSSSDEYFSPPTTPPPARRRGRGRPPASLGPRGPPASDRVLAAGGSVQRMRWTQSINENVMRSYFGATEGGSNLTAYSGRMLSLFQVLEPAVNVSAQRLSDQVRVIQRNRMLDDAVLDRLRLESSSRVSPASPQAAVQLLSNVSLRPDHVGEDDDDGAISVSNQCNVRLRSALEDAFREYRFTPAELRPRLPRLPMHKKNRALVCALDSQLSNCFDSSEDLTDTHSILYCAAVAACRVARVKFPNSDRVTRPAVPAWQCRIERRIGEARALIGKLICFREGNTRPRVMRFVRRAFSGTNITPRDYLPHITERIDFLKQKVYAWANRIRRYKRRVERYTQNRTFQRNERWVYRAWERPDQGVIDTRLPDDDAMCSFWRSIWSVPVSHTEGDWTREIERTCDLIPEMEPITISPQDVSRAVRPLPNWKSPGPDGLHNFWLKWFQRSHARLASQFQSALESGSLSQFLTTGITHLLHKSGSTAEPKNYRPITCLRTVYKVLTSILRTKINSHIETNSIMSASQNGCRNGSRGTKELLLIDVAISQQVRRSRRDLSTCWIDYKKAYDSVPHTWLMRVLELYKVDATLRTFLMSCMRQWRTALHYPGCRQIRESSEPIRIERGIFQGDSLSPLWFCLALNPLSTLLEGSGLGYRLRRGGQVISHLLYMDDLKLFASNNFQLMELLKVTETFSSAIRKEFGLDKGAVMHVKRGEIMESVGTQLSDSIYIRSLCSTETYKYLGMSEALGINAADMKLSLRERFFGRLNKVLNSLLSGGNKVRAFNGWVMPVLMYSFGILKWTQTELDALDRRVRSLLTANRMHHPRSSVMRLYIPRKCGGRGFLNAKTLHNREICSLREYFLKTDVGMHRDVVAVDKGLTPLSLVNENWRKPTVMDTNERRAVWQGKELHGRFYRALHGPDVDLLASVSWLRFGDLFGETEGFVFAIMDEVMMTNNYRKYIVKDGTVDICRACHRPGESIRHIISGCSHLANGDYWHRHNLVARIIHQQLALKYNLVESEVPYYRYVPDPVLENGSVTLYWDRSIITDRTIVANKPEIVVIDRLERRTMIVDIAVPHDENLVKAEKDKQTKYLDLAREVVDMWEVDRAVIVPIVVTANGLIAKSLEQHLRRLSLGSWIKGLIQKAVLLDTARIVRRFLSQEP

SEQ ID NO: 12905 - protein, 1200 aa, Mythimna impura
MLTRAAARRARLPPPASSLSSASPPPESSPTVSAVTPAVAVASSSSDEYFSPPTSPPPARRRRGRRPPSGLGPRGPPASDRVPAPGGSVQRMRWTQSINENVMRAYYGATEGGNNLTAYRVRMLSLFQVLEPAVNVSAQRLSDQVRVIQRNHMLDDTVLDRLRTEMSNHAIAPSSQPVVPVMVPPSYHLSDHADEEITDMVTHVSTQCNNELRSALECAIREYRNMPLELRPRLPRLPMHNKNKALVAALDLQLSNYFDNCEDLTDTHSIMYCAAVAACRVAHVKFPSCDVSTRPKPAVPAWQCRIERRIGGARALIGKLICFREGNTRPRVMRFVRRAFSGTDISPRDYMSRVTERIDFLKQKVYAWANRIRRYKRRVERYTQNRTFRSNERWVYRAWERPDQGVTDTRLPDDDAMSSFWRSIWSVPVSHTEGDWTREVERACDPIPQMGAIDISPQDVARAVRSLPNWKSPGPDGLHNFWIKWFTRSHARLAYQFQSALESGSLPQFLTTGITHLLHKSGSTAEPKNYRPITCLPTVYKVLTSILRSKINSHIDKNLIMSPSQNGCRNGSRGTKELLLIDMTISQQVRRFRKDLSTCWIDYKKAYDSVPHTWLMRVLELYKIDTTLRTFLMSCMRQWSTVLRYPGCRHIQRNSEPVRIERGIFQGDSLSPLWFCLALNPLSTLLENSGLGYRLKRGGQVISHLLYMDDLKLFAPNNLQLMELLKVTETFSSAIRMEFGVDKCAVMHVKRGEVVESVGTQLTDPINLRSLSPTETYKYLGMSEALGINITDMKQSLKERFFGRLKKVFNSLLSGGNKVRAFNGWVMPVLMYSFGVLKWTQTELDALDRRVRTLLTAYRMHHPRSSVMRLYIPRKCGGRGFLNAKTLHNREVCSLREYFLATDVGMHRDVVAVDKGLTPLSLANENWRKPVVLDTNDRREVWQSKELHGRFFRAFHGPDVDQLASVAWLRFGDLFGETEGFVCAIMDEVIMTNNYRRFIVKDGTVDICRACHRPGESIRHIISGCSRLANGEYLHRHNLVARIIHQQLALKYSLVESEVPYYRYEPDPVLDNGHITLYWDRSIITDRTIVANKPDIVVVDRSERRAMIVDISVPHDENLVKAEKDKQIKYIDLAREVVDMWDVDSAIIVPIVVSANGLIAKSLDQHLRRLALGGWIKALIQKAVLLDTARIVRRFLSLEP

SEQ ID NO: 12906 - protein, 1200 aa, Mythimna impura
MLTRAAARRARPPPPASSLSSASPPPEPCLTVNAVTPAVAAVSSSSDEYYSPPTTPPPTRRRGERRPPACLGSRGPPASDRVPATGGCVSRMRWTQSINENVMRAYYGATEGGNNLTAYRVRMLSLFQVLEPAVNVSAQRLSDQVRVIQRNHMLDDTVLDRLRTEMGSHAIASSSQTAVPSQVSPSNHLPNHADEESTDMVTHVSTQCSNELRSALECAIREYRNMPLELRPRLPRLPMCNKNKALVAALDSQLSNYFDDCEDLTDTHSIMYCAAVAACRVAHVKFPNSDVATRPKPAVPAWQCRIERRIGGARALIGKLICFREGNTRPRVMRFVRRAFSGTDISPRDYMSCVTERIDFLKQKVYAWANRIRRYKRRVERYTQNRTFRSNERWVYRAWELPDQSVTDTRLPDDDAMSSFWRNIWSVPVSHSEGGWTREVERACEPIPEMGAITISPQDVARAVRPLPNWKSPGPDGLHNFWIKWLQRSHARLASQYQTALESGSLPEFLTTGVTHLLHKSGSTAEPKNYRPITCLPTVYKVLTSILRAKINHHVDNNAIMSASQNGCRNGSRGTKELLLIDMAISQQVRRSRKDLSTCWIDYKKAYDSVPHTWLMRVLELYKIDTTLRTFLMSCMRQWRTVLRYPGCRHIQRNSEPVRIERGIFQGDSLSPLWFCLALNPLSTLLENSGLGYRLKRGGQVISHLLYMDDLKLFAPNNLQLMELLKVTETFSSAIRMEFGVDKCAVMHVKRGEIVESMGTQLSDSINLRSLSPTETYKYLGMSEALGINAIDMKQTLKERFFGRLKKVFNSLLSGGNKVRAFNGWVMPVLMYSFGVLKWTQTELDALDRRVRTLLTAYRMHHPRSSVMRLYIPRKCGGQGFLNAKTLHNREVCSLREYFLAADVGMHRDVVAVDKGLTPLSLANESWRKPVVLDTNDRREVWQSKELHGRFFRALDGPDVDQLASVAWLRVGDLFGETEGFVCAIMDEVIMTNNYRRFIVKDGTVDICRACHRPGESIRHIISGCSRLANGEYLHRHNLVARIIHQQLALKYSLVESEVPYYRYMPDPVLDNGDITLYWDRSIITDRTIVANKPDIVVVDRRERRTMIVDISVPHDENLVKAEKDKQIKYIDLAREVVDMWDVDSAIIVPIVVSANGLIAKSLDQHLRRLALGGWIKGLIQKAVLLDTARIVRRFLSLEP

SEQ ID NO: 12907 - protein, 1200 aa, Mythimna impura
MLTRAAARRARPPPPDSSLSSASPPPEPSPIVSAVTSAAAVASSSSDEYFSPPTTPPPARRRGGRRPPSGLGPRGPPASDRVPAPGGSVQRMRWTRSINENVMRSYYGATEGGNNLTAYRVRMLSLFQVLEPAVNVSAQRLSDQVRVIQRNHMLDDTVLDRLRTEMGSHAIASSSQTVAPSQVSPSNHLHNHADEESTDMVTHVSTQCSNELRSALECAIREYRNMPLELRPRLPRLPMCNKNKALVAALDLQLSNYFDDCEDLTDTHSIMYCAAVAACRVAHVKFPNSDVATRPKPAVPAWQCRIERRIGGARALIGKLICFREGNTRPRVMRFVRRAFSGTDISPRDYMSCVTERIDFLKQKVYAWANRIRRYKRRVERYTQNRTFRSNERWVYRAWEQPDQGGADTRLPDDDAMSSFWRNIWSVPVSHTEGGWTREVERACEPIPEMGAITISPQDVARAVRPLPNWKSPGPDGLHNFWIKWLQRSHARLASQYQTALESGSLPEFLTTGVTHLLHKSGSTAEPKNYRPITCLPTVYKVLTSILRAKINLHVDNNAIMSASQNGCRNGSRGTKELLLIDMAISQQVRRSRKDLSTCWIDYKKAYDSVPHTWLMRVLELYKIDATLRTFLMSCMRQWRTVLRYPGCRHIQRNSEPVRIERGIFQGDSLSPLWFCLALNPLSTLLENSGLGYRLKRGGQVISHLLYMDDLKLFAPNNLQLMELLKVTETFSSAIRMEFGVDKCAVMHVKRGEIVESVGTQLSDSINLRSLSPTETYKYLGMSEALGINAIDMKQTLRERFFGRLKKVFNSLLSGGNKVRAFNGWVMPVLMYSFGVLKWTQTELDALDRRVRTLLTAYRMHHPRSSVMRLYIPRKCGGRGFLNAKTLHNREVCSLREYFLTADVGMHRDVVAVDKGLTPLSLANESWRKPVVLDTNDRREVWQSKELHGRFFRALHGPDVDQLASVAWLRVGDLFGETEGFVCAIMDEVIMTNNYRRFIVKDGTVDICRACHRPGESIRHIISGCSRLANGEYLHRHNLVARIIHQQLALNYSLVESEVPYYRYVPDPVLDNGDITLYWDRSIITDRTIVANKPDIVVVDRRERRTMIVDISVPHDENLVKAEKDKQIKYIDLAREVVDMWDVDSAIIVPIVVSANGLIAKSLDQHLRRLALGGWIKGLIQKAVLLDTARIVRRFLSLEP

SEQ ID NO: 12908 - protein, 1200 aa, Mythimna impura
MLTRAAACRARLPPPASSLSSASPPPEPSPTVSAVTPAVAVASSSSDEYFSPPTSPPPARRRRGRRPPSGLGPRGPPASDRVPAPGGSVQRMRWTQSINENVMRAYYGATEGGNNLTAYRVRMLSLFQVLEPAVNVSAQRLSDQVRVIQRNHMLDDTVLDRLRTEMSNHAIAPSSQSVVPVMVPPSYHLSGHVDEEITDMVTHVSTQCNNELRSALECAIREYRNMPLELRPRLPRLPMHNKNKALVAALDLQLSNYFDDCKDLTDTHSIMYCAAVAACRLAHVKFPNCDVATRPKPAVPAWQCRIERRIGGARALIGKLICFREGNTRPRVMRFVRRAFSGTDISPRDYMSRVTERIDFLKQKVYAWANRIRRYKRRVDRYTQNRTFRSNERWVYRAWERPDQGVTDACLPDDDAMSSFWRSIWSVPVSHTEGDWTREVERACDPIPQMGAIDISPQDVARAVRPLPNWKSPGPDGLHNFWIKWFTRSHARLAYQFQSALESGSLPQFLTTGITHLLHKSGSTAEPKNYRPITCLPTVYKVLTSILRSKINSHIDKNLIMSPSQNGCRNGSRGTKELLLIDMTISQQVRRSRKDLSTCWIDYKKAYDSVPHTWLMRVLELYKIDTKLRTFLMSCMRQWSTVLRYPGCRHTQRNSEPVRIERGIFQGDSLSPLWFCLALNPLSTLLENSGLGYRLKRGGQVISHLLYMDDLKLFAPNNLQLMELLKVTETFSSAIRMEFGVDKCAVMHVKRGEVVESVGTQLTDFINLRSLSPTETYKYLGMSEALGINITDMKQSLKERFFGRLKKVFNSLLSGGNKVRAFNGWVMPVLMYSFGVLKWTQTELEALDRKVRTLLTAYRMHHPRSSVMRLYIPRKCGGRGFLNAKTLHNREVCSLREYFLAADVGMHRDVVTVDKGLTPLSLANENWRKPVVLDTNDRREVWQSKELHGRFFRALHGPDVDQLASVAWLRSGDLFGETEGFVCAIMDEVIMTNNYRRFIVKDGTVDICRACHRPGESIRHIISGCSRLANGEYLHRHNLVARIIHQQLALKYSLVESEVPYYRYEPDPVLDNGHITLYWDRSIITDRTIVANKPDIVVVDRSERRAMIVDISVPHDENLVKAEKDKQIKYIDLAREVVDMWDVDSAIIVPIVVSGNGLIAKSLDQHLRRLALGDWIKGLIQKAVLLDTARIVRRFLSLEP

SEQ ID NO: 12909 - protein, 1198 aa, Mythimna impura
MKREDPSTRRVSTGIDFQCNQMWLNTCVLYDIIIIIIIAAVASSSSDEYFSPPTTPPPARRRGRGRPPASLGPRGPPASDRVPAAGGSVQRMRWTSSINENVMRSYFGATEGGINLTAYRGRMLSLFQVLEPAVNVSVQRLSDQVRVIQRNRMLDDAVLDRLRLESQSSRVSPATPPAAVQRLPTASPRPDHVGDADDDAAISVSTQCNDRLRGVLEDAFQEYRSTPPGLRPRLPRLPMHKRNRALVCALDSQLSNCFDSSEDLTDTHSILYCAAAAACRVAHVKFPNCDRATRPAVPAWQCRIEHRIGEARALIGKLICFREGNTRPRVMRLVRRAFSGTDISPRDYLPCVTERIDFLKQKIYAWANRIRRYKRRVERYTQNRTFQSNERWVYRDWERPDQGVTDTRLLDDDAMCSFWRSIWSTPVSHTEGDWIREVERACDLLPEMGAITISPQDVTRAVRPLPNWKSPGPDGLHNFWLKWFQRSHARLASQFQSALESGSLPQFLTTGITHLLHKSGSTAERKNYRPITCLPTVYKVLTSILRAKINSHIETNSIMFASQNGCRNGSRGTKELLLIDVAISQQVRRSRKNLSACWIDYKKAYDSVPHTWLMRVLELYKVDATLRTFLMSCMGQWRTVLHYPGCRQIQENSEPIRIERGIFQGDSLSLLWFCLALNPLSTLLEGSGLGYRLKRGGQVISHLLYMDDLKLFAPNNLQLVKLLKVTETFSSVIRMEFGVDKCAVIHVKRGEIMESVGIQLSDSIHLRSLCSTETYKYLGMSESLGINTDDVKQSLKERFFGRLNKVLNSLLSGGNKVHAFNGWVMPVLMYSFGILKWTQTELDALDRRVRTLLTAHRMHHPRSSAMRLYIPRKCGGRGFLNAKTLHNREVCSLREYFLKTDVGMHRDVAAVDKGLTPLSLANGNWRKPIVLDTNDRREVWQSKELHGRFYRALHGPDVDLLASVSWLRFGDLFGETEGFVFAIMDEVMMTNTYRKYIVKDGTVDICRACHRPGESIRHIICGCSHLANGDYLHRHNLVARIIHQQLALKYNLVESEVPYYRYVPDPVLDNGNITLYWDRSIITDRTIVANKPDIVVIDRLERRTMIVDIAVPHDENLVKAEKDKQTKYLDLAREVVDMWKVDRAIIVPIVVTANGLIAKSLEQHLRRLSLGSWIKGLIQKAVLLDTARIVRRFLSQEP

SEQ ID NO: 12910 - protein, 1109 aa, Mythimna impura
MRWTQSINENVMRAYYGATEGGNSLTAYRVRMLSLFQVLEPSVNVSAQRLSDQVRVIQRNHMLDDTVLDRLRTEMSNHAIAPSSQSVVPVMVPPSYHLSDHADKAITDMVTHVSTQCNNELRSALECAIREYRNMPLELRPRLPRLPMHNKNKALVAALDLQLSNYFDDCKDLTDTHSIMYCAAVAACRVAHVKFPNCDVATRPKPAVPAWQCRIERRIGGARALIGKLICFREGNTRPRVMRFVRRAFSGTDISPRDYMSRVTERIDFLKQKVYAWANRIRRYKRRVERYTQNRTFRSNERWVYRAWERPDQGVTDACLPDDDAMSSFWRSIWSVPVSHTEGDWTREVERACDPIPQMGAIDISPQDVARAVRPLPNWKSPGPDGLHNFWIKWFTRSHARLAYQFQSALESGSLPQFLTTGITHLLHKSGSTAEPKNYRPITCLPTVYKVLTSILRSKINSHIDKNLIMSPSQNGCRNGSRGTKELLLIDMAISQQVRRSRKDLSTCWIDYKKAYDSVPHTWLMRVLELYKIDTTLRTFLMSCMRQWSTVLRYPGCRHTQRNSEPVRIERGIFQGDSLSPLWFCLALNPLSTLLENSGLGYRLKRGGQVISHLLYMDDLKLFAPNNLQLMELLKVTETFSSAIRMEFGVDKCAVMHVKRGEVVESVGTQLTDSINLRSLSPTETYKYLGMSEALGINITDMKQSLKERFFGRLKKVLNSLLSGGNKVRAFNGWVMPVLMYSFGVLKWTQTELDALDRRVRTLLTAYRMHHPRSSVMRLYIPRKCGGRGFLNAKTLHNREVCSLREYFLAADVGMHRDVVAVDKGLTPLSLANENWRKPVVLDTNDRREVWQSKELHGRFFRALHGPDVDQLASVAWLRFGDLFGETEGFVCAIMDEVIMTNNYRRFIVKDGTVDICRACHRPGESIRHIISGCSRLANGEYLHRHNLVARIIHQQLALKYSLVESEVPYYRYEPDPVLDNGHITLYWDRSIITDRTIVANKPDIVMVDRSERRAMIVDISVPHDENLVKAEKDKQIKYIDLAREVVDMWDVDSAIIVPIVVSANGLIAKSLDQHLRRLALGGWIKGLIQKVVLLDTARIVRRFLSLEP

SEQ ID NO: 12911 - protein, 896 aa, Phlogophora meticulosa
MVFDDRKSLFIYNNNNNSYREGNTRPRVMRYVRRAFLGTDISPRDYMSRVTERIDFLKQKVYAWASRIRRYKRRVERYTQNRTFQSNERWVYRAWERPVQGVTDTHLPDDDVMCSFWRNIWSVPVSHTEGDWTREVERACDPIPQMGAITISPQDVARAVRPLPNWKSPGPDGLHNFWIKWLQKSHARLASQFQSALETGSLPQFLTTGITHLLHKSGSTAEPKNYRPITCLPTVYKVLTSILRVKINNHIDSNSIMSASQNGCRNGSRGTKELLLIDTAISQQVRRSRKDLSTCWIDYKKAYDSVPHTWLKRVLELYKVDATLRTFLTSCMGQWRTVLRYPGCRQIQRNSEPIRIERGIFQGDSLSPLWFCLALNPLSTLLEDSGLGYRLKRGGQVVSHLLYMDDLKLFAPSDLQLMELLTVTKTFSSAIRMEFGVDKCAVMHVKRGKIVESVGTQLPDFINFRALSPIETYKYLGMSEALGINAADMKQSLKERFFGRLKKVCNSLLSGGNKVRAFNGWVMPVLMYSFGILKWTQTELDALDRRVRTFLTASRMHHPRSSVMRLYIPRKCGGRGFLNAKTLHNREICSLRDYFLETDVGMHRDVVAVDQGLTPLSLAKENWRKPVVLDTNDRKEVWQSKELHGRFFQALHGPDVDQLASVSWLRFGDLFGETEGFVCAIMDEVIMTNNYRRFIVKDGTVDICRACHRPGESIRHIISGCSRLANEEYLHRHNLVARIIHQQLALKYSLVESEVPYYKYVPDPVLENGSVTLYWDRSIITDRTIVANKPDIVVMDRIERRATIIDVTVPHDGNLVKAEKDKQIKYLDLAREVVDMWDVDSAIVVPIVVSANGLIAKSLDQHLRRLALGSWIKGLIQKAVLLDTARIVRRFLSLEP

SEQ ID NO: 12912 - protein, 1202 aa, Phlogophora meticulosa
MLTRSRARVLNAPKTSSGSSLSSASQLPGPAPDVSPVTPAAAVASSSSDEYYSPPTSPPPVRRCGRGRPPASLGLRGPPASARVPASGGSVQRMRWTQSINENVMRSYYGATEGGINLTAYRGRMLSLFQVLEPAVNVSAQRLSDQVRVIQRNHMLDDTVLDRLRLNSRSNRVMPASPLVAVQLASLPIVSPRPDYVGEEDDDAAISVSSQCNVRLRSALEDAFREYRSTPPELRQRLPRLPMHKKNKALMCALDSLLSNSFDNSKDLADTHSILYCAAAAACRVANVKFPNSKKATRPAVPAWQCRIERRIGEARVLIGKLICFREGNTRPRVMRFVRRAFSGTDISSRDYLTRVTERIDFLKQKICAWANRIRRYKRRVERYTQNRTFRSDERWVYRTWERPDQGVTDTFLPDDEAMCLFWRSIWSVPVSHTEGDWTREVERTCEPLPEMGAINISPQDVACAVRPLPNWKSPGPDGLHNFWIKWLKSSHARLASQFQSALESGSLPQFLTTGITHLLHKSGSTAEPKNYRPITCLPTVYKVLTSILRSKINNHIDSTSIMSVSQNGCKNGSRGTKELLLIDMAISQQVRRSRKDLSTCWIDYKKAYDSVPHTWLMRVLELYKIDATLRTFLKSCMGQWRTVLHYPGCRQFQENSEPIRIERGIFQGDSLSPLWFCLALNPLSTLLEGSGLGYRLRRGGQVISHLLYMDDLKLFAHNNLQLMKLLKVTETFSSAIRMDFGVDKCAVMHVKRGGIVESAGTQLSDSIYLRSLSSTETYKYLGMSEALGINTADMKQSLKERFFGRLNKVLNSLLSGGNKVRAFNSWVMPVLMYSFGILKWTQTELDALDRRVRTLLTANRMHHPRSSVMRLYISRKCGGRGFLNAKTLHNREVCSLREYFLETDVGMHRDVVAMDKALTPLSLANENWRKPIVLDTTDRMEIWKSKELHGRFYRVLHGPDVDLSASVSWLRFGDLFGETEGFVCAIMDEVIMTNNYRKYIVKDGTVDICRACHRSGESIRHIISGCSRLANGDYLHRHNFVAKIIHQQLALKYNLVESEVPYYKYVPDPVLENGNITLYWDRSIITDRTIVANKPDIVVIDRLERRTMIVDITVPHDENLVKAEKEKQIKYLDLAREVVDMWDVNTAVIVPIVVTANGIIAKSLDQHLRRLSLGSWIKGLIQKAVLLDTARIVRRFLSQEP

SEQ ID NO: 12913 - protein, 1199 aa, Laspeyria flexula
MLTRARKREALIPPPDSSLSVASQPPDPVPTTPLTAEAGSSSSSDEYFSPPSSPTPVPRRGRGRPPASLGPRGPPAVNRAPAAGGNVQRMRWSSSVNENVMRAYFAATEGGINLTAYRSRMLALFQDLEPTTKVTAQRLSDQVRAIQRCRMLDDTVLDRLRLECLQNNPTVPLQVNNLNNIISNAITIQADHNLEEVDGISSVDTQCNEEVRVALERALREYRFTSLQFRPRLPRLPMHKKNLALVITLDSLLSDYFDNSENLGDTHSILYCAAVAACRLAGVKFLGIEPPSHERPSTPAWQCRIERRIAGARILIGKLISFRAGNTRPRVMRFVNQAFSGTDVSPNEYLSRVTERIDFLKQKVYAWANRIRRFKKRVDRYTVNRLFQRDQRRVYRNWERPTQEVSDERLPNATATNEFWSSIWSEPVLHSEGEWIWDVERACERIPLMESVVISAEDIASAVRPMANWKSPGPDGLHNFWLRWLRSSHGRLASQFQSALESGSLPEFLTTGCTHLLHKSGSVTEPGNYRPITCLPSVYKLLTSVLRAKITKHIDDTRTMSISQNGCRRGSRGTKELLLVDMTISQQVRRSRKDLATCWIDYKKAFDSVPHSWLLRVLELYKVDITLRTFLESCMRQWRTVLTYPGCRLICGNGEPVRIKRGIFQGDSLSPLWFCLALNPLSTLLESSGLGYRLRRGGHVISHLLYMDDLKLIAPTDLQLKGLLKATEDFSKSIKMDFGVDKCAIMHVKRGEIVESDGIQLSDSINFRSLLVTDTYKYLGMSQALGIKETDMKQSLQERFFGRLKKVLNSLLSGGNKVRACNGWVMPLLMYSFGILKWTQTELDTLDRRVRTMLTAYRMHHPRSSVMRLYIPRKCGGRGFLNAKTLHNREVYNLREYFMGKDEGMHRDVVAVDSGLTPLSLAKDNWRRPIVLSTDDRRQVWQSKELHGRFYKALHGPDVDRVASVAWLRFGDLFGETEGFACAIADEVIKTNNYRKYILRDGTVDICRACHRPGESLRHIVSGCSRLANGEYLHRHNQVARIIHQQLALRYKLVDVEVPYYRYAPEPVLENSHTTLYWDRSIITDRTVIANKPDIVVLDRSKRLAVIVDITVPHDENLVKAEKDKQTKYLDLAHEIVDMWDVDSAIIVPIVVTVNGLVAKSLDQHLKRLGLGSWLKGLIQKAVLLGTARIVRRFLSLEP

SEQ ID NO: 12914 - protein, 1209 aa, Xestia xanthographa
MITRSRAKQHQEAYPPSPGSSLSSASQRPGRATPVSTVSPVAAVASSSSDEFFSPPSTPSPSPRRGRRRGRGRPPVGLGPRGQQAPSRVPAAGGNVSRIRWTQSMNENVMRAYYGATEGGINLTAYRGQMLSLFQVLEPGVSASAQRLSDQVRVIQRNHMLDDTVLDRLRSESRSNLVMPASPLLAVQVQNVSSAPPRSDRDGEEDDSEVISVSTQCNAQLRSALESAFREYRSTPPELRPRLPRLPMHNKNKALVCALDSQLSICFDSSKDLADTHSILYCGAVAACRVAHVKFPNNDRATRPKLAAPAWQCRIERRIGEARALIGKLICFREGNTRPRVMRFVRRAFSGTDISFRDYLARVTERIDSLKQKICAWASRIRRYKRRVERYTQNRTFQSDERWVYRAWERPDQGVTDTCLPDDNAMCSFWRSIWSVPVSHTEGDWTREVEQACNPIPEMGAIVISPQDVARAVRPLPNWKSPGPDGLHNFWIKWFQRSHACLASQFQSALESGSLPQFLTTGITHLLHKSGSAAEPKNYRPITCLPTVYKVLTSILRAKINQHIESNSIMSASQNGCRNGSRGTKELLLIDMAISQQVRRSRKNLSTCWIDYKKAYDSVPHTWLMRVLELYKVDATLRTFLTSCMGQWRTVLRYPGCRPIQGTSEPIRIERGIFQGDSLSPLWFCLALNPLSTLLERSGLGYLLRRDGRVISHLLYMDDLKLFAPNNLQLMKLLKVTETFSSAIRMEFGVDKCAVMHVKRGEIMESVGTQLSDSIHLRSLSSTETYKYLGMSEALGINTADMKQSLRERFFGRLNKVLGSLLSGGNKVRAFNGWVMPVLMYSFGILKWTQTELDALDRRVRTLLTRNRMHHPRSSVMRLYIPRKCGGRGFLNAKALHNREVCSLREYFLEADGEMHRDVVSVDKGLTPLSLANENWRKPKVLNTNDRKEEWQSKELHGRFYRALHGPDVDFLASVSWLRFGDLFGETEGFVCAIMDEVMMTNNYRKYIVKDGTVDICRACHRPGESIRHIISGCSSLAYGEYLHRHNLVARIIHQQLAMKYNLVESEVPYYRYAPDPVLDNGNITLYWDRPITTDRTVVANRPDIVVIDRLERRAMIVDITVPHDENIVKAEKDKQFKYLDLAREVVDMWDVNTAVIVPIVVSANGLIAKSLDQHLRRLSLGSWIKGLIQKAVLLDTARIVRRFLSQEP

SEQ ID NO: 12915 - protein, 1045 aa, Xestia xanthographa
MLDDTVLDRLRTEIQSSHVIATPSQAVVPPQSSIIPNCDNDVGNDMVTNVSTQCNVEMRSALEGAIREYRFMQPDLRPRIPRLPMHNKNRALVAVLDSQLSNYFDNCEDLTDVHSILYCAAVAACRVAHVKFPSDRATRPKPAVPAWQYRIERRIGGARALIGKLVCFREGNTRPRVMRFVRQAFSGTDISPRDYMSRVTERIDFLKQKVYAWANRIRRYKRRVDRYTQNRTFQKDERWVYRAWERPDQGVADTHLPDDDAMCSFWRSIWSVPVSHAEGEWTRVIERACDPVSEMGAITISPQDVARAVRPLPNWKSPGPDGLHNFWIKWFTRSHARLATLFQSALESGSLPEFLTTGITHLLHKSGSTAEPKNYRPITCLPTVYKVLTSILRTKISKHIDDNSVMSASQNGCRNGSRGTKELLLIDMAISHQVRRSRKDLSTCWIDYKKAYDSVPHTWLMRVLELYKVDATLRTFLMSCMGQWRTVLRYPGCRQIQRNSEPIRIERGIFQGDSLSPLWFCLALNPLSTLLEDSGLGYRLRKDGQVISHLLYMDDLKLFAPNDLQLMELLKVSDTFSSAIRMEFGVDKCAVMHVKRGEIVESVGTQLSDSITLRSLSATETYKYLGMSEALGVNVADMKQSLKERFFGRLKKVFNSLLSGGNKVRAFNGWVMPVLMYSFGILKWTQTELDALDTKVRKLLTAYRMHHPRSSVMRLYIPRKCGGRGFLNAKTLHNREICSLREYFLGTDVGMHRDVVTVDKGLTPLSLAKENWRKPPVLDTNDRREVWQSKELHGRFFRALHGPDVDLPASVAWLRSGDLFGETEGFVCAIMDEVMMTNNYRRFIVKDGTVDICRACHRPGETIRHIISGCSRLANGEYLHRHNLVARIIHQQVALKYNLVESEVPYYRYVPDPVLDNGCITLYWDQSIITDRTIVANKPDIVVVDRSERRAMIVDITVPHDENLVKAEKDKQIKYLDLAREVVDMWEVDSAIIVPIVVSAHGLIAKSLDQYLRRLSLGSWIKGLIQKAVLLDTARIVRRFLSLEP

SEQ ID NO: 12916 - protein, 1198 aa, Xestia xanthographa
MLTRSAAARRARLPPPDSSLSSASPPPEPSPIVSAVTPAVAVASSSSDEYFSPPTTPPPARRRGGRRPPDGLGPRGPPASDRVPAPGGSVQRMRWTQSINANVMRAYYGATEGGNNLTAYRVRMLSLFQVLEPAVNVSAQRLSDQVRVIQRNRMLDDTVLDRLRTEIQSNHVIATPSQAVVPPQSSIIPNCDNDVSNDMVTNVSTQCNVEMRSALEGAIREYRFMQPDLRPRIPRLPMHNKNRALVAVLDSQLSNYFDNCEDLTDVHSILYCAAVATCRVAHVKFPSDRATRPKPAVPAWQYRIERRIGGARALIGKLVCFREGNTRPRVMRFVRQAFSGTDISPRDYMSRVTERIDFLKQKVYAWANRIRRYKRRVDRYTQNRTFQKDERWVYRAWERPDQGVADTHLPDDDAMCSFWRSIWSVPVSHAEGEWTRVIERACDPISEMGAITISPQDVARAVRPLPNWKSPGPDGLHNFWIKWFTRSHARLATLFQSALESGSLPEFLTTGITHLLHKSGSTAEPKNYRPITCLPTVYKVLTSILRTKISKHIDDNSVMSASQNGCRNGSRGTKELLLIDMAISHQVRRSRKDLSTCWIDYKKAYDSVPHTWLMRVLQLYKVDATLRTFLMSCMGQWRTVLHYPGCRQIQRNSEPIRIERGIFQGDSLSPLWFCLALNPLSTLLEDSGLGYRLRKDGQVISHLLYMDDLKLFAPNDLRLMELLKVTEIFSNAIRMEFGVDKCAVMHVKRGEIVESVGTQLSDSITLRSLSATETYKYLGMSEALGVNVADMKQSLKERFFGRLKKVLNSLLSGGNKVRAFNGWVMPVLMYSFGILKWTQTELDALDTKVRKLLTAYRMHHPRSSVMRLYIPRKCGGRGFLNAKTLHNREICSLREYFLGTDVGMHRDVVTMDKGLTPLSLAKENWRKPPVLDTNDRREVWQSKELHGRFFRALHGPDVDLSASVAWLRSGDLFGETEGFVCAIMDEVMMTNNYRRFIVKDGTVDICRACHRPGESIRHIISGCSRLANGEYLHRHNLVARIIHQQLALKYNLVESEVPYYRYVPDPVLDNGCITLYWDQSIITDRTIVANKPDIVVVDRSERRAMIVDITVPHDENLVKAEKDKQIKYLDLAREVVDMWEVDSAIIVPIVVSAHGLIAKSLDQYLRRLSLGSWIKGLIQKAVLLDTARIVRRFLSLEP

SEQ ID NO: 12917 - protein, 1111 aa, Xestia xanthographa
MRWTQSINENVMRAYYGATEGGSNLTAYRSRMLSLFQVLEPAVNVEAQRLSDQVRVIQRNHMLDDTVLDRLRSESRSNLVTPASPMIAVQQQNIPSAPPRSDYNGEEDRDEVISVSTQCNAQLRSALEGAFREYRSTPPELRPRLPRLPMHNKNKALMCALDSQLSNCFDSSKDLADTHSILYCGAVAACRVAHVKFPNNDRATRPKLAVPAWQCRIERRIGEARALIGKLICFREGNTRPRVMRFVRRAFSGTDISFRDYLARVTERIDSLKQKICAWASRIRRYKRRVERYTQNRTFQSDERWVYRAWERPDQGVTDTRLPDDSAMYSFWRNIWSVPVSHTEGDWTREVEQACDPIPEMGAIVISPQDVARAVRPLPNWKSPGPDGLHNFWIKWFQRSHARLASQFQSALESGSLPQFLTTGITHLLHKSGSVAEPKNYRPITCLPTVYKVLTSILRAKINQHIDSNSIMSASQNGCRNGSRGTKELLLIDMAISQQVRRSRKNLSTCWIDYKKAYDSVPHTWLMRVLELYKIDATLRTFLMSCMGHWRTVLRYPGCRQIQGNSEPIRIERGIFQGDSLSPLWFCLALNPLSTLLERSGLGYLLRRDGQVISHLLYMDDLKLFAPNNLQLMKLLKVTETFSSAIRMEFGVDKCAVMHVKRGEIMESVGTQLSDSIHLRSLSSTETYKYLGMSEALGINTTDMKQSLRERFFGRLNKVLGSLLSGGNKVRAFNGWVMPVLMYSFGILKWTQTELDALDRRVRTLLTANRMHHPRSSVMRLYIPRKCGGRGFLNAKTLHNREVCSLREYFLEADGEMHRDVVSVDKGLTPLSLANENWRKPKVLDTNDRKVEWQGKELHGRFYRALHGPDVDFLPSVSWLRFGDLFGETEGFICAIMDEVMMTNNYRKYIVKDGTVDICRACHRPGESIRHIISGCSSLANGEYLHRHNLVARIIHQQLALKYNFVESEVPYYKYAPDPVLDNGHITLYWDRPITTDRTVVANRPDIVVIDRLERRTMIVDITIPHDENLVKAEKDKQFKYLDLAREVVDMWDVGTAVIVPIVVSANGLIAKSLDQHLRRLSLGSWIKGLIQKAVLLDTARIVRRFLSQEP

SEQ ID NO: 12918 - protein, 914 aa, Xestia xanthographa
MNPSIFKMLDTEAVVPRRLASTHVFDNFAYLFSRKTNRSLMVGSLSTLRLKCRTNNNNNSPRDYMSRVTERIDFLKQKVYAWANRIRRYKRRVDRYTQNRTFQKDERWVYRAWERPDQGVADTHLPDDDAMCSFWRSIWSVPVSHAEGEWTRVIERACDPISEMGAITISPQDVARAVRPLPNWKSPGPDGLHNFWIKWFTRSHARLATLFQSALESGSLPEFLTTGITHLLHKSGSTAEPKNYRPITCLPTVYKVLTSILRTKISKHIDDNSVMSASQNGCRNGSRGTKELLLIDMAISHQVRRSRKDLSTCWIDYKKAYDSVPHTWLMRVLELYKVDATLRTFLMSCMGQWRTVLRYPGCQQIQRNSEPIRIERGIFQGDSLSPLWFCLALNPLSTLLEDSGLGYRLRKDGQVISHLLYMDDLKLFAPNNLRLMELLKVTETFSNAIRMEFGVDKCAVMHVKRGEIVESVGTQLSDSITLRSLSATETYKYLGMSEALGVNVADMKQSLKERFFGRLKKVLNSLLSGGNKVRAFNGWVMPVLMYSFGILKWTQTELDALDTKVRKLLTAYRMHHPRSSVMRLYIPRKCGGRGFLNAKTLHNREICSLREYFLGTDVGMHRDVVTMDKGLTPLSLAKENWRKPPVLDTNDRREVWQSKELHGRFFRALHGPDVDLSASVPWLRSGDLFGETEGFVCAIMDEVMMTNNYRRFIVKDGTVDICRACHRPGESIRHIISGCSRLANGEYLHRHNLVARIIHQQLALKYNLVESEVPYYRYVPDPVLDNGCITLYWDQSIITDRTIVANKPDIVVVDRSERRAMIVDITVPHDENLVKAEKDKQIKYLDLAREVVDMWEVDSAIIVPIVVSAHGLIAKSLDQYLRRLSLGSWIKGLIQKAVLLDTARIVRRFLSLEP

SEQ ID NO: 12919 - protein, 1200 aa, Cosmia trapezina
MLTRSATRKARLPPPDSSLSSASPPPVPSLTASAVSTPAAVVASSSSDEYFSPPTTPPPARRRGGRRPPDGLGPRGPPASDRVPAPGGSVQRMRWTRAINENVMRSYYGATEGGNNLTAYRVRMHSLFQVLEPALNVSAQRLSDQVRVIQRNHMLDDTVLDRLRNEIQSSRVIAPLSQTIVAPPPPQCNTTQADEGSDATAANVSTQCNEELRSALEGAIQEYRFVSPELRPRLPRLPMHNKNRALVAALDSQLSNYFDDCEDLTDTHSILYCAAVAACRVAHVKFANDSRATRPKPAVPAWQCRIERRIGGARALIGKLICFREGNTRPRVMRFVKRAFSGTDVSPQDYMSRVTERIDFLRQKVYAWANRIRRYKRRVDRYTQNRTFQSDERWVYRGWERPDQGVTDTRLPDDDAMCSFWRSIWSVPVSHTEGDWAREVRRACDPIPEMGAITICPQDVARAVRPLPNWKSPGPDGLHNFWIKWFLGSHARLAAQYQSALQSGSLPQFLTTGITHLLHKSGSTTEPKNYRPITCLPTVYKVLTSILRAKINEHIDTNSIMSASQNGSRNGSRGTKELLLIDMAISQQVRRSRRDLSTCWIDYKKAYDSVPHTWLMRVLELYKVDATLRTFLMSCMGQWRTVLRYPGCRNIQRNSEPIRIERGIFQGDSLSPLWFCLALNPLSTLLEDSGLGYRLRRGGQVISHLLYMDDLKLFAPSNLQLMELLKVTETFSSAIRMEFGVDKCAVMHVKRGEIVESVGTQLPDSINLRTLSAAETYKYLGMSEALGINVADMKQSLKERFFGRLKKVFNSLLSGGNKVRAFNGWVMPVLMYSFGILKWTQTELDALDRRVRTLLTAYRMHHPRSSVMRLYIPRKCGGRGFLNAKTLHNREICSLREYFLETDVGMHRDVVAVDKGLTPLSLAKENWRKPVVLDANDRMEVWQSKELHGRFFRALHGPDVNLLASVAWLRSGDLFGETEGFVCAIMDEVIMTNNYRRFIVKDGTVDICRACHRPGESIRHIISGCSRLANEEYLHRHNLVARIIHQQLALKYSLVESEVPYYRYVPDPVLENGHITLYWDRSIITDRTIVANKPDIVVVDRTERRAMIVDITVPHDGNLVKAEKDKQIKYIDLAREVVDMWDVDSAVIVPIVVSANGLIAKSLDQHLRRLSLGSWIKGLIQKAVLLDTARIVRRFLSLEP

SEQ ID NO: 12920 - protein, 1205 aa, Cosmia trapezina
MLTRSRAQHLRNTHPTSSGSSLSSASQLPEPAPDVSQVIPAAAVASSSSDEYFSPPTTPPPVRRRGRGRPPASLGPRGPPASDRVPAPGGSVQRMRWTQTVNENVMRAYFGATEGGSNLTAYRGRMLSLFQVLEPAVNVSAQRLSDQVRVIQRNHMLDDVVLDRLRLESRNSRVTSDSPMVAVQLQNLPSASPRPDRVGEEDDSGAISVSSQCNVQLRSALEDAFREYRSTPPGLRPRLPRLPMHKKNKALVCALDSQLSNCFDGSKDLVDTHSILYCAAVAACRVAHVKFHNNDRVTRPKPAVPTWQCRIERRIGEARALIGKLICFREGNTRPRVMRFVRRAFSGMDISPRDYLTCVTERIDFLKQKICAWANRIRRYRRRVERYTQNRTFQSDERWVYRAWERPDQDVADTQLPDDDAMCSFWRSIWSVPVSHTEGDWTREVERACDHIPQMGALTISPQDVARAVRPLPNWKSPGPDGLHNFWIKWFQRSHARLASQFQSALQSGSLPQFLTTGITHLLHKSGSTAEPRNYRPITCLPTVYKVLTSILRAKINKHIDTNSIMSASQNGCGNGSRGTKELLLIDMTISQQVRRSRKDLSTCWIDYKKAYDSVPHTWLMRVLELYKIDATLRTFLMSCMGQWRTVLRYPGCRNIQRNSEPIRIERGIFQGDSLSPLWFCLALNPLSTLLEDSGLGYRLRRGGQVISHLLYMDDLKLFAPNNLQLMELLKVTETFSSAIRMEFGVDKCAVMHVKRGEIVESVRTQLSDSIHLRSLSSLETYKYLGMSEALGINAADMKQSLRERFFGRLNKVLNSLLSGGNKVRAFNGWVMPVLMYSFGILKWTQTELDALDRRVRTLLTANRMHHPRSSVMRLYIPRKCGGRGFLNAKTLHNREVCSLREYFLEADVGMHREVVSVDKGLTPLSLANENWRKPIVLDTNDRREVWQSKELHGRFYRVLHGPDVDFLASVSWLRFGDLFGETEGFVFAIMDEVMMTNNYRKYIVKDGTVDICRACHRPGESIRHIISGCSRLANGDYLHRHNLVARIIHQQLALKYSLVESEVPYYRYVPDPVLENGNITLYWDRSIITDRTIVANKPDIVVIDRLERRTVIVDIAVPHDENLVKAEKDKQIKYLDLAREVVDMWDVDTAIIVPIVVTANGIIAKSLDQHLRRLSLGGWIKGLIQKAVLLDTARIVRRFLSQQP

SEQ ID NO: 12921 - protein, 1205 aa, Cosmia trapezina
MLTRSRAQHLRNTHPTSSGSSLSSASQLPEPAPDVSQVIPAAAVASSSSDEYFSPPTTPPPVRRRGRGRPPASLGPRGPPASDRVPAPGGSVQRMRWTQTVNENVMRAYFGATEGGSNLTAYRGRMLSLFQVLEPAVNVSAQRLSDQVRVIQRNHMLDDVVLDRLRLESRNSRVTSDSPMVAVQLQNLPSASPRPDRVGEEDDSGAISVSSQCNVQLRSALEDAFREYRSTPPGLRPRLPRLPMHKKNKALVCALDSQLSNCFDGSKDLADTHSILYCAAVAACRVAHVKFHNNDRVTRPKPAVPTWQCRIERRIGEARALIGKLICFREGNTRPRVMRFVRRAFSGMDISPRDYLTCVTERIDFLKQKICAWANRIRRYRRRVERYTQNRTFQSDERWVYRAWERPDQGVADTQLPDDDAMCSFWRSIWSVPVSHTEGDWTREVERACDHIPQMGALTISPQDVARAVRPLPNWKSPGPDGLHNFWIKWFQRSHARLASQFQSALQSGSLPQFLTTGITHLLHKSGSTAEPRNYRPITCLPTVYKVLTSILRAKINKHIDTNSIMSASQNGCGNGSRGTKELLLIDMTISQQVRRSRKDLSTCWIDYKKAYDSVPHTWLMRVLELYKIDATLRTFLMSCMGQWRTVLRYPGCRNIQRNSEPIRIERGIFQGDSLSPLWFCLALNPLSTLLEDSGLGYRLRRGGQVISHLLYMDDLKLFAPNNLQLMELLKVTETFSSAIRMEFGVDKCAVMHVKRGEIVESVRTQLSDSIHLRSLSSLETYKYLGMSEALGINAADMKQSLKERFFGRLNKVLNSLLSGGNKVRAFNGWVMPVLMYSFGILKWTQTELDALDRRVRTLLTANRMHHPRSSVMRLYIPRKCGGRGFLNAKTLHNREVCSLREYFLEADVGMHREVVSVDKGLTPLSLANENWRKPIVLDTNDRREVWQSKELHGRFYRVLHGPDVDFLASVSWLRFGDLFGETEGFVFAIMDEVMMTNNYRKYIVKDGTVDICRACHRPGESIRHIISGCSRLANGDYLHRHNLVARIIHQQLALKYSLVESEVPYYRYVPDPVLENGNITLYWDRSIITDRTIVANKPDIVVIDRLERRTVIVDIAVPHDENLVKAEKDKQIKYLDLAREVVDMWDVDTAIIVPIVVTANGIIAKSLDQHLRRLSLGGWIKGLIQKAVLLDTARIVRRFLSQQP

SEQ ID NO: 12922 - protein, 1193 aa, Cosmia trapezina
MLTRSATRKARLPPPDSSLSSASPPPVPSLTVSAVSTPAAVVASSSSDEYFSPPTTPPPARRRGGRRPPDGLGPRGPPASDRVPAPGGSVQRMRWTRAINENVMRSYYGATEGGNNLTAYRVRMHSLFQVLEPALNVSAQRLSDQVRVIQRNHMLDDTVLDRLRNEIQSSRVIAPLSQTIVAPPPPQCNTTQADEGSDGTAANVSTQCNEELRSALEGAIQEYRFVSPELRPRLPRLPMHNKNRALVAALDSQLSNYFDDCEDLTDTHSILYCAAVAACRVAHVKFANDSRATRPKPAVPAWQCRIERRIGGARALIGKLICFREGNTRPRVMRFVKRAFSGTDVSPQDYMSRVTERIDFLRQKVYAWANRIRRYKRRVDRYTQNRTFQSDERWVYRGWERPDQGVTDTRLPDDDAMCSFWRSIWSVPVSHTEGDWAREVRRACDPIPEMGAITICPQDVARAVRPLPNWKSPGPDGLHNFWIKWFLGSHARLAAQYQSALQSGSLPQFLTTGITHLLHKSGSTTEPKNYRPITCLPTVYKVLTSILRAKINEHIDTNSIMSASQNGSRNGSRGTKELLLIDMAISQQVRRSRRDLSTCWIDYKKAYDSVPHTWLMRVLELYKVDATLRTFLMSCMGQWRTVLRYPGCRNIQRNSEPIRIERGIFQGDSLSPLWFCLALNPLSTLLEDSGLGYRLRRGGQVISHLLYMDDLKLFAPSNLQLMELLKVTETFSSAIRMEFGVDKCAVMHVKRGEIVESVGTQLPDSINLRTLSAAETYKYLGMSEALGINVADMKQSLKERFFGRLKKVFNSLLSGGNKVRAFNGWVMPVLMYSFGILKWTQTELDALDRRVRTLLTAYRMHHPRSSVMRLYIPRKCGGRGFLNAKTLHNREICSLREYFLETDVGMHRDVVAVDKGLTPLSLAKENWRKPVVLDANDRMEVWQSKELHGRFFRALHGPDVNLLASVAWLRSGDLFGETEGFVCAIMDEVIMTNNYRRFIVKDGTVDICRACHRPGESIRHIISGCSRLANEEYLHRHNLVARIIHQQLALKYSLVESEVPYYRYVPDPVLENGHITLYWDRSIITDRTIVANKPDIVVVDRTERRAMIVDITVPHDGNLVKAEKDKQIKYIDLAREVVDMWDVDSAVIVPIVVSANGLIAKSLDQHLRRLSLGSWIKGLIQKAVLLEGHGPHC

SEQ ID NO: 12923 - protein, 1112 aa, Cosmia trapezina
MRWTQSINENVMRAYYGATEGGINLTAYRGRMLSLFQVLEPAVNVSAQRLSDQVRVIQHNHRLDNATLDRLRSEMQSSSASNPPPSQNVVHVPAEIPLRANQRDEEENARAISADNLCNVEIRSALEDAIREYRFTSPDLRPRLPRLPMNKKNRALVCALDALLPNFIESSADLCDTHSILYCTAVAACRVACVKFPNTDRATRPKPAAPAWQCRIERRINEARVLIGKLICFREGNTRPRVMRFVRRAFSGTNVSPQEYVSRVTERIDFLKQKVYAWANRIRRYRRRVDRYSQNRMFQSDERWVYRAWERPIPTQGVTDVRPPDNETMSAFWRSIWSVPVSHTEGDWMRIVEQACDSIPNMDAVTISPLDVACAVRPLPNWKSPGPDGLHNFWIKWLQRSHACLASQFQSSLETGSLPLLFTTGVTHLLHKSGSTAEPKNYRPITCLPTVYKVLTSILRAKIAHHIYNNSIMSVSQNGCRNGSRGTKELLLIDMTISQQVRRSRKDLSTCWIDYKKAYDSVPHTWLIRVLELYKIDATLRTFLMSCMGQWKTVLLYPGCRRIPGIDEPIRIERGIFQGDSLSPLWFCLALNPLSTLLEDSGLGYRLRRGGQVISHLLYMDDLKLFAPNNLRLMELLKVTENFSSAIRMEFGVDKCAVMHVKRGEIMESVGTQLSDSIHLRSLSSTETYKYLGMSEALGINVADMKQSLKERFFGRLKKVFNSLLSGGNKVRAFNGWVMPVLMYSFGVLKWTQTELDALDRRVRTLLTAYRMHHPRSSVMRLYIPRKCGGRGFLNAKTLHNREICSLREYFLEADVGMHRDVVAVDKGLTPLSLAKENWRKPAVLDTNDRREVWQGKELHGRFFRALHGPDVDFLASVSWLRFGDLFGETEGFVCAIMDEVIMTNNYRKYIVKDGTVDICRACHHPGESIRHIVSGCSRLANGEYLHRHNLVARIIHQQLALQYNLVESEVPYYRYVPDPVLENGQATLYWDRSIITDRTIVANKPDIVVIDRRERRAIIVDIAVPHDENLVKAEKDKKIKYLDLAHEVVDMWDVDSAIIVPIIVTVNGLIAQSLDQHLRRLSLRGWIKGLIQKAVLLDTARIVRRFLSLEP

SEQ ID NO: 12924 - protein, 962 aa, Cosmia trapezina
MHNKNRALVAALDSQLSNYFDDCEDLTDTHSILYCAAVAACRVAHVKFANDSRATRPKPAVPAWQCRIERRIGGARALIGKLICFREGNTRPRVMRFVRRAFSGTDVSPQDYMSRVTERIDFLRQKVYAWANRIRRYKRRVDRYTQNRTFQSDERWVYRGWERPDQGVADTRLPDDDAMCSFWRSIWSVPVGHTEGDWAREVERACDPIPEMGAITICPQDVARAVRPLPNWKSPGPDGLHNFWIKWFPGSHARLAAQYQSALQSGSLPQFLTTGITHLLHKSGSTAEPKNYRPITCLPTVYKVLTSILRAKINEHIDTNSIMSVSQNGSRNGSRGTKELLLIDMAISQQVRRSRKDLSTCWIDYKKAYDSVPHTWLMRVLELYKVDATLRTFLMSCMGQWRTVLRYPGCRNIQRNSEPIRIERGIFQGDSLSPLWFCLALNPLSTLLEDSGLGYRLRRGGQVISHLLYMDDLKLFAPNNLQLMELLKVTETFSSAIRMEFGVDKCAVMHVKRGEIVESVGTQLSDSINLRTLSAAETYKYLGMSEALGINVADMKQSLKERFFGRLKKVFNSLLSGGNKVRAFNGWVMPVLMYSFGILKWTQTELDALDRRVRTLLTAYRMHHPRSSVMRLYIPRKCGGRGFLNAKTLHNREICSLREYFLEADVGMHRDVVAVDKGFTPLSLAKENWRKPVVLDTNDRMEVWQSKELHGRFFRALHGPDVDLLASVAWLRSGDLFGETEGFVCAIMDEVIMTNNYRRFIVKDGTVDICRACHRPGESIRHIISGCSRLANEEYLHRHNLVARIIHQQLALKYSLVESEVPYYRYVPDPVLENGNITLYWDRSIITDRTIVANKPDIVVVDRTERRAMVVDITVPHDGNLVKAEKDKQIKYLDLAREVVDMWDVDSAIIVPIVVSANGLIAKSLDQHLRRLSLGSWIKGLIQKAVLLDTARIVRRFLSLEP

SEQ ID NO: 12925 - protein, 1205 aa, Cosmia trapezina
MLTRSRAQQLRNTQPTSSGSSLSSASQLPEPAPDVSQVIPAAAVASSSSDEYFSPPTTPPPVRRRGRGRPPASLGPRGPSASDRVPAPGGSVQRMRWTQTVNENVMRAYFGATEGGSNLTAYRGRMLSLFQVLEPAVNVSAQRLSDQVRVIQRNHMLDDVVLDRLRLESRNSRVTSVSPMVAVQLQNLPSASPRPDCVGEEDDSGAISVSSQCNVQLRSALEDAFREYRSAPPGLRPRLPRLPMHKKNKALVGALDSQLSNCFDGSKDLADTHSILYCAAVAACRVAHVKFPNSDRVPRPKPAVPAWQCRIERRIGEARALIGKLICFREGNTRPRVMRFVRRAFSGTDISPRDYFTCVTERIDFLKQKIWAWANRIRRYRRRVERYTQNRTFQSDERWVYRAWERPDQGVADTQLPDDDAMCSFWRSIWSVPVSHTEGDWTREVERACDHIPQMGALTISPQDVARAVRPLPNWKSPGPDGLHNFWIKWFQRSHARLASQFQSALQSGSLPQFLTTGITHLLHKSGSTAEPRNYRPITCLPTVYKVLTSILRAKINKHIDTNSIMSASQNGCGNGSRGTKELLLIDMTINQQVRRSRKDLSTCWIDYKKAYDSVPHTWLMRVLELYKIDATLRTFLMSCMGQWRTVLRYPGCRNIQRNSEPIRIERGIFQGDSLSPLWFCLALNPLSTLLEDSGLGYRLRRGGQVISHLLYMDDLKLFAPNNLQLMELLKVTETFSSAIRMGFGVDKCAVMHVKRGEIVESVRTQLSDSIHLRSLSSLETYKYLGMSEALGINAADMKQSLRERFFGRLNKVLNSLLSGGNKVRAFNGWVMPVLMYSFGILKWTQTELDALDRRVRTLLTANRMHHPRSSVMRLYIPRKCGGRGFLNAKTLHNREVCSLREYFLEADVGMHRDVVSVDKGLTPLSLANENWRKPVVLDTNDRREVWQSKELHGRFYRALHGPDVDFLASVSWLRFGDLFGETEGFVFAIMDEVMMTNNYRKYIVKDGTVDICRACHRPGESIRHIISGCSRLANGDYLHRHNLVARIIHQQLALKYSLVESEVPYYRYVPDPVLENGNITLYWDRSIITDRTIVANKPDIVVIDRLERRTMIVDIAVPHDENLVKAEKDKQIKYLDLAREVVDMWDVDTAIIVPIVVTANGLIAKSLDQHLRRLSLGGWIKGLMQKAVLLDTARIVRRFLSQQP

SEQ ID NO: 12926 - protein, 912 aa, Cosmia trapezina
MTRATRPKPAVPAWQCRIERRIGGARALIGKLICFREGNTRPRVMRFVRRAFSGTDVSPQDYMSRVTERIDFLRQKVYAWANRIRRYKRRVDRYTQNRTFQSDERWVYRGWERPDQGVTDTRLPDDDAMCSFWRSIWSVPVSHTEGDWAREVRRACDPIPEMGAITICPQDVARAVRPLPNWKSPGPDGLHNFWIKWFLGSHARLAAQYQSALQSGSLPQFLTTGITHLLHKSGSTTEPKNYRPITCLPTVYKVLTSILRAKINEHIDTNSIMSASQNGSRNGSRGTKELLLIDMAISQQVRRSRRDLSTCWIDYKKAYDSVPHTWLMRVLELYKVDATLRTFLMSCMGQWRTVLRYPGCRNIQRNSEPIRIERGIFQGDSLSPLWFCLALNPLSTLLEDSGLGYRLRRGGQVISHLLYMDDLKLFAPSNLQLMELLKVTETFSSAIRMGFGVDKCAVMHVKRGEIVESVGTQLSDSINLRTLSAAETYKYLGMSEALGINVADMKQSLKERFFGRLKKVFNSLLSGGNKVRAFNGWVMPVLMYSFGILKWTQTELDALDRRVRTLLTAYRMHHPRSSVMRLYIPRKCGGRGFLNAKALHNREICSLREYFLETDVGMHRDVVAVDKGLTPLSLAKENWRKPVVLDANDRMEVWQSKELHGRFFRALHGPDVNLLASVAWLRSGDLFGETEGFVCAIMDEVIMTNNYRRFIVKDGTVDICRACHRPGESIRHIISGCSRLANEEYLHRHNLVARIIHQQLALKYSLVESEVPYYRYVPDPVLENGHITLYWDRSIITDRTIVANKPDIVVVDRTERRAMIVDITVPHDGNLVKAEKDKQIKYIDLAREVVDMWDVDSAVIVPIVVSANGLIAKSLDQHLRRLSLGSWIKGLIQKAVLLDTARIVRRFLSLEP

SEQ ID NO: 12927 - protein, 1197 aa, Mamestra brassicae
MLTRSRARHLATHPSPSASSLSSASPPPEPSPTVSAVTPAVAVASSSSDEYFSPPTTPPPARRRRGRRPPDGLGPRGPPASDRVPAPGGSVQRMRWTQSINENVMRSYFGATEGGTNLTAYRGRMLSLFQVLEPAVNVSAQRLSDQVRVIQRNRMLDDSVLDRLRMEMCGHVITPPSQTVAPPQSQISSHADEASNDRVTNVSTQCNEELRSTLECAIREYRYIPPELRPRLPRLPMHNKNRALVAALDSQLSNYFDDCEDLTDTHSIMYCAAIAACRVAHVKMTNDRVTRPKPAVPAWQCRIERRIGGARALIGKLICFREGNTRPRVMRFVRRAFSGTDISPRDYMSRVTERIDFLKQKVYAWANRIRRYRRRVERYTQNRTFRSNERWVYRVWEQPDHGVTDTRLPDDDAMCSFWRNIWSVPVSHTEGDWIREVERTCDPLPEMGAITISPQDVARAVRPLPNWKSPGPDGLHNFWIKWLQRSHARLASQYQSALESGSLPKFLTTGVTHLLHKSGSTAEPKNYRPITCLPTVYKVLTSILRAKINNHINSNNIMSVSQNGCRNGSRGTKELLLIDMAISQQVRRSRKDLSTCWIDYKKAYDSVPHTWLMRVLELYKIDTMLRTFLMSCMGQWRTVLRYPGCRNIQRNSEPVRIERGIFQGDSLSPLWFCLALNPLSTLLENSGLGYRLKRGGQVISHLLYMDDLKLFAPSNLQLMELLKVTETFSSAIRMEFGVDKCAVMHVKRGEIMESVGIQLSDSINLRSLSSTETYKYLGMSEALGINVTDMKQSLKERFFGRLKKVFNSLLSGGNKVRAFNGWVMPVLMYSFGVLKWTQTELDALDRRVRTLLTAYRMHHPRSSVMRLYIPRKCGGRGFLNAKTLHNREICSLREYFLAVDVGIHRDVVAVDKGLTPLSLANENWRKPAVLDTDDRRAVWQSKELHGRYFRALHGPDVDQLASVAWLRFGDLFGETEGFVCAIMDEVIMTNNYRRFIVKDGTVDICRACHRPGESIRHIVSGCSRLANGEYLHRHNLVARIIHQQLALKYSLVESEVPYYRYAPDPVLDNGNITLYWDRSIITDRTIVANKPDIVVVDRIERRAMIVDITVPHDENLVKAEKDKQIKYIDLAREVVDMWDVDSAIIVPIVVSANGLIATSLDQHLRRLSLGSWIKGLIQKAVLLDTARIVRRFLSLEP

SEQ ID NO: 12928 - protein, 1107 aa, Mamestra brassicae
MRWTQTINENVMRSYYGATEGGTNLTAYRGRMLSLFQVLEPAVNVSAQRLSDQVRVILRNRMLDDAVLDRLRLESRSGRVSPASPPAAVQIQSSISPRSNNVGEDDDDGAISVSTQCNERLRSALEDAFREYRSTPPELRPRLPRLPMHNKNRALVCALDSQLTNCFDSSEDLADTHSILYCAAAAACRVAHVKFLNSDRATRPAVPAWQCRIERRIGEARALIGKLICFREGNTRRRVMRFVRRAFSGTDTSPRDYLTRVTERIDFLKQKIYAWANRIRRYKRRVERYTQNRTFQSNERWVYRAWERPDQGVTDTRLPDDDVMCSFWRNIWSVPVGHTEGDWIREVERACDPILEMGATTISPQDVARAVRPLPNWKSPGPDGLHNFWIKWFTGSHARLASQFQSALESGSLPQFLTTGITHLLHKSGSTAEPKNYRPITCLPTIYKVLTSILRAKINHHIESNSIMSASQNGCRNGSRGTKELLLMDIAISQQVRRSRKDLSTCWIDYKKAYDSVPHTWLMRVLELYKVDAVLRTFLMSCMGQWRTVLRYPGCRQIQVNGDPIRIERGIFQGDSLSPLWFCLALNPLSTLLEGSGQGYRLRRGGQVISHLLYMDDLKLFAPNNLQLMELLKVTETFSSAISMEFGVDKCAVMHVKRGEIMESVGTQLSDSIHLRSLSSTETYKYLGMSEALGINANDMKQSLKERFFGRLNKVLNSLLSGGNTVRAFNGWVMPVLMYSFGILKWTQTELDALDRRVRSLLTANRMHHPRSSVMRLYIPRKCGGRGFLNAKTLHNREICSLREFFLEADVGMHWDVVAVDKGLTALFLANENWRKPVVLDTNDRRKVWQSKELHGRFYRVLHGPDVDFLASVAWLRFGDLFGETEGFVCAIMDEVMMTNNYRKYIVKDGTVGICRACHRPGESIRHIISGCPSLANGDYLHRHNLVARIIHQQLALKYNLVDTEVPYYRYVPDPVLENGNCTLYWDRSIITDRTIVANKPDIVVIDRLERRAMIVDIAVPHDENLVKTEKDKQTKYLDLAREVVDMWDVNTAVIVPIVVTANGIIAKSLDQHLKRLSLGSWIKGLIQKAVLLDTARIVRRFLSQGP

SEQ ID NO: 12929 - protein, 929 aa, Mamestra brassicae
MYCAAVAACRVAHVKMTNDRVTRPKPAVPAWQCRIERRIGGARALIGKLICFREGNTRPRVMRFVRRAFSGTDISPRDYMSRVTERIDFLKQKVYAWANRIRRYRRRVERYTQNRTFRSNERWVYRVWEQPDQGVTDTRLPDDDAMCSFWRNIWSVPVSHTEGGWIREVERACDPLPEMGAITISPQDVARAVRPLPNWKSPGPDGLHNFWIKWLQRSHARLASQYQTALESGSLPEFLTTGVTHLLHKSGSTVEPKNYRPITCLPTVYKVLTSILRAKINNHINSNNIMSVSQNGCRNGSRGTKELLLIDMAISQQVRRSRKDLSTCWIDYKKAYDSVPHTWLMRVLELYKIDTMLRTFLMSCMGQWRTVLRYPGCRNIQRNSEPVRIERGIFQGDSLSPLWFCLALHPLSTLLENSGLGYRLKRGGQVISHLLYMDDLKLFAPSNLQLMELLKVTETFSSAIRMEFGVDKCAVMHVKRGEIIESVGTQLSDSINLRSLSSTETYKYLGMSEALGINVTDMKQSLRERFFGRLKKVFNSLLSGGNKVRAFNGWVMPVLMHSFGVLKWTQTELDALDRRVRTLLTAYRMHHPRSSVMRLYIPRKCGGRGFLNAKTLHNREICSLREYFLAVDVGMHRDVVTVDKGLTPLSLANENWRKPAVLDTNDRRAVWQSKELHGRFFRALHGPDVDQLASVAWLRFGDLFGETEGFVCAIMDEVIMTNNYRRFIVKDGTVDICRACHRPGESIRHIVSGCSRLANGEYLHRHNLVARIIHQQLALKYSLVESEVPYYRYAPDPVLDNGNITLYWDRSIITDRTIVANKPDIVVVDRIERSAMIVDITVPHDENLVKAEKDKQIKYIDLAREVVDMWDVDSAIIVPIVVSANGLIATSFDQHLRRLSLGSWIKGLIQKAVLLDTARIVRRFLSLEP

SEQ ID NO: 12930 - protein, 973 aa, Mamestra brassicae
MNICNNNNNHLPMHNKNRALVAALDSQLSNYFDDCEDLTDTHSIMYCAAVAACRVAHVKMTNDRVTRPKPAVPAWQCRIERRIGGARALIGKLICFREGNTRPRVMRFVRRAFSGTDISPRDYMSRVTERIDFLKQKVYAWANRIRRYRRRVERYTQNRTFRSNERWVYRVWEQPDQGVTDTRLPDDDAMCSFWRNIWSVPVSHTEGGWIREVERACDPLPEMGAITISPQDVARAVRPLPNWKSPGPDGLHNFWIKWLQRSHARLASQYQTALESGSLPEFLTTGVTHLLHKSGSTAEPKNYRPITCLPTVYKVLTSILRAKINNHINSNNIMSVSQNGCRNGSRGTKELLLIDMAISQQVRRSRKDLSTCWIDYKKAYDSVPHTWLMRVLELYKIDTMLRTFLMSCMGQWRTVLRYPGCRNIQRNSEPVRIERGIFQGDSLSPLWFCLALNPLSTLLENSGLGYRLKRGGQVISHLLYMDDLKLFAPSNLQLMELLKVTETFSSAIRMEFGVDKCAVMHVKRGEIIESVGTQLSDSINLRSLSSTETYKYLGMSEALGINVTDMKQSLRERFFGRLKKVFNSLLSGGNKVRAFNGWVMPVLMHSFGVLKWTQTELDALDRRVRTLLTAYRMHHPRSSVMRLYIPRKCGGRGFLNAKTLHNREICSLREYFLAVDVGMHRDVVTVDKGLTPLSLANENWRKPAVLDTNDRRAVWQSKELHGRFFRALHGPDVDQLASVAWLRFGDLFGETEGFVCAIMDEVIMTNNYRRFIVKDGTVDICRACHRPGESIRHIVSGCSRLANGEYLHRHNLVARIIHQQLALKYSLVESEVPYYRYAPDPVLDNGNITLYWDRSIITDRTIVANKPDIVVVDRIERRAMIADITVPHDENLVKAEKDKQIKYIDLAREVVDMWDVDSAIIVPIVVSANGLIATSLDQHLRRLSLGSWIKGLIQKAVLLDTARIVRRFLSLEP

SEQ ID NO: 12931 - protein, 1198 aa, Noctua fimbriata
MLTRAAAKRARLSPPDPSLSSASPPPESSPVMSAVTPAVAVASSSSDEYFSPPTTPPPVRRRGGRRPPDGLGPRGPPASDRVPAPGGSVQRMRWTQSINENVMRSYYGATEGGNNLTAYRIRMLSLFQVLEPAVNVSAQRLSDQVRVIQRNRMLDDTVLDRLRTEMQSSHVIATPPPQAVVPPQSTIIPNRDNDVSNDIVTNVSTQCNEEMRSALEGAIREYRFMQPDLRPRIPRLPMHNKNRALVAVLDSQLSNYFDNCEDLTDAHSILYCAAVAACRVAHVKFSNDRATRPKPAVPPWQYRIERRIGGARALIGKLICFREGNTRPRVMRFVRRAFSGTDISPRDYMSRITERIDFLKQKVYAWANRIRRYKRRVDRYTQNRTFQRDERWVYRAWERPDQGVADTRLPDDDAMCSFWRSIWSVPVSHTEGEWTQGVERACDLVPEMGAITISPQDVVRAVRPLPNWKSPGPDGLQNFWIKWFTRSHARLAILFQSALESGSLPEFLTTGITHLLHKSGSTAEPKNYRPITCLPTVYKVLTSILRAKINKHIDDNSIMSASQNGCRNGSRGTKELLLIDMAISQQVRRSRRDLSTCWIDYKKAYDSVPHTWLMRVLELYKVDATLRTFLMSCMGQWRTVLRYPGCRQIQRNSEPIRIERGIFQGDSLSPLWFCLALNPLSTLLEDSGLGYRLRRGGQVISHLLYMDDLKLFAPNDLQLMELLKVTETFSSAIRMEFGVDKCAVMHVKRGEIVESVGTQLSDSINLRSLSATETYKYLGMSEALGINVADMKQSLKERFFGRLKKVFNSLLSGGNKVRAFNGWVMPVLMYSFGILKWTQTELDALDRRVRTLLTAYRMHHPRSSIMRLYIPRKCGGRGFLNAKTLHNREICSLREYFLETDVGMHRDVVAVDKGLTPLSLAKENWRKPLVLDTNDRMEVWQSKELHGRFFRALHGPDVDLSASVAWLRSGDLFGETEGFVCAIMDEVMMTNNYRRFIVKDGTVDICRACHRPGESIRHIISGCSRLANGEYLHRHNLVARIIHQQLALKYNLVESEVPYYKYVPDPVLENGSITLYWDQSIITDRTIVANKPDIVVVDRSERRTMIVDITVPHDENLVKAEKDKKIKYLDLAREVVDMWDVDSAIIVPIVVSAHGLIAKSLDQYLRRLSLGSWIKGLIQKAVLLDTARIVRRFLSLEP

SEQ ID NO: 12932 - protein, 1198 aa, Noctua fimbriata
MLTRSAARRARLSPPDPSLSSASPPPESSPVVSAVTPAVAVASSSSDEYFSPPTTPPPVRRRGGRRPPDGLGPRGPPASDRVPAPGGSVQRMRWTQSINANVMRAYYGATEGGNNLTAYRVRMLSLFQVLEPAVNVSAQRLSDQVRVIQRKRMLDDTVLDRLRTEMQSSHVIATPPPQAVVPPQSTIIPNRDNDVSNDIVTNVSTQCNEEMRSALEGAIREYRFMQPDLRPRIPRLPMHNKNRALVAVLDSQLSNYFDNCEDLTDAHSILYCAAVAACRVAHVKFSDDRATRPKPAVPPWQYRIERRIGGARALIGKLICFREGNTRPRVMRFVRRAFSGTDISPRDYMSRITERIDFLKQKVYAWANRIRRYKRRVDRYTQNRTFQRDERWVYRAWERPDQGVADTRLPDDDAMCSFWRSIWSVPVSHTEGEWTQGVERACDLVPEMGAITISPQDVVRAVRPLPNWKSPGPDGLHNFWIKWFTRSHARLAILFQSALESGSLPEFLTTGITHLLHKSGSTAEPKNYRPITCLPTVYKVLTSILRAKINKHIDDNSIMSASQNGCRNGSRGTKELLLIDMAISQQVRRSRSDLSTCWIDYKKAYDSVPHTWLMRVLELYKVDATLRTFLMSCMGQWRTVLRYPGCRQIQRNSEPIRIERGIFQGDSLSPLWFCLALNPLSTLLEDSGLGYRLRRGGQVISHLLYMDDLKLFAPNDLQLMELLKVTETFSSAIRMEFGVDKCAVMHVKRGEIVESVGTQLSDSINLRSLSATETYKYLGMSEALGINVADMKQSLKERFFGRLYKVFNSLLSGGNKVRAFNGWVMPVLMYSFGILKWTQTELDALDRRVRTLLTAYRMHHPRSSVMRLYIPRKCGGRGFLNAKTLHNREICSLREYFLETDVGMHRDVVAVDKGLTPLSLAKENWRKPLVPDTNDRMEVWQSKELHGRFFRALHGPDVDLSASVAWLRCGDLFGETEGFVCAIMDEVMMTNNYRRFIVKDGTVDICRACHRPGESIRHIISGCSRLANGEYLHRHNLVARIIHQQLALKYNLVESEVPYYKYVPDPVLENGSITLYWDQSIITDRTIVANKPDIVVVDRSERRTMIVDITVPHDENLVKAEKDKKIKYLDLAREVVDMWDVDSAIIVPIVVSAHGLIAKSLDQYLRRLSLGSWIKGLIQKAVLLDTARIVRRFLSLEP

SEQ ID NO: 12933 - protein, 1198 aa, Noctua fimbriata
MLTRSAARRVRLSPPDPSLSSASPPPESSPVVSAVTPAVAVASSSSDEYFSPPTTPPPVRRRGGRRPPDGLGPRGPPASDRVPAPGGSVQRMRWTQSINANVMRAYYGATEGGNNLTAYRVRMLSLFQVLEPAVNVSAQRLSDQVRVIQRNRMLDDTVLDRLRTEMQSSHVIATPPPQAVVPPQSTIIPNRDNDVSNDIVTNVSTQCSEEMRSALEGAIRVYRFMQPDLRPRIPRLPMHNKNRALVAVLDSQLSNYFDNCEDLTDAHSILYCAAVAACRVAHVKFSDDRATRPKPAVPPWQYRIERRIGGARALIGKLICFREGNTRPRVMRFVRRAFSGTDISPRDYMSRITERIDFLKQKVYAWANRIRRYKRRVDRYTQNRTFQRDERWVYRAWERPDQGVADTRLPDDNAMCSFWRSIWSVPVSHTEGEWTQGVERACDLVPEMGAITISPQDVVRAVRPLPNWRSPGPDGLHNFWIKWFTRSHARLAILFQSALESGSLPEFLTTGITHLLHKSGSTAEPKNYRPITCLPTVYKVLTSILRAKINKHIDDNSIMSASQNGCRNGSRGTKELLLIDMAISQQVRRSRSDLSTCWIDYKKAYDSVPHTWLMRVLELYKVDATLRTFLMSCMGQWRTVLRYPGCRQIQRNSEPIRIERGIFQGDSLSPLWFCLALNPLSTLLEDSGLGYRLRRGGQVISHLLYMDDLKLFAPNDLQLMELLKVTETFSSAIRMEFGVDKCAVMHVKRGEIVESVGTQLSDSINLRSLSATETYKYLGMSEALGINVADMKQSLKERFFGRLKKVFNSLLSGGNKVRAFNGWVMPVLMYSFGILKWTQTELDALDRRVRTLLTAYRMHHPRSSVMRLYIPRKCGGRGFLNAKTLHNREICSLREYFLETDVGMHRDVVAVDKGLTPLSLAKENWRKPVVFDTNYRMEVWQSKELHGRFFRALHGPDVDLSASVAWLRSGDLFGETEGFVCAIMDEVMMTNNYRRFIVKDGTVDICRACHRPGESIRHIISGCSRLANGEYLHRHNLVARIIHQQLALKYNLVELEVPYYKYVPDPVLENGSITLYWDQSIITDRTIVANKPDIVVVDRSERRTMIVDITVPHDENLVKAEKDKKIKYLDLAREVVDMWDVDSAIIVPIVVSAHGLIAKSLDQYLRRLSLGSWIKGLIQKAVLLDTARIVRRFLSLEP

SEQ ID NO: 12934 - protein, 1199 aa, Noctua fimbriata
MLTRSAAARRARLLPPDPSLSSASPPPESSPIVSAVTPAVAVASSSSDEYFSPPTTPPPVRRRGGRRPPDGLGPRGPPASDRVPAPGGSVQRMRWTQSINENVMRSYYGATEGGNNLTAYRVRMLSLFQVLEPAVNVSAQRLSDQVRVIQRNRMLDDTVLDRLRTEMQSSHVITPSAQAVVLPQSSTITNRDNDVSNDMVTNVSTQCNEEMRSALEGAIREYRFMQPDLRPRIPRLPMHNKNRALVAVLDSQLLNYFDNCEDLTDAHSVLYCAAVAACRVAHVKFFDDRATRPKPVVPPWQYRIERRIDGARALIGKLICFREGNTRPRVMRFVRRAFSGTDISPRDYTSRITERIDFLKQKVYAWASRIRRYKRRVDRYTQNRTFQRDERWVYRAWERPDQGVADTRIPDDDAMCSFWRSIWSVPVSHTEGEWTREVERACDLVPEMGAITISPQDVVRAVRPLPNWKSPGPDGLHNFWIKWFTRSHARLAILFQSALESGSLPEFLTTGITHLLYKSGSTAEPKNYRPITCLPTVYKVLTSILRAKINKHIDDNSIMSASQNGCRNGSRGTKELLLIDMAISQQVRRSRRDLSTCWIDYKKAYDSVPHTWLMRVLELYKVDATLRTFLMSCMGQWRTVLRYLGCRQIQRNSEPIRIERGIFQGDSLSPLWFCLALNPLSTLLEDSGLGYQLRRGGQVISHLLYMDDLKLFAPNDLQLMELLKVTETFSSAIRMEFGVDKCAVMHVKRGEIVESVGTQLSDSINLRSLSATENYKYLGMSEALGINVADMKQSLKERFFGRLKKVFNSLLSGGNKVRAFNGWVMPVLMYSFGILKWTQTELDALDRRVRTLLTAYRMHHPRSSVMRLYIPRKCGGRGFLNAKTLHNREICSLREYFLETDVGMHRDVVAVDKGLTPLSLAKENWRKPLVLDTNDRMEVWQSKELHGRFFRALHGPDVDLSASVAWLRSGDLFGETEGFVCAIMDEVMMTNNYRRFIVKDGTVDICRACHRPGESIRHIISGCSRLANGEYLHRHNLVARIIHQQLALKYNLVESEVPYYKYVPDPVLENGSITLYWDQSIITDRTIVANKPDIVVVDRSERRTMIVDITVPHDENLVKAEKDKKIKYLDLAREVVDMWDVDSAIIVPIVVSAHGLIAKSLDQYLRTRASLGSWIKGLIQKAVLLDTARIVRRFLSLEP

SEQ ID NO: 12935 - protein, 1197 aa, Noctua fimbriata
MLTRAAAKRARLSPPDPSLSSASPPPESSPVVSAVTPAVAVASSSSDEYFSPPTTPPPVRRRGGRRPPDGLGPRGPPASDRVPAPGGSVQRMRWTQSINENVMRSYYGATEGGNNLTAYRVRMLSLFQVLEPAVNVSAQRLSDQVRVIQRNRMLDDTVLDRLRTETQSSHVITPSAQAVVLPQSSTIPNRDNDVSNDMVTNVSTQCNEEMRSALEGAIREYRFMQPDLRPRIPRLPMHNKNRALVAVLDSQLSNYFDNCEDLTDAHSILYCAAVAACRVAHVKFSDDRATRPKPAVPPWQYRIERRIGGARALIGKLICFREGNTRPRVMRFVRRAFSGTDISPRDYMSRITERIDFLKQKVYAWASRIRRYKRRVDRYTQNRTFQRDERWVYRTWERPDQGVADTRIPDDDAMCSFWRSIWSVPVSHTEGEWTREVERACDLVPEMGAITISPQDVVRAVRPLPNWKSPGPDGLHNFWIKWFTRSHARLAILFQSALESGSLPEFLTTGITHLLHKSGSTAEPKNYRPITCLPTVYKVLTSILRAKINKHIDDNSIMSASQNGCRNGSRGTKELLLIDMAISQQVRRSRRDLSTCWIDYKKAYDSVPHTWLMRVLELYKVDATLRTFLMSCMGQWRTVLRYPGCRQIQRNSEPIRIERGIFQGDSLSPLWFCLALNPLSTLLEDSGLGYQLRRGGQVISHLLYMDDLKLFAPNDLQLMELLKVTETFSSAIRMEFGVDKCAVMHVKRGEIVESVGTQLSDSINLRSLSATETYKYLGMSEALGINVADMKQSLKERFFGRLKKVFNSLLSGGNKVRAFNGWVMPVLMYSFGILKWTQTELGALDRRVRTLLTAYRMHHPRSSVMRLYIPRKCGGRGFLNAKTLHNREICSLREYFLETDVGMHRDVVAMDKGLTPLSLAKENWRKPLVLDTNDRMEVWQSKELHGRFFRALHGPDVDLSASVAWLRSGDLFGETEGFVCAIMDEVMMTNNYRRFIVKDGTVDICRACHRPGESIRHIISGCSRLANGEYLHRHNLVARIIHQQLALKYNLVESEVPYYKYVPDPVLENGSITLYWDQSIITDRTIVANKPDIVVVDRSERRTMIVDITVPHDENLVKAEKDKKIKYLDLAREVVDMWDVDSAIIVPIVVSAHGLIAKSLDQYLRRLSLGSWIKGLIQKAVLLDTARIVRRFLSLEP

SEQ ID NO: 12936 - protein, 1106 aa, Noctua fimbriata
MRWTQSINENVMRSYYGATEGGNNLTAYRVRMLSLFQVLEPAVNVSAQRLSDQVRVIQRNRMLDDTVLDRLRTETQSSHVITPSAQAVVLPQSSTIPNRDNDVSNDMVTNVSTQCNEEMRSALEGAIREYRFMQPDLRPRIPRLPMHNKNRALVAVLDSQLSNYFDNCEDLTDAHSILYCAAVAACRVAHVKFSDDRATRPKPAVPPWQYRIERRIGGARALIGKLICFREGNTRPRVMRFVRRAFSGTDISPRDYMSRITERIDFLKQKVYAWASRIRRYKRRVDRYTQNRTFQRDERWVYRTWERPDNGVADTRIPDDDAMCSFWRSIWSVPVSHTEGEWTREVEQACDLVPEMGAITISPQDVVRAVRPLPNWKSPGPDGLHNFWIKWFTRSHARLAILFQSALESGSLPEFLTTGITHLLHKSGSTAEPKNYRPITCLPTVYKVLTSILRAKINKHIDDNSIMSASQNGCRNGSRGTKELLLIDMAISQQVRRSRRDLSTCWIDYKKAYDSVPHTWLMRVLELYKVDATLRTFLMSCMGQWRTVLHYPGCRQIQRNSEPIRIERGIFQGDSLSPLWFCLALNPLSTLLEDSGLGYQLRRGGQVISHLLYMDDLKLFAPNDLQLMELLKVTETFSSAIRMEFGVDKCAVMHVKRGEIVESVGAQLSDSINLRSLSATETYKYLGMSEALGINVADMKQSLKERFFGRLKKVFNSLLSGGNKVRAFNGWVMPVLMYSFGILKWTQTELDALDRRVRTLLTAYRMHHPRSSVMRLYIPRKCGGRGFLNAKTLHNREICSLREYFLETDVGMHRDVVAMDKGLTPLSLAKENWRKPLVLDTNDRMEVWQSKELHGRFFRALHGPDVDLSASVAWLRSGDLFGETEGFVCAIMDEVMMTNNYRRFIVKDGTVDICRACHRPGESIRHIISGCSRLANGEYLHRHNLVARIIHQQLALKYNLVESEVPYYKYVPDPVLENGSITLYWDQSIITDRTIVANKPDIVVVDRSERRTMIVDITVPHDENLVKAEKDKKIKYLDLAREVVDMWDVDSAIIVPIVVSAHGLIAKSLDQYLRRLSLGSWIKGLIQKAVLLDTARIVRRFLSLEP

SEQ ID NO: 12937 - protein, 868 aa, Noctua fimbriata
MRFVRRAFSGTDISPRDYMSRITERIDFLKQKVYAWANRIRRYKRRVDRYTQNRTFQRDERWVYRAWERPDQGVADTRLPDDDAMCSFWRSIWSVPVSHTEGEWTQGVERACDLVPEMGAITISPQDVVRAVRPLPNWKSPGPDGLHNFWIKWFTRSHARLAILFQSALESGSLPEFLTTGITHLLHKSGSTAEPKNYRPITCLPTVYKVLTSILRAKINKHIDDNSIMSASQNECRNGSRGTKELLLIDMAISQQVRRSRSDLSTCWIDYKKAYDSVPHTWLMRVLELYKVDATLRTFLMSCMGQWRTVLRYPGCRQIQRNSEPIRIERGIFQGDSLSPLWFCLALNPLSTLLEDSGLGYRLRRGGQVISHLLYMDDLKLFAPNDLQLMELLKVTETFSSAIRMEFGVDKCAVMHVKRGEIVESVGTQLSDSINLRSLSATETYKYLGMSEALAINVADMKQSLKERFFGRLKKVFNSLLSGGNKVRAFNGWVMPALMYSFGILKWTQTELDALDRRVRTLLTAYRMHHPRSSVMRLYIPRKCGGRGFLNAKTLHNREICSLREYFLETDLGMHRDVVAVDKGLTPLSLAKENWRKPLVPDTNDRMEVWQSKELHGRFFRALHGPDVDLSASVAWLRCGDLFGETEGFVCAIMDEVMMTNNYRRFIVKDGTVDICRACHRPGESIRHIISGCSRLANGEYLHRHNLVARIIHQQLALKYNLVESEVPYYKYVPDPVLENGSITLYWDQSIITDRTIVANKPDIVVVDRSERRTMIVDITVPHDENLVKAEKDKKIKYLDLAREVVDMWDVDSAIIVPIVVSAHGLIAKSLDQYLRRLSLGSWIKGLIQKAVLLDTARIVRRFLSLEP

SEQ ID NO: 12938 - protein, 1107 aa, Noctua fimbriata
MRWTQSINENVMRSYYGATEGGNNLTAYRVRMLSLFQVLEPAVNVSAQRLSDQVRVIQRNRMLDDTVLDRLRTEMQSSHVIATPPPQAVVPPQSTIIPNRDNDVSNDIVTNVSTQCNEEMRSALEGAIREYRFMQPDLRPRIPRLPMHNKNRALVAVLDSQLSNYFDNCEDLTDAHSILYCAAVAACRVAHVKFSNDRATRPKPAVPPWQYRIERRIGGARALIGKLICFREGNTRPRVMRFVRRAFSGTDISPRDYMSRITERIDSLKQKVYAWANRIRRYKRRVDRYTQNRTFQRDERWVYRAWERPDQGVADTRLPDDDAMCSFWRSIWSVPVSHTEGEWTQGVERACDLVPEMGAITISPQDVVRAVRPLPNWKSPGPDGLHNFWIKWFTRSHARLAILFQSALESGSLPEFLTTGITHLLHKSGSTAEPKNYRPITCLPTVYKVLTSILRAKINKHIDDNSIMSASQNGCRNGSRGTKELLLIDMAISQQVRRSRRDLSTCWIDYKKAYDSVPHTWLMRVLELYKVDATLRTFLMSCMGQWRTVLRYPGCRQIQRNSELIRIERGIFQGDSLSPLWFCLALNPLSTLLEDSGLGYRLRRGGQVISHLLYMDDLKLFAPNDLQLMELLKVTETFSSAIRMEFGVDKCAVMHVKRGEIVESVGTQLSDSINLRSLSATETYKYLGMSEALGINVADMKQSLKERFFGRLKKVFNSLLSGGNKVRAFNGWVMPVLMYSFGILKWTQTELDALDRRVRTLLTAYRMHHPRSSIMRLYIPRKCGGRGFLNAKTLHNREICSLREYFLETDVGMHRDVVAVDKGLTPLSLAKENWRKPLVLDTNDRMEVWQSKELHGRFFRALHGPDVDLSASVAWLRSGDLFGETEGFVCAIMDEVMMTNNYRRFIVKDGTVDICRACHRPGESIRHIISGCSRLANGEYLHRHNLVARIIHQQLALKYNLVESEVPYYKYVPDPVLENGSITLYWDQSIITDRTIVANKPDIVVVDRSERRTMIVDITVPHDENLVKAEKDKKIKYLDLAREVVDMWDVDSAIIVPIVVSAHGLIAKSLDQYLRRLSLGSWIKGLIQKAVLLDTARIVRRFLSLEP

SEQ ID NO: 12939 - protein, 868 aa, Atethmia centrago
MRFVRRAFSGTDISPQDYMSRVTERIDFLKQKVYAWANRIRRYKRRVDRYTQNRTFQSDERWVYRGWEQRDQGVTDTRLPDDDVMCSFWRSIWSVPVSHTEGDWARKVERACDPLPEMGAITICPQDVARAVRPLPNWKSPGPDGLHNFWLKWFLGSHARLAAQYQTALESGSLPQFLTIGVTHLLHKSGSTAEPKNYRPITCLPTVYKVLTSILRAKINKHIDTNSIMSASQNGCRNGSRGTKELLLIDMTISQQVRRFRKDLSTCWIDYKKAYVSVPHTWLMRVLELYKVDATLRTFLMSCMGQWRTVLRYPGCRNIQRNSEPIRIERGIFQGDSLSPLWFCLALNPLSTLLEDSGLGYRLRRGGQVISHLLYMDDLKLFASNNLQLMELLKITETFSSAIRMEFGVDKCAVMHVKRGEIVESVGTLLSDSINLRALSASETYKYLGMSEALGINVTDMKQSLKQRFFDRLKKLFNSLLSGGNKVRAFNGWVMPVLMYSFGILKWTQTELDALDRRVRTLLTAYRMHHPRSSVMRLYIPRKCGGRGFLNAKTLHNREVCSLREYFLEADMGMHRDVVAVDKGLTPLSLAKENWRKLVVLDTNDRREVWQSKELHGRFFRALHEPDVDFQASVAWLRFGDLFGETEGFVCAIMDEVIMTKNYRRFIVKDGTVDMCRACHRPGKSIRHIISGCSRLANEEYLHRHNLVARIIYQQLALKYSLVESEVPYYRYVPDPVLDNGNITLYWDRSIITDRTIVANKPDIVVVDRTERRAMIVDITVPHDGNLVKAEKDKQIKYLDLAREVVDMWDVDSAIIVPIVVSANGLIAKSLDQHLRRLTLDGWIKGLIQKAVLLDTARIVRRFLSLEP

SEQ ID NO: 12940 - protein, 1195 aa, Atethmia centrago
MLTRSAARARLPPPDFSLSSASPPPVPNPSVTSPAAVVASSSSDEYFSPPTTPPPVRRRGGHRPPDGLGSRGPPASDRVPAPGGSVQRMRWTRSINENVMRSYYGATEGGNNLTAYRVRMLSLFQVLEPAVNVSAQRLSDQVRVIQRNHMLDDTVLDRLRSETQSGHAIAPPSQTVVVSTQLRTNQADEGSDDRATNVNTQYNVELRSALEDAIREYRIMSPELRPRLPRLPMHKKNRALVAALDTQLSNYYFDDCEDLTDTHSILYCAAVAVCRVAHVKFAKDSRATRPKPTVPAWQRRIERRIGGARALIGKLICFREGNTRPRVMRFVRRAFSGTDIGPQDYMSRVTERIDFLKQKVYAWANRIRRYKRRVERYTQNRTFQSDERWVYRGWERPDQGVTGTRLPDDDVMCSFWRSIWSVPVSHTEGDWVREVERACDPIPEMGAITISPQDVARAVRPLPNWKSPGPDGLHNFWLKWFLRSHARLAAQYQTALESGSLPQFLTTGVTHLLHKSGSTVEPKNYRPITCLPTVYKVLTSILRAKINEHIDTNSIMSASQNGCRNGSRGTKELLLIDITITQQVRHSRKDLSTCWIDYKKAYDSVPHTWLMRVLELYKVDATLRTFLMSCMGQWRTVLRYPGCRNIQRNSEPIRIERGIFQGDSLSPLWFCLALNPLSTLLEDSGLGYRLRRGSQAISHLLYMDDLKLFASNNLQLMELLKITETFSSAIRMEFGVDKCAVMHVKRGKIMESVGTQLSDSINLRALSASETYKYLGMSEALGINVTDMKQSLKERFFGRLKKVFNSLLSGGNKVRAFNGWVMPVLMYSFGILKWTQTELDALDRRVRTLLTAYRMHHPRSSVMRLYIPRKCGGRGFLNAKTLHNREVCSLREYFLKADVGMHRDMVAVDKGLTPLSLAKENWRKLVVLDTNDRREVWQSKELHGRFFRALHEPDVDFQASVAWLRFGDLFGETEGFVCAIMDEVIMTKNYRRFIVKDGTIDVCRACQRPGESIRHIISGCSRLANEEYLHRHNLVARIIHQQLALKYNLVESEVPYYRYVPDPVLENGNITLYWDRSIITDRTIIANKPDIVVVDRTERRAMIVDITVPHDGNLVKAEKDKQIKYLDLAREVVDMWDVNSAIIVPIVISANGLIAKSLDQHLRRLSLDSWIKGLIQRAVLLDTARIVRRFLSLEP

SEQ ID NO: 12941 - protein, 868 aa, Atethmia centrago
MRFVRRAFSGTDISPQDYMTRVTERIDFLKQKVYAWANRIRRYKRRVDRYTQNRTFQSDERWVYRGWEQRDQGVTDTRLPDDDVMCSFWRSIWSVPVSHTEGDWARKVERACDPLPEMEAITICPQDVARAVRPLPNWKSPGPDGLHNFWLKWFLGSHARLAAQYQTALESGSLPQFLTIGVTHLLHKSGSTAEPKNYRPITCLPTVYKVLTSILRAKINKHIDTNSIMSASQNGCRNGSRGTKELLLIDMTISQQVRRFRKDLSTCWIDYKKAYDSVPHTWLMRVLELYKVDATLRTFLMSCMGQWRTVLRYPRCRNIQRNSEPIRIERGIFQGDSLSPLWFCLALNPLSTLLEDSGLGYRLRRGGQVISHLLYMDDLKLFASNNLQLMELLKITETFSSAIRMEFVVDKCAVMHVKRGKIVESVGTQLSDSINLRALFASETYKYLGMSEALGINVTDMKQSLKQRFFDRLKKVFNSLLSGGNKVRAFNGWVMPVLMYSFGILKWTQTELDALDRRVRTLLTAYRMHHPRSSVMRLYIPRKCGGRGFLNAKTLHNREVCSLREYFLEADVGMHRDVVAVDKGLTPLSLAKENWRKLVVLDTNDRREVWQSKELHGRFFRALHEPDVDFQASVAWLRFGDLFGETEGFVCAIMDEVIMTKNYRRFIVKDGTVDMCRACHRPGESIRHIISGCSRLANEEYLHRHNLVARIIHQQLALKYSLVESEVPYYRYVPDPVLDNGNITLYWDRSIITDRTIVANKPDIVVVDRTERRAMIVDITVPHDGNLVKAEKDKQIKYLDLAREVVDMWDVDSAIIVPIVVSANGLIAKSLDQHLRRLTLDGWIKGLIQKAVLLDTARIVRRFLSLEP

SEQ ID NO: 12942 - protein, 1194 aa, Autographa gamma
MLTRSKTRTPARPPSPDPSPSSASQLPDHVPAPAPEVASSSSDEYYSPPTTPTPVRRQGRRRPPSSLAPSGQPASNRAPAPGGDVRRMKWTLSINENVMRAYYGATEGGTNLTAYRARMLSLFQGLEPDVNVSAQRLSDQVRVIQRNHRLDDATLDRLRSEVQRSPATSTPSPAVVPITGSPPTNLVDGEEEDGAITVSTQCSENIRSTLEDTIREFRSTPPDIRPRLPRLPMHNRNKAIMGVLDSLLLAYFGSSEDLSDTHSILYCAALAACRVANVKINNQNLDTRPKPAVPAWQYGIERRVAEARALIGKLIAFKDGNSRPRVMRFVRRAFTGTSISPSEYTARVTERIDFFKQKVCAWANRIRRYKRRVDRFHLNRMFQRDQRWVFRTWERPVLGVDDGRLPDEDATNSFWRNIWSVPVSHSEGDWMRDVEESCEPIQEMGAITISPQDVANAIRPMSNWKAPGPDGLQNFWLKWFKSSHGCLASQFQCAIESESLPQFFTTGSTHLLHKTGSTTDPKNYRPITCLPTIYKLLTSILRVKINEHIDSNSIMSASQNGCRNGSRGTKELLLIDMAICQQVRRSKKNLSTCWIDYKKAYDSVPHSWLMRVLELYKINTTLRAFLVSCMRRWTTVLRYPGCRDIQQSGGPIRIERGIFQGDSLSPLWFCLALNPLSTLLENSRLGYSLRRGSQVISHLLYMDDLKLFASNELQLMGLLKITESFSNSIRMEFGVDKCAVMHVKQGGIVESQGIQLSDSINLRSLSAADTYKYLGMSEALGINVADMKQSLLTRFFGRLNKVLKSLLSGGNRVRAFNGWVMPVLMYSFGILKWTQTELDALDRRVRTLLTANRMHHPRSSVMRLYIPRKCGGRGFLNAKTLHNREVCNLREYFLQFDVGMHRDVVVVDKGFTPLSLGKENWHKPVVLSVKDRKDVWQSKELHGRYYRSLHGPDVDFLASVAWLRFGDLFGETEGFVCAIMDEVVMTNNYRKYIIKDGTVDICRACHCPGESIRHIISGCSRLANGEYLHRHNQVARIIHQQLALRYKLVEAEVPYYRYVPDPVLDNGHVTLYWDRSIITDRTIVANKPDIVVIDRSERRAMIVDVTIPHDENLVKAEKEKQLKYLDLAHEVVDMWEVDSAVIVPIVVTANGIIAKSLDQHLKRLSLGIWVKGLMQKAVLLDTARIVRRFFSLEP

SEQ ID NO: 12943 - protein, 1194 aa, Autographa gamma
MLTRSKTRTPARPPSPDPSPSSASQLPDHVPAPAPEVASSSSDEYYSPPTTPTPVRRQGRRRPPSSLAPAGQPASSRAPAPGGDVRRMKWTLSINENVMRAYYGATEGGTNLTAYRARMLSLFQGLEPDVNVSAQRLSDQVRVIQRNHRLDDATLDRLRSEVQRSPATSTPSPAVVPVTGSPPTNLVDGEEEDGAITVSTQCSENIRSTLEDTIREFRSTPPDIRPRLPRLPMHNRNKAIMGVLDSLLLAYFGSSEDLSDTHSILYCAALAACRVANVKINNQNLDTRPKPAVPAWQCRIERRVTEARALIGKLIAFKDGNSRPRVMRFVRRAFTGTSISPSEYTARVTERIDFFKQKVCAWANRIRRYKRRVDRFHLNRMFQRDQRWVFRTWERPVLGVDDGRLPDEDATNSFWRNIWSVPVSHSEGDWMRDVEESCEPIQEMGAITISPQDVANAIRPMSNWKAPGPDGLQNFWLKWFKSSHGCLASQFQCAIESESLPQFFTTGSTHLLHKTGSTTDPKNYRPITCLPTIYKLLTSILRVKINEHIDSNSIMSASQNGCRNGSRGTKELLLIDMAICQQVRRSKKNLSTCWIDYKKAYDSVPHSWLMRVLELYKINTTLRAFLLSCMRRWTTVLRYPGCRDIQQSGGPIRIERGIFQGDSLSPLWFCLALNPLSTLLENSRLGYSLRRGSQVISHLLYMDDLKLFASNELQLMGLLKITESFSNSIRMEFGVDKCAVMHVKQGGIVESQGIQLSDSINLRSLSAADTYKYLGMSEALGINVADMKQSLLTRFFGRLNKVLKSLLSGGNRVRAFNGWVMPLLMYSFGILKWTQTELDALDRRVRTLLTANRMHHPRSSVMRLYIPRKCGGRGFLNAKTLHNREVCNLREYFLQVDVGMHRDVVVVDKGFTPLSLGKENWHKPVVLSVKDRKDVWQSKELHGRYYRSLHGPDVDFLASVAWLRFGDLFGETEGFVCAIMDEVVMTNNYRKYIIKDGTVDICRACHCPGESIRHIISGCSRLANGEYLHRHNQVARIIHQQLALRYKLVEAEVPYYRYVPDPVLDNGHVTLYWDRSIITDRTIVANKPDIVVIDRSERRAMIVDVTIPHDENLVKAEKEKQLKYLDLAHEVVDMWEVDSAVIVPIVVTANGIIAKSLDQHLKRLSLGIWVKGLMQKAVLLDTARIVRRFLSLEP

SEQ ID NO: 12944 - protein, 868 aa, Autographa gamma
MRFVRRAFTGTSISPSEYTARVTERIDFFKQKVCAWANRIRRYKRRVDRFHLNRMFQRDQRWVFRTWERPVLGVDDGRLPDEDATNSFWRNIWSVPVSHSEGDWMRDVEESCEPIQEMGAITISPQDVANAIRPMSNWKAPGPDGLQNFWLKWFKSSHGCLASQFQCAIESESLPQFFTTGSTHLLHKTGSTTDPKNYRPITCLPTIYKLLTSILRVKINEHIDNHSIMSASQNGCRNGSRGTKELLLIDMAICQQVRRSKKNLSTCWIDYKKAYDSVPHSWLMRVLELYKINTTLRAFLLSCMRRWTTVLRYPGCRDIQQSGGPIRIERGIFQGDSLSPLWFCLALNPLSTLLGNSRLGYSLRRGNQVISHLLYMDDLKLFASNELQLMGLLKITESFSNSIRMEFGVDKCAVMHVKQGGIVESQGIQLSDSINLRSLSAADTYKYLGMSEALGINVADMKQSLLTRFFGRLNKVLKSLLSGGNRVRAFNGWVMPVLMYSFGILKWTQTELDALDRRVRTLLTANRMHHPRSSVMRLYIPRKCGGRGFLNAKTLHNREVCNLREYFLQVDVGMHRDVVVVDKGFTPLSLGKENWHKPVVLSVKDRKDVWQSKELHGRYYRSLHGPDVDFLASVAWLRFGDLFGETEGFVCAIMDEVVMTNNYRKYIIKDGTVDICRACHCPGESIRHIISGCSRLANGEYLHRHNQVARIIHQQLALRYKLVEAEVPYYRYVPDPVLDNGHVTLYWDRSIITDRTIVANKPDIVVIDRSERRAMIVDVTIPHDENLVKAEKEKQLKYLDLAHEVVDMWEVDSAVIVPIVVTANGIIAKSLDQHLKRLSLGIWVKGLMQKAVLLDTARIVRRFLSLEP

SEQ ID NO: 12945 - protein, 1204 aa, Agrotis ipsilon
MLTRSRTQRLKAHLPSPGSSPSSASQPPARASAESAVSPVAAVASSSSDEFFSPPSTPPPPRRRGRGRPPAGLGSRGQQAPNRVPAAGGNVSRMRWTQSMNENVMRAYYGATEGGSSLTAYRGRMLSLFQVLEPGISVSAQRLSDQVRVIQRNCMLDDTVLDRLRSDSRSNRVIPASPLIAVQQQSSSSMPPQPDRDCEEDHSEVISVSTQCNAQLRSALESAFREFRSVPPELRPRLPRLPMHNKNKALMCALDSELSNCFDSSKDLADAHSILYCAAVAACRVAQVKFPDSDRATRPKPAAPAWQCRIERRIGEARALIGKLHCFREGNTRPRVMRFVRRAFSGIDIDPRDYLARVTERIDFLKQKICAWANRIRRYKRRVERYTLNRTFQSDERWVYRAWERPDQGLADTPLPDDDAMSSFWRSIWSVPVSHTEGDWIRDVERACDHIPEMGAITISPQDVACAVHLLPNWKSPGPDGLHNFWIKWLKKSHARLATLFQSAIESGSLPEFLMTGITHLLHKTGSTAEPKNYRPITCLPTLYKVLTSILRTKISKHIYENSIMSASQNGCKNGSRGTKELLLIDMAISQQVRRSRKDLSTCWIDYKKAYDSVPHTWLMRVLELYKVDATLCTFLMSCMQQWRTVLLYPGCRHIQRTSEPIRIERGIFQGDSLSPLWFCLALNPLSTLLEGSGLGYRLKRGGQVISHLLYMDDLKLFAPNNLQLMKLLKVTETFSSAIRMEFGVDKCAVMHVKRGEIMESEGTQLSDSIHLRSLSSTETYKYLGMSEALGINNADMKQSLRERFFGRLNKVLNSLLSGGNKVRAFNGWVMPVLMYSFGILKWTQTELDALDRRVRSLLTANRMHHPRSSVMRLYIPRKCGGRGFLNAKTLHNREVCSLREYFLETDVGMHRDVVTVDKGLTPLSLANENWRKPRVLDTNDRKEVWQSKELHGRYYRALHGPDVDFLASVSWLRFGDLFGETEGFVCAIMDEVMMTNNYRKYIVKDGTVDICRACHRPGESIRHIISGCSRLANGEYLHRHNLVARIIHQQLALKYNLVESEVPYYRYAPDPVLENGNISLYWDRPIITDRTIVANKPDIVVIDRPERRAIIVDITVPHDENLVKAEKDKQFKYLDLAREVVDMWDVNTAVIVPIVVSANGLIAKSLDQHLRRLSLGGWIKRLIQKAVLMDTARIVRRFLSQEP

SEQ ID NO: 12946 - protein, 967 aa, Mesoligia furuncula
MYNNNNNNNNRALVAALDSQLSNYFDDCEDLTDTHSILYCAAVAACRVAHVKFANDSRATRPKPAIPAWQCRIERRIGGARALIGKLICFREGNTRPRVMRFVRRAFLGTDISPQDYMSCVTERIDFLKQKVYAWANRIRRYKRRVERYTQNRTFQSDERWVYRGWERPDQSVADTCLPDDEAMCSFWRSIWSVPVSHTEGDWAREVKRACDPIPEMGAITICPQDVARAVRPLPNWKSPGPDGLHNFWIKWFLRSHARLASQFQTALESGSLPQFLTTGITHLLHKSGSTAEPKNYRPITCLPTVYKVLTSILRAKIDNHINTNSIMSVSQNGCKNGSRGTKELLLIDMAISQQVRRSRKDLSTCWIDYKKAYDSVPHTWLMRVLELYKVDATLRTFLMSCMGQWRTVLRYPGCRNIQRNSEPIRIERGIFQGDSLSPLWFCLALNPLSTLLEDSGLGYRLRRGGQVISHLLYMDDLKLFAPNNLQLMELLKVTQTFSSAIRMEFGVDKCAVMHVKRGEIVESVGTQLSDSTNLRALSASETYKYLGMSEALGINVTDMKQSLKERFFGRLKKVLNSLLSGGNKVRAFNGWVMPVLMYSFGILKWTQTELDALDRRVRTLLTANRMHHPRSSVMRLYIPRKCGGRGFLNAKTLHNREICSLREYFLETDVGMHRDVVAVDKGLTPLSLAKKNWRKPVVLDTNDRMEVWQSKELHGRFFRALHGPDVDLLASVAWLRFGDLFGETEGFVCAIMDEVTMTNNYRRFIVKDGTVDICRACHRPGESIRHIISGCSRLANGEYLHRHNLVARIIHQQLALKYSLVESEVPYYRYVPDPVLENGNISLYWDRAIITDRTIVANKPDIVVVDRSERRAMIVDITVPHDENLVKAEKDKQIKYLDLAREVVDMWDVDSAIIVPIVVTANGLIAKSLDQHLKRLSLGSWIKGLIQKAVLLDTARIVRRFLSLEP

SEQ ID NO: 12947 - protein, 1199 aa, Spilarctia lutea
MITRARSRALLPPSDSSRSSALPSSEARTEAPTVAEASSSSSSDEFFSPPTSPTPVRRQGRCRPPDSLGPRGPLTSNRAPATGGNVHRIKWTHSINENVMRAYFRATELGTNLTAYRVRLVSLFQELEPAINVSAQRLSDQVRAIQRCHLLDDAALERIRSDIRNSLTVPSSSHVVDVVTNTTPQVPQNEDVSELVDSEIMSVSNQYNDRIRSTLEDAIREYRYVNFNNRPRLSRLPIHKRNLALVSALDSLLPDYFSNSEDLSDAHSILYCAAIAVCRVAGVKFAENTTTTRQENTVPAWQCRIERRIAEARTLIGKLISFRSGNMRPRVMRFVKRAFLGTTISPQEYMSCVTERIDFLKQKVYAWANRIRRYRKRVDRYNQNRMFQRNEKWVYRKWENLRPCLSDGQVPDENATNSFWHSIWSVPVTHTEGDWYRDVERSCESLLPMEPISINEEDVSCAVRSLPNWKAPGPDGLHNFWLKWFRSSHACLASQFQTALDSGSLPQFLTTGITHLLYKSGDAMDPKNFRPITCLPTLYKLLTSILRLKITTHINHNSILSISQNGCRSGTRGTKELLIIDMTISQQVRRNRKSLATCWIDYKKAFDSVPHTWLLRVLELYKIDTTLCTFLKLCMGQWRTALRYPECRQSAMNDVLIKIERGIFQGDSMSPLWFCLALNPLSTLLEGSGLGYRFQKDDRGISHLLYMDDLKLLAPTKLQLTGLLKVTENFSNSIKMEFGVDKCAVMYVKKGEIVESEGIELSDATKLRSLSVTETYKYLGFSQSLGIPEPNMKQTLRERFFSRLKKVLKSLLSGGNKVRACNGWVMPVLMYSFGVLRWTQTELDAIDRRVRTLLTAFRMHHPRSSVMRLYIPRKLGGRGLLNIKTLHNREVYNLREYFLQTDVGVHRSVVTVDTGLTPLALAKENWRKPVVLSTNDRREVWKGKVLHGRFYRALNGPDIDFKASTSWLRYGDLFGETEGFVCAIMDEVIMTSNYRKYILKDGTVDICRACHRPGESIRHIVSGCSRLANGEYLHRHNQVARIVHQQLALKYNLVSSEVPYYRYVPDPVLENGRATLYWDRSIITDRTIVANKPDIVVMDRLERRAMIVDIAVPHDENLVKVEKEKQIKYLDLSHEIVDMWNVDSAIIVPIVVSAHGLIAKSLDQHLKRLTLGGWIKGLIQKAVLLDTARIVRRFLSLEP

SEQ ID NO: 12948 - protein, 1199 aa, Spilarctia lutea
MLTRARRRAQLSPPDSSLRSALPSPEEAIEVPAGAEASSSSSSDEFFSPPTSPIPVRRQGRGRPPTSLGSRGPLTSNRAPAAGGDVRRMKWTHSINENVMRAYFRATELGTNLTAYRVRLVSLFQELEPAVNVSAQRLSDQVRAIQRCHLLDDAALERIRSDIRNSLTVPSSSHVLNVVTNSTPQVPQNDDISELVDSEIISVSTQYNDRIRSTLEDAIREYRYVNLNNRPRLSRLPIHKRNLALVSALDSLLPKYFSNSEDLSDTHSILYCAAIAVCRVAGVKFAEYTTTTRQENTLPAWQYRIERRIAEARTLIGKLMSFRSGNTRPRVMRFVKRAFLGTTISPQEYMSCVTERIDFLKQKVYAWANRIRRYRKRVDRYNQNRMFQRNEKWVYRKWENLSPCMSDGQVPDENATNSFWRNMWSVPVTHTEGDWYRDVERSCESLLPMEPISIDEEDVSCAVRSLPNWKAPGPDGLHNFWLKWFRSSHACLASQFQTALDSGSLPQFLTTGITHLLYKSGDAMDPKNFRPITCLPTLYKLLTSILRLKITTHINHNSILSISQNGCRSGTRGTKELLIIDMTISQQVRRNRKSLATCWIDYKKAFDSVPHTWLLKVLELYKIDTTLCTFLKVCMGQWRTALRYPGCRQSAMNDVLIKIERGIFQGDSLSPLWFCLALNPLSTLLEGSGLGYRLQKDDRVISHLFYMDDLKLLAPTKLQLTALLKVTENFSNSIKMEFGVDKCAVMYVKKGEIVESEGIELSDSTKLRSLSATETYKYLGFSQSLGMPESDMKQTLRERFFSRLKKVLKSLLSGGNKVRACNGWVMPVLMYSFGVLRWTQTELDAIDRRVRTLLTAFRMHHPRSSVMRLYIPRRLGGRGLLNIKTLHNREVYNLREYFLQTDVGVHRSVVTVDTGLTPLALAKENWRKPVVLSTNDRREVWKGKELHGRFYRALHGPDIDFKTSTSWLRYGDLFGETEGFVCAIMDEVIMTNNYRKYILKDGTVDICRACHRPGESIRHIISGCSRLANGEYLHRHNQVARIVHQQLALKYHLVNSEVPYYRYVPDPVLENGRATLYWDRSIITDRTIVANKPDIVVIDRLERRAIIIDIAVPHDENLVKVEKEKQIKYLDLSHEIVDMWNVDSVIIVPIVVSAHGLIAKSLDQHLKRLTLEGWIKGLIQKAVLLDTARIVRRFLSLEP

SEQ ID NO: 12949 - protein, 1111 aa, Spilarctia lutea
MKWTHSINENVMRAYFRATELGTNLTAYRVRLVSLFRELEPAVNVSAQRLSDQVRAIQRCHLLDDAALERIRSDIRNSLTVPSSSHVLNVVTNSTPQVPQNDDISELVDSEIISVSTQYNDRIRSTLEDAIREYRYVNLNNRPRLSRLPIHKRNLALVSALDSLLPKYFSNSEDLSDTHSILYCAAIAVCRVAGVKFAEYTTTTRQENTLPAWQYRIERRIAEARTLIGKLMSFRSGNTRPRVMRFVKRAFLGTTISPQEYMSCVTERIDFLKQKVYAWANRIRRYRKRVDRYNQNRMFQRNEKWVYRKWENLRPCMSDGQVPDENATNSFWRNMWSVPVTHTEGDWYRDVERSCESLLPMEPISIDEEDVSCAVRSLPNWKAPGPDGLHNFWLKWFRSSHACLASQFQTALDSGSLPQFLTTGITHLLYKSGDAMDPKNFRPITCLPTLYKLLTSILRLKITTHINHNSILSISQNGCRSGTRGTKELLIIDMTISQQVRRNRKSLATCWIDYKKAFDSVPHTWLLKVLELYKIDTTLCTFLKVCMGQWRTALRYPGCRQSAMNDVLIKIERGIFQGDSLSPLWFCLALNPLSTLLEGSGLGYRLQKDDRVISHLFYMDDLKLLAPTKLQLTALLKVTENFSNSIKMEFGVDKCAVMYVKKGEIMESEGIELSDSTKLRSLSATETYKYLGFSQSLGMPESDMKQTLRERFFSRLKKVLKSLLSGGNKVRACNGWVMPVLMYSFGVLRWTQTELDAIDRRVRTLLTAFRMHHPRSSVMRLYIPRRLGGRGLLNIKTLHNREVYNLREYFLQTDVGVHRSVVTVDTGLTPLALAKENWRKPVVLSTNDRREVWKGKELHGRFYRALHGPDIDFKTSTSWLRYGDLFGETEGFVCAIMDEVIMTNNYRKYILKDGTVDICRACHRPGESIRHIISGCSRLANGEYLHRHNQVARIVHQQLALKYHLVNSEVPYYRYVPDPVLENGRATLYWDRSIITDRTIVANKPDIVVIDRLERRAIIIDIAVPHDDNLVKVEKEKQIKYLDLSHEIVDMWNVDSVIIVPIVVSAHGLIAKSLDQHLKRLTLEGWIKGLIQKAVLLDTARIVRRFLSLEP

SEQ ID NO: 12950 - protein, 1198 aa, Xestia c-nigrum
MLTRAAARRARLPPPDPSLSSASPPPEPSPIVSAVTPAVAVASSSSDEYFSPPTTPPPARRRGGRRPPDGLGPRGPPASDRVPASGGSVQRMRWTQSNNENVMRAYYGATEGGNNLTAYRVRMLSLFQVLEPAVNVSAQRLSDQVRVIQRNRMLDDTVLDRLRTEMHSSHVIATPPLQAVVPPQSTTITYRDDDVSSDMITNVGTQYSEDMRSALEGAIREYRFMTPELRPRLPRLPMHNKNRMLVAVLDSQLSNYFDNCEDLTDVHSILYCAAVAACRVARVKFSDDRATRPKPAVPAWQYRIEQRIGGARALIGKLICFREGNTRPRVMRFVRRAFSGTDINPRDYMSRVTERIDFLKQKVYAWASRIRRYKRRVDRYTQNRTFQRDERWVYRAWERPDQGVADTRLPDDDAMCSFWRSIWSVPVSHAEGEWTRVIERACDPVPEMGAITISPQDVACAVRPLPHWKSPGPDGLHNFWIKWFTRSHARLATLFQSALESGSLPEFLTTGITHLLHKSGSTAEPKNYRPITCLPTVYKVLTSILRTKICKHVEDNSVMSASQNGCRNGSRGTKELLLIDMAISQQVRRSRKDLSTCWIDYKKAYDSVPHTWLMRVLELYKVDATLRTFLMSCMGQWRTVLRYPGCRQIQRNSEPIRIERGIFQGDSLSPLWFCLALNPLSTLLEDSGLGYQLRKDGRVISHLLYMDDLKLFAPNDLQLMELLKVTETFSSAIRMEFGVDKCAVMHVKRGEIVESVGTQLSDSINLRSLSATETYKYLGMSEALGINVADMKQSLKERFFGRLKKVFNSLLSGGNMVRAFNGWVMPVLMYSFGILKWTQTELDALDTKVRKLLTAFRMHHPRSSVMRLYIPRKCGGRGFLNAKTLHNREICSLRDYFLEADVGMHRDVVTMDKGLTPLSLAKENWRKPIMLTTDDRRKEWQGKELHGRFYRALHGPDVDFLASVSWLRSGDLFGETEGFVCAIMDEVMMTNNYRRFIVKDGTVDICRACHRPGESIRHIISGCSRLANGEYLHRHNLVARIIHQQLALKYNLVESEVPYYRYVPDPVLVNGSITLYWDQSIITDRTVIANRPDIVVMDRSERRAMIVDITVPHDENLVKAEKDKQIKYLDLAREVVDMWEVDSAIIVPIVVSAHGLIAKSLDQHLRRLSLGSWIKGLIQKAVLLDTARIVRRFLSQEP

SEQ ID NO: 12951 - protein, 1198 aa, Xestia c-nigrum
MLTRSAARRALLPPPDPSLSSASPPPEPSPIVSAVTPAVAVASSSSDEYFSPPTTPPPARRRGGRRPPDGLGPRGPPASDRVPAPGGSVQRMRWTQSNNENVMRAYYGATEGGNNLTAYRVRMLSLFQVLEPAVNVSAQRLSDQVRVIQRNRMLDDTVLDRLRTEVQSSHVTATPPSQAVVPPQSTVITDRDDDVCSDMITNVATQCSEDMRSALEGAIREYRFVTPELRPRLPRLPMNNKNRMLVAVLDSQLSNYFDDCEDLTDVHSVLYCAAVAACRVARVKFSDDRVTRPKPAVPAWQYRIEQRIGGARALIGKLICFREGNTRPRVMRFVRRAFSGTDISPRDYMSRVTERIDFLKQKVYAWASRIRRYKRRVDRYTQNRTFQRDERWVYRAWERPDQGVADTHLPDDDAMCSFWRSIWSVPVSHAEGEWTRVIERACDPVPEMGAITISPQDVACAVRPLPNWKSPGPDGLHNFWIKWFTGSHARLATLFQSALESGSLPEFLTIGLTHLLYKSGSTAEPKNYRPITCLPTVYKVLTSILRTKICKHIDDNSVMSASQNGCRNGSRGTKELLLIDMAISQQVRRSRKDLSTCWIDYKKAYDSVPHTWLMRVLEVYKVDATLRTFLMSCMRQWRTVLRYPGCRQIQRNSEPIRIERGIFQGDSLSPLWFCLALNPLSTLLEDSGLGYQLRKDGRVISHLLYMDDLKLFAPNDLQLMELLKVTETFSSAIRMEFGVDKCAVMHVKRGEIVESVGTQLSDSINLRSLSATETYKYLGMSEALGINVADMKQSLKERFFGRLKKVFNSLLSGGNKVRAFNGWVMPVLMYSFGILKWTQTELDALDTKVRKLLTAFRMHHPRSSVMRLYIPRKCGGRGFLNAKTLHNREICSLREYFQEADVEMHRDVVAMDKGLTPLSLAKENWRKPIVLTTDDRRKEWQGKELHGRFYRALHGPDVDFLASVSWLRSGDLFGETEGFVCAIMDEVMMTNNYRRFIVKDGTVDICRACHRPGESIRHIISGCSRLANGEYLHRHNLVARIIHQQLALKYNLVESEVAYYRYVPDPVLVNGNITLYWDQSIITDRTVIANRPDIVVMDRSERRAMIVDITVPHDENLVKAEKDKQIKYLDLAREVVDMWEVDSAIIVPIVVSAHGLIAKSLDQHLRRLSLGSWIKGLIQKAVLLDTARIVRRFFSLEP

SEQ ID NO: 12952 - protein, 1103 aa, Griposia aprilina
MRWTRSINENVMRSYYGATEGGNNLTAYRVRMLSLFQVLEPAVNVSAQRLSDQVRVIQRNHMLDDTVLDRLRNEMQSSHVIAPPSQTVVVLPQSNTSQADEESDDRATNVSTQCNDELRSALEDAIREYRFISPELRPRLPRLPMHNKNRVLVAALDAQLSNYFDDCVDLTDTHSILYCAAVAACRVAHVKFANDSRATRPKPAVPAWQCRIERRIGGARALIGKLICFREGNTRPRVMRFVRRAFAGTNISPQDYMSCVTERIDFLKQKVYAWANRIRRYKRRVERYTQNRTFQRDERWVYRGWERPDQGVADTCLPDDDAMCSFWRNIWSVPVSHTEGDWTREVERACDPIPEMGAITICPQDVTRAVRPLPNWKSPGPDGLHNFWIKWFGRSHARLAAQYQVALESGSLPQFLTTGVTHLLHKSGSTAEPKNYRPIACLPTVYKVLTSIFFYKHIDTNYIMSPSQNGCRNGSRGTKELLLIDMAISQQVRRSRKDLSTCWIDYKKAYDSVPHTWLMRVLELYKVEATLRTFLMSCMGQWRTVLHYPACRNTQRNSEPIRIERGIFQGDSLSPLWFCLALNPLSTLLEDSGLGYRLRRGGQVISHLLYMDDLKLFAPNNSQLMDLLKVTETFSSAIRMEFGVDKCTVMHVKRGEIVESVGTQLSDSINLRALSASETYKYLGMSEALGINGTDMKQSLKDRFFGRLKKVFNSLLSGGNKVRAFNGWVMPVLMYSFGILKWTQTELDALDRKVRTLLTANRMHHPRSSVMRLYIPRKCGGRGFLNAKTLHNREICSLREYFLEADVGMHRDVVTVDKGLTPLSLAKENWRKPIVLDTNDRMEVWQSKELHGRFFRALHGPDVDQLASVAWLRFGDLFGETEGFVCAIMDEVMMTNNYRRFIVKDGTVDICRACHRPGESIRHIISGCSRLANEEYLHRHNLVARIIHQQLALKDSLVESEVPYYRYVPDPVLENGHITLYRDRSIITDRTIVANKPDIVMVDRLERRAIIVDITVPHDGNLVKAEKDKQIKYLDLAREVVDMWDVDSAIIVPIVVTANGLIAKSLDQHLRRLSLGSWIKGLIQKAVLLDTARIVRRFLSLEP

SEQ ID NO: 12953 - protein, 1198 aa, Griposia aprilina
MLTRSAARRARPPPPDSSLSSASLPPVSSPTVSAVTTPAAVVASSSSDEYFSPPTTPPPVRRRGGHRPPDGLGPRGPPASDRVPAPGGSVQRMRWTRSINENVMRSYYGATEGGNNLTAYRVRMLSLFQVLEPAVNVSAQRLSDQVRVIQRNHMLDDTVLDRLRNEMQSSHVIAPPSQTVVVLPQSNTSQADEESDDRATNVSTQCNDELRSALEDAIREYRFISPELRPRLPRLPMHNKNRVLVAALDAQLSNYFDDCVDLTDTHSILYCAAVAACRVAHVKFANDSRATRPKPAVPAWQCRIERRIGEARALIGKLICFREGNTRPRVMRFVRRAFAGTNISPQDYMSCVTERIDFLKQKVYAWANRIRRYKRRVERYTQNRTFQRDERWVYRGWERPDQGVADTCLPDDDAMCSFWRNIWSVPVSHTEGDWTREVERACDPIPEMGAITICPQDVTRAVRPLPNWKSPGPDGLHNFWIKWFGRSHARLAAQYQVALESGSLPQFLTTGVTHLLHKSGSTAEPKNYRPIACLPTVYKVLTSILRDKINKHIDTNYIMSPSQNGCRNGSRGTKELLLIDMAISQQVRRSRKDLSTCWIDYKKAYDSVPHTWLMRVLELYKVEATLRTFLMACMGQWRTVLHYPACRNTQRNSEPIRIERGIFQGDSLSPLWFCLALNPLSTLLEDSGLGYRLRRGGQVISHLLYMDDLKLFAPNNFQLMELLKVTETFSSAIRMEFGVDKCAVMHVKRGEIVESVGTQLSDSINLRALSASETYKYLGMSEALGINGTDMKQSLKDRFFGRLKKVFNSLLSGGNKVRAFNGWVMPVLMYSFGILKWTQTELDALDRKVRTLLTANRMHHPRSSVMRLYIPRKCGGRGFLNAKTLHNREICSLREYFLEADVGMHRDVVTVDKGLTPLSLAKENWRKPVVLDTNDRMEVWQSKELHGRFFRALHGPDVDQLASVAWLRFGDLFGETEGFVCAIMDEVMMTNNYRRFIVKDGTVDICRACHRPGESIRHIISGCSRLANEEYLHRHNLVARIIHQQLALKYSLVESEVPYYRYVPDPVLENGHITLYWDRSIITDRTIVANKPDIVMVDRLERRAMIVDITVPHDGNLVKAEKDKQIKYLDLAREVVDMWDVDSAIIVPIVVTANGLIAKSLDQHLRRLSLGSWIKGLIQKAVLLDTARIVRRFLSLEP

SEQ ID NO: 12954 - protein, 1198 aa, Griposia aprilina
MLTRSAARRARPPPPDSSLSSASLPPVSSPTVSAVTTPAAVVASSSSDEYFSPPTTPPPVRRRGGHRPPDGLGPRGPPASDRVPAPGGSVQRMRWTRSINENVMRSYYGATEGGNNLTAYRVRMLSLFQVLEPAVNVSAQRLSDQVRVIQRNHMLDDTVLDRLRNEMQSSHVIAPPSQTVVVLPQSNTSQADEESDDRATNVSTQCNDELRSALEDAIREYRFISPELRPRLPRLPMHNKNRVLVAALDAQLSNYFDDCVDLTDTHSILYCAAVAACRVAHVKFANDSRATRPKPAVPAWQCRIERRIGEARALIGKLICFREGNTRPRVMRFVRRAFAGTNISPQDYMSCVTERIDFLKQKVYAWANRIRRYKRRVERYTQNRTFQRDERWVYRGWERPDQGVADTCLPDDDAMCSFWRNIWSVPVSHTEGDWTREVERACDPIPEMGAITICPQDVTRAVRPLPNWKSPGPDGLHNFWIKWFGGSHARLAAQYQVALESGSLPQFLTTGVTHLLHKSGSTAEPKNYRPIACLPTVYKVLTSILRDKINKHIDTNYIMSPSQNGCRNGSRGTKQLLLIDMAISQQVRRSRKDLSTCWIDYKKAYDSVPHTWLMRVLELYKVEATLRTFLMSCMGQWRTVLHYPACRNTQRNSEPIRIERGIFQGDSLSPLWFCLALNPLSTLLEDSGLGYRLRRGGQVISHLLYMDDLKLFAPNNSQLMDLLKVTETFSSAIRMEFGVDKCAVMHVKRGEIVESVGTQLSDSINLRALSASETYKYLGMSEALGINGTDMKQSLKDRFFGRLKKVFNSLLSGGNKVRAFNGWVMPVLMYSFGILKWTQTELDALDRKVRTLLTANRMHHPRSSVMRLYIPRKCGGRGFLNAKTLHNREICSLREYFLEADVGMHRDVVTVDKGLTPLSLAKENWRKPVVLDTNDRMEVWQSKELHGRFFRALHGPDVDQLASVAWLRFGDLFGETEGFVCAIMDEVMMTNNYRRFIVKDGTVDICRACHRPGESIRHIISGCSRLANEEYLHRHNLVARIIHQQLALKYSLVESEVPYYRYVPDPVLENGHITLYWDRSIITDRTIVANKPDIVMVDRLERRAMIVDITVPHDGNLVKAEKDKQIKYLDLAREVVDMWDVDSAIIVPIVVTANGLIAKSLDQHLRRLSLGSWIKGLIQKAVLLDTARIVRRFLSLEP

SEQ ID NO: 12955 - protein, 1199 aa, Griposia aprilina
MMLTRSAKRRAHPPPPDSSLSSASPPPVSSPTVSAVTTPAAVVASSSSDEYFSPPTTPPPVRRRGGHRPPDGLGPRGPPASDRVPAPGGSVQRMRWTRSINENVMRSYYGATEGGNNLTAYRVRMLSLFQVLEPAVNVSAQRLSDQVRVIQHMITLDDTVLDRLRNEMQSSHVIAPPSQTVVVLPQSNTSQADEESDDRATNVSTQCNDELRSALEDAIREYRFISPELRPRLPRLPMHNKNRVLVAALDAQLSNYFDDCVDLTDTHSILYCAAVAACRVAHIKFSNDSRPTRPKPAVPAWQCRIERRIGGARALIGKLICFWEGNTRPRVMRFVRRAFAGTNISPQDYMSCVTERIDFLKQKVYAWANRIRRYKRRVERYTQNRTFQRDERWVYRGWERPDQGVADTCLPDDDAMCSFWRNIWSVPVSHTEGDWGREVERACDPIPEMGAISICPQDVTRAVRPLPNWKSPGPDGLQNFWIKWFGRSHARLAAQYQVAIESGSLPQFLTTGVTHLLRKSGSTAEPKNYRPITCLPTVYKVLTSILRAKINKHIDTNSIMSPSQNGCRNGSRGTKELLLIDMAISQQVRRSRKDLSTCWIDYKKAYDSVPHTWLVRVLELYKVDATLRTFLKSCMGQWRTILHYPGCRNIQRDNEPIRIERGIFQGDSLSPLWFCLALNPLSTLLEDSGLGYRLRRGGQVISHLLYMDDLKLFAPNNLQLMELLKVTETFSSAIRMEFGVDKCAVMHVKRGEIVESVGTQLSYSINLRALSASDTYKYLGMSEALGINGTDMKQSLKERFFGRLKKVFNSLLSGGNKVRAFNGWVMPVLMYSFGILKWTQTELDALDRKVRTLLTANRMHHPRSSVMRLYIPRKCGGRGFLNAKTLHNREICSLREYFLEADVGMHTDVVKVDKGLTPLSLAKENWRKPVVLDTNDRMEVWQSKELHGRFFRALHEPDVDQLASVAWLRFGDLFGETEGFVCAIMDEVILTNNYRRHIMKDGTVDVCRACHRPGESIRHIISGCSRLANEEYLHRHNLVARIIHQQLALKYSLVESEVPYYRYVPDPVLENGHITLYWDRSIITDRTIVANKPDIVVVDRLERRAMIVDITVPHDGNLVKAEKDKQIKYLDLAREVVDMWDVDSAIIVPIVVTANGLIAKSLDQHLRRLSLGSWIKGLIQKAVLLDTARIVRRFLSLEP

SEQ ID NO: 12956 - protein, 1201 aa, Omphaloscelis lunosa
MLTRLAARRARLPPPDSPLSSASSPPVRSPTVNAVMTPAAAVASSSSDEYFSPPTTPPPARRRGRRRPPDGLGPRGPPASDRVPAPGGSVQRMRWTRSINENVMRSYYGATEGGNNLTAYRVQMLSLFQVLEPAVNVSAQRLSDQVRVIQRNHMLDDTVLDRLRSEMQSSHVIAPPLRSVIIPSQMSSVITSQADERIDDRATNVSTQCNEDLRSALEGAIQEYRFMSPELRPRLPRLPMHNKNKALVAVLDSQLSNYFDDCEDLTDTHSILYCAAVAVCRVAHLKFSNDSRATRPKPAAPAWQCRIERRISGARTLIGKLICFREGNTRPRVMRFVRRAFLGTDISPQDYMTRVTERIDFLKQKVYAWANRIRRYKRRVERYTQNRTFQSDERWVYRAWERPDQGVADTHLPDDDAMCSFWRSIWSVPVSHTEGDWTREVERACDPIPEMGAITICPQDVARAVRPLPNWKSPGPDGLHNFWIKWFVRSHARLAAQYQTALESGSLPQFLTTGVTHLLHKSGSTAEPKNYRPITCLPTVYKVLTSILRAKINKHIDTNSIMSVSQNGCRNGSRGTKELLLIDMAISQQVRRFRKDLSTCWIDYKKAYDSVPHTWLMRVLELYKVHTTLRTFLMSCMGQWRTVLRYPGCRNIQRNSEPIRIERGIFQGDSLSPLWFCLALNPLSTLLEDSGLGYRLRRGGQVISHLLYMDDLKLFAPNNLQLMELLKVTETFSSAIRMEFGVDKCAVMHVKRGEIMESVGTQLSDSINLRALSASETYKYLGMSEALGINVTDMKQSLKERFFGRLKKVLNSLLSGGNKVRAFNGWVMPVLMYSFGILKWTQTELDALDRRVRTLLTAYRMHHPRSSVMRLYIPRKCGGRGFLNAKTLHNREICSLREYFLGVDVGMHRDVVVVDKGLTPLSLAKENWRKPVVLDTKDRMEIWQSKELHGRYFRALHGPDVDLPASVTWLRFGDLFGETEGFVCAIMDEVMMTNNYRRFIVKDGTVDICRACHRPGESIRHIISGCSRLANEEYLHRHNLVARIIHQQLALKYSLVESEVPYYRYVPDPVLENGNITLYWDRSIITDRTIAANKPDIVVVDRGERRTMIIDITVPHDENLVKAEKDKQIKYLDLAREVVDMWDVDSAIIVPIVVTANGLIAKSLDQHLRRLSLGSWIKGLIQRAVLLDTARIVRRFLSLEP

SEQ ID NO: 12957 - protein, 1201 aa, Omphaloscelis lunosa
MLTRLAARRARLPPPDSPLSSASSPPVRSPTVNAVMTPAAAVASSSSDEYFSPPTTPPPARRRGRRRPPDGLGPRGPPASDRVPAPGGSVQRMRWTRSINENVMRSYYGATEGGNNLTAYRVRMLSLFQVLEPAVNVSAQRLSDQVRVIQRNHMLDDTVLDRLRSEMQSSHVIAPPLRSVIIPSQMSSVITSQADERIDDRATNVSTQCNEDLRSALEGAIQEYRFMSPELRPRLPRLPMHSKNKALVAVLDSQLSNYFDDCEDLTDTHSILYCAAVAVCRVAHLKFSNDSRATRPKPAAPAWQCRIERRISGARTLIGKLICFREGNTRPRVMRFVRRAFLGTDISPQDYMTRVTERIDFLKQKVYAWANRIRRYKRRVERYTQNRTFQSDERWVYRAWERPDQGVADTHLPDDDAMCSFWRSIWSVPVSHTEGDWTREVERACDPIPEMGAITICPQDVARAVRPLPNWKSPGPDGLHNFWIKWFVRSHARLAAQYQTALESGSLPQFLTTGVTHLLHKSGSTAEPKNYRPITCLPTVYKVLTSILRAKINKHIDTNSIMSVSQNGCRNGSRGTKELLLIDMAISQQVRRSRKDLSTCWIDYKKAYDSVPHTWLMRVLELYKVHTTLRTFLMSCMGQWRTVLRYPGCRNIQRNSEPIRIERGIFQGDSLSPLWFCLALNPLSTLLEDSGLGYRLRRGGQVISHLLYMDDLKLFAPNNLQLMERLKVTETFSSAIRMEFGVDKCAVMHVKRGEIMESVGTQLSDSINLRALSASETYKYLGMSEALGINVTDMKQSLKERFFGRLKKVLNSLLSGGNKVRAFNGWVMPVLMYSFGILKWTQTELDALDRRVRTLLTAYRMHHPRSSVMRLYIPRKCGGRGFLNAKTLHNREICSLREYFLGVDVGMHRDVVVVDKGLTPLSLAKENWRKPVVLDTKDRMEIWQSKELHGRYFRALHGPDVDLPASVTWLRFGDLFGETEGFVCAIMDEVMMTNNYRRFIVKDGTVDICRACHRPGESIRHIISGCSRLANEEYLHRHNLVARIIHQQLALKYSLVESEVPYYRYVPDPVLENGNITLYWDRSIITDRTIAANKPDIVVVDRGERRTMIIDITVPHDENLVKAEKDKQIKYLDLAREVVDMWDVDSAIIVPIVVTANGLIAKSLDQHLRRLSLGSWIKGLIQRAVLLDTARIVRRFLSLEP

SEQ ID NO: 12958 - protein, 1205 aa, Omphaloscelis lunosa
MLTRSRARKLTDTHPTSSGSSLSSASQLPDPAPDVSPVILVAAVASSSSDEYFSPPTTPPPTRQRGRGRPPASLGLRGPPASDRVPAPGGSVQRMRWTQTVNENVMRAYFGATEGGSNLTAYRGRMLSLFQVLEPAVNVSAQRLSDQVRVIQRNHMLDDVVLDRLRLESRNNHVTPASPLVTVQLQNLPSSSPRSDRVGEEDDDGVISVSSQCNVRMRSALEDAFREYRSIPPGLRPKLPRLPMHKKNKALMCTLDSLLSNCFDGSKDLADTHSILYCAAVAACRVAHVKFPNSDRAPRPKPAVPAWQCRIERRIGEARVLIGKLICFREGNTRPRVMRFVKRAFSGTDISFQDYLTRVTERIDFLKQKIYAWANRIRRYRRRVERYTQNRTFQSDERWVYRAWERPDQGVIDTRLPDDDAMCSFWRSIWSAPVSHTEGDWTREIERACEQIPEMEALTISPQDIARAVRPLPNWKSPGPDGLHNFWIKWFQRSHARLASQFQSALESGSLPQFLTTGITHLLHKSGSTAEPKNYRPITCLPTVYKVFTSILRTKINKHIDTNSIMSASQNGCRNGSRGTKELLLIDMAINQQVRRSRRDLSTCWIDYKKAYDSVPHTWLMRVLELYKVNATLRTFLMSCMGQWRTVLRYPGCRQILRNSEPIRIERGIFQGDSLSPLWFCLALNPLSTLLEDSGLGYRLRRGGQVISHLLYMDDLKLFAPNNLQLLELLKVTETFSSAIRMEFGVDKCAVMHVKRGEIVESVGTQLSDSIQLRSLSSIETYKYLGMSEALGVNAADMKQSLKERFFNRLNKVLNSLLSGGNKVRAFNGWVMPVLMYSFGILKWTQTELDALDRRVRTLLTANRMHHPRSSVMRLYIPRKCGGRGFLNAKTLHNREVCSLREYFLEADVGMHRDVVTVDKGLTPLSLANENWRKPIVLDTNDRREVWQSKELHGRFYRALHGPDVDLLASVSWLRFGDLFGETEGFVFAIMDEVMMTNNYRKYIVKDGTVDICRACHRPGESIRHIISGCSRLANGDYLHRHNLVARIIHQQLALKYILVESEVPYYRYVPDPVLENGNITLYWDRSIITDRTIVANKPDIVVIDRLERRTMIIDIAVPHDENLVKAEKDKQIKYLDLAREVVDMWDVDTAIIVPIVVTANGIIAKSLDQHLKRLSLGSWIKGLIQKAVLLDTARIVRRFLSQEP

SEQ ID NO: 12959 - protein, 1106 aa, Omphaloscelis lunosa
MRWTRSINENVMRSYYGATEGGINLTAYRVRMLSLFQVLEPAVNVSAQRLSDQVRVIQRNHMLDDTVLDRLRSEMQSSHVIAPPVRSVIIPSQIITSQADERIDDRATNVSTQCNEELRSALEGAIQEYRFMSPELRPRLPRLPMHNKNKALVAVLDSQLSNYFDDCEDLTDTHSILYCAAVAACRVAHVKFANDSRATRPKPAAPAWQCRIERRIGGARTLIGKLICFREGNTRPRVMRFVRRAFLGTDISPQDYLTRVTERIDFLKQKVYAWANRIRRYKRRVERYTQNRTFQSDERWVNRAWERPDQGVAVTHRPDDDAMCSFWRSIWSVPVNHTEGDWTREVERACDPIPEMGAITICPQDVARAVRPLPNWKSPGPDGLHNFWIKWFLRSHARLAAQYQTALESGSLPQFLTTGVTHLLHKSGSTAEPKNYRPITCLPTVYKVLTSILRAKINKHIDTNSIMSASQNGCRNGSRGTKELLLIDMAINQQVRRSRKDLSTCWIDYEKAYDSVPHTWLMRVLELYKVDTTLRTFLMSCMGQWRTVLRYPGCRNIQRNSEPIRIERGIFQGDSLSPLWFCLALNPLSTLLEASGLGYRLRRGGQVISHLLYMDDLKLFAPNNLQLMELLKVTETFSNAIRMEFGVDKCAVMHVKRGEIVESVGTQLSDSINLRALSASETYKYLGMSEALGINVTDMKQSLKERFFGRLKKVLNSLLSGGHKVRAFNGWVMPVLIYSFGILKWTQTELDALDRRVRTLLTAYRMHHPRSSVMRLYIPRKCGGRGFLNAKTLHNREICSLREYFLGVDVGMHRDVVVVDKGLTPLSLAKENWRKPVVLDTKDRMEIWRSKELHGRYFWALHGPDVDLPASVTWLRFGDLFGETEGFVCAIMDEVMMTNNYRRFIVKDGTVDICRACHRPGESIRHIISGCSRLANEEYLHRHNLVARIIHQQLTLKYSLVESEVPYYRYVPDPVLENGNITLYWDRSIITDRTIVANKPDIVVVDRGERRTMIIDITVPHDENLVKAEKDKQIKYLDLAREVVDMWDVDSAIIVPIVVTANGLIAKSLDQHLRRLSLGSWIKGLIQRAVLLDTARIVRRFLSLEP

SEQ ID NO: 12960 - protein, 1198 aa, Omphaloscelis lunosa
MLTRSAARRARLPPPDSPLSSASSPPVLSPTVNAVMTPAAAVASSSSDEYFSPPTTPPPARRRGGRRPPDGLGPRGPPASDRVPAPGGSVQRMRWTRSINENVMRSYYGATEGGINLTAYRVRMLSLFQVLEPAVNVSAQRLSDQVRVIQRNHMLDDTVLDRLRSEMQSSHVIAPPVRSVIIPSQIITSQADERIDDRATNVSTQCNEELRSALEGAIQEYRFMSPELRPRLPRLPMHNKNKALVAVLDSQLSNYFDDCEDLTDTHSILYCAAVAACRVAHVKFANDSRATRPKPAAPAWQCRIERRIGGARTLIGKLICFREGNTRPRVMRFVRRAFLGTDISPQDYLTRVTERIDFLKQKVYAWANRIRRYKRRVERYTQNRTFQSDERWVYRAWERPDQGVADTHRPDDDAMCSFWRSIWSVPVNHTEGDWTREVERACDPIPEMGAITICPQDVARAVRPLPNWKSPGPDGLHNFWIKWFLRSHARLAAQYQTALESGSLPQFLTTGVTHLLHKSGSTAEPKNYRPITCLPTVYKVLTSILRAKINKHIDTNSIMSASQNGCRNGSRSTKELLLIDMAINQQVRRSRKDLSTCWIDYKKAYDSVPHTWLMRVLELYKVDTTLRTFLMSCMGQWRTALRYPGCRNIQRNSEPIRIERGIFQGDSLSPLWFCLALNPLSTLLEASGLGYRLRRGGQVISHLLYMDDLKLFAPNNLQLMELLKVTETFSNAIRMEFGVDKCAVMHVKRGEIVESVGTQLSDSINLRALSASETYKYLGMSEALGINVTDMKQSLKERFFGRLKKVLNSLLSGGHKVRAFNGWVMPVLIYSFGILKWTQTELDALDRRVRTLLTAYRMHHPRSSVMRLYIPRKCGGRGFLNAKTLHNREICSLREYFLGVDVGMHRDVVVVDKGLTPLSLAKENWRKPVVLDTKDRMEIWQSKELHGRYFRALHGPDVDLPASVTWLRFGDLFGETEGFVCAIMDEVMMTNNYRRFIVKDGTVDICRACHRPGESIRHIISGCSRLANEEYLHRHNLVARIIHQQLALKYSLVESEVPYYRYVPDPVLENGNITLYWDRSIITDRTIVANKPDIVVVDRGERRTMIIDITVPHDENLVKAEKDKQIKYLDLAREVVDMWDVDSAIIVPIFVTANGLIAKSLDQHLRRLSLGSWIKGLIQRAVLLDTARIVRRFLSLEP

SEQ ID NO: 12961 - protein, 1211 aa, Omphaloscelis lunosa
MFTGKKNEDLMLTRLAARRARLPPPDSPLSSASSPPVRSLTVNAVMTPAAAVASSSSDEYFSPPTTPPPARRRGRRRPPDGLGPRGPPASDRVPVPGGSVQRMRWTRSINENVMRSYYGATEGGNNLTAYRVRMLSLFQVLEPAVNVSAQRLSDQVRVIQRNHMLDDTVLDRLRSEMQSSHVIAPPLRSVIIPSQMSSVITSQADERIDDRATNVSTQCNEDLRSALEGAIQEYRFMSPELRPRLPRLPMHNKNKALVAVLDSQLSNYFDDCEDLTDTHSILYCAAVAVCRVAHLKFSNDSRATRPKPAAPAWQCRIERRIGGARTLIGKLICFREGNTRPRVMRFVRRAFLGTDISPQDYMTRVTERIDFLKQKVYAWANHIRRYKRRVERYTQNRTFQSDERWVYRAWERPDQGVADTHLPDDDAMCSFWRSIWSVPVSHTEGDWTREVERACDPIPEMGAITICPQDVARAVRPLPNWKSPGPDGLHNFWIKWFVRSHARLAAQYQTALESGSLPQFLTTGVTHLLHKSGSTAEPKNYRPITCLPTVYKVLTSILRAKINKHIDTNSIMSASQNGCGNGSRGTKELLLIDMAISQQVRRSRKDLSTCWIDYKKAYDSVPHTWLMRVLELYKVHTTLRTFLMSCMGQWRTVLRYPGCRNIQRNSEPIRIERGLFQGDSLSPLWFCLALNPLSTLLEASGLGYRLRRGGQVISHLLYMDDLKLFAPNNLQLMELLKVTETFSSAIRMEFGVDKCAVMHVKRGEIMESVGTQLSDSINLRALSASETYKYLGMSEALGINVTDMKQSLKERFFGRLKKVLNSLLSGGNKVRAFNGWVMPVLMYSFGIVKWTQTELDALDRRVRTLLTAYRMHHPRSSVMRLYIPRKCGGRGFLNAKTLHNREICSLREYFLGVDVGMHRDVVVVDKGLTPLSLAKENWRKPVVLDTKDRMEIWQSKELHGRYFRTLHGPDVDLPASVTWLRFGDLFGETEGFVCAIMDEVMMTNNYRRFIVKDGTVDICRACHRPGESIRHIISGCSRLANEEYLHRHNLVARIIHQQLALKYSLVESEVPYYRYVPDPVLENGNISLYWDRSIITDRTIAANKPDIVVVDRGERRTMIIDITVPHDENLVKAEKDKQIKYLDLAREVVDMWDVDSAIIVPIVVTANGLIAKSLDQHLRRLSLGSWIKGLIQRAVLLDTARIVRRFLSLEP

SEQ ID NO: 12962 - protein, 1197 aa, Sesamia nonagrioides
MLTRSAARRARPPSPDSLLGSASPPPVSSPTVSAVTTPAAAVALSSSDEYFSPPTTPPPVRRRGGRRPPDRLGPRGPSASDRVPAPGGSVQRMRWTQSINENVMRSYYGATEGGNNLTAYRVRMLSLFQVLEPAVNVSAQRLSDQVRVIQRNHMLDDTVLDRLRNEMQSSRVIAHQSQTAEIPPQSTDYADEGSNDRATNVSTQCNEELINALEAAIREYRSTSAELRPRLPRLPMHNRNRALMAALDAQLSNYFDTCEDLTDTHSILYCAAVAACRVAHVKFPSDSRATRPKPVVPAWQHRIERRIGGARALIGKLICFREGNTRPRVMRFVRRAFAGTNISPQNYMARVTERIDFLKQKVYAWANRIRRYKRRVERYTQNRTFQNNERWVYRDWERPEQGVTDTCLPDDDVMCSFWRSIWSVPVSHTEGDWARDVERACDLIPEMGAITICPQDVACAVRPLPNWKSPGPDGLHNFWIKWFPRSHARLASQFQTALVSGSLPQFLTTGITHLLHKSGSTAEPKNYRPITCLPTVYKVLTSILKTKINKHIDSNSIMSASQNGCKSGSRGTKELLLIDMAISQQVRRSRKDLSTCWIDYRKAYDSVPHTWLMRVLELYKVDATLRTFLMSCMRTWRTVLRYPGCRNIQRNSEPIRIERGIFQGDSLSPLWFCLALNPLSTLLEDSGLGYRLRRGGQVISHLLYMDDLKLFAPNNSQLRELLKITETFSSSIRMEFGVDKSAVMHVKRGEIMESVGTQLTGSINLRALFASETYKYLGMSEALGINVTDMKQSLKERFFGRLKKVLNSLLSGGNKVRAFNGWVMPVLMYSFGILKWTQTELDALDQRVRTLLTANRLHHPRSSVMRLYIPRKCGGRGFLNAKTLHNREVCSLREYFLETDVGMHRDVVAADKGLTPLSLAKENWRKPVVLDTNDRLEVWKSKELHGRFFRALHGPDVDFQASVAWLRFGDLFGETEGFVFAIMDEVMMTNNYRRFIVKDGTVDICRACHRPGESIRHIISGCSRLANGEYLHRHNLVARIIHQQLALKYKLVESEVPYYRYMPDPVLENGHITLYWDRSIITDRTIVANKPDIVLVDRSERRAMIVDITIPHDENLVKAEKDKQIKYLDLAHEVVDMWEVDSAIIVPIVVTANGLIAKSLDQHLRRLSLGSWIKGLIQKAVLLDTARIGRKFLSLEP

SEQ ID NO: 12963 - protein, 1197 aa, Sesamia nonagrioides
MLTRSAARRARPPSPDSLLGSASPPPVSSPTVSAVTTPAAAVASSSSDEYFSPPTTPPPVRRRGGRRPPDRLGPRGPSASDRVPAPGGSVQRMRWTQSINENVMRSYYGATEGGNNLTAYRVRMLSLFQVLEPAVNVSAQRLSDQVRVIQRNHMLDDTVLDRLRNEMQSSRVIAHQSQTAEIPPQSTNYADEGSNDRATNVSTQCNEELINALEAAIREYRSTSAELRPRLPRLPMHNRNRALMAALDAQLSNYFDTCEDLTDTHSILYCAAVAACRVAHVKFPSDSRATRPKPVVPAWQHRIERRIGGARALIGKLICFREGNTRPRVMRFVRRAFAGTNISPQNYMARVTERIDFLKQKVYAWANRIRRYKRRVERYTQNRTFQNNERWVYRDWERPEHGVTDTCLPDDDVMCSFWRSIWSVPVSHTEGDWARDVERACDLIPEMGAITICPQDVACAVRPLPNWKSPGPDGLHNFWIKWFPRSHARLASQFQTALVSGSLPQFLTTGITHLLHKSGSTAEPKNYRPITCLPTVYKVLTSILKTKINKHIDSNSIMSASQNGCKSGSRGTKELLLIDMAISQQVRRSRKDLSTCWIDYRKAYDSVPHTWLMRVLELYKVDATLRTFLMSCMRTWRTVLRYPGCRNIQRNSEPIRIERGIFQGDSLSPLWFCLALNPLSTLLEDSGLGYRLRRGGQVISHLLYMDDLKLFAPNNSQLRELLKITETFSSSIRMEFGVDKCAVMHVKRGEIMESVGTQLTGSINLRALSASETYKYLGMSEALGINVTDMKQSLKERFFGRLKKVLNSLLSGGNKVRAFNGWVMPVLMYSFGILKWTQTELDALDQRVRTLLTANRLHHPRSSVMRLYIPRKCGGRGFLNAKTLHNREVCSLREYFLETDVGMHRDVVAADKGLTPLSLAKENWRKPVVLDTNDRLEVWKSKELHGRFFRALHGPDVDFQASVAWLRFGDLFGETEGFVFAIMDEVMMTNNYRRFIVKDGTVDICRACHRPGESIRHIISGCSRLANGEYLHRHNLVARIIHQQLALKYKLVESEVPYYRYMPDPVLENGHITLYWDRSIITDRTIVANKPDIVLVDRSERRAMIVDITIPHDENLVKAEKDKQIKYLDLAHEVVDMWEVDSAIIVPIVVTANGLIAKSLDQHLRRLSLGSWIKGLIQKAVLLDTARIVRKFLSLEP

SEQ ID NO: 12964 - protein, 1200 aa, Sesamia nonagrioides
MLTRSAARRARSPPPDSSPSSASPPPVSSPTVNAVMTPAAAVALSSSDEYFSPPTTPPPVRRRGGRRPPDCLGPRGPPASDRAPATGGNVQRMKWTQSINENVMRAYFGATEGGSNLTAYRGRMLSLFQVLEPAVNVSAQRLSDQVRVIQRNHMLDDVVLDRLRLESRNSHVTPASSLVAVQLNSVPSRPNLVDEEDDDEAISVTPQCNEKVRSALEDAFREYRSTPPELRPRLPRLPMHKKNKALVCALDSQLSNYLKDSKDLADTHSILYCGAVAICRVAHVKFPDSDRATRPKPAVPAWQCRIERRIGETRALIGKLISFREGNTRPRVMRFVRRAFSGTDVSTRDYLLRVTERIDFLKQKIYAWANRIRRYRRRVERYSQNRNFQSDERWVYRAWERSDQGVTDTCLPDDDATRSFWRNIWSVPVSHTEGGWTRDVERACDPVPEMEAITICPQDVARAVRPLPNWKSPGPDGLHNFWIKWFSGSHACLASQFQTALESGSLPQFLTTGITHLLHKSGSTAEPKNYRPITCLPTVYKVLTSILKAKINTHIDSNSIMSASQNGCRNGSRGTKELLLIDMAISQQVRRSRKDLSTCWIDYKKAYDSVPHTWLMRVLELYKVDATLRTFLMTCMSQWRTVLRYPGCRNIQRNSEPIRIERGIFQGDSLSPLWFCLALNPLSTLLEDSGLGYRLRRGGQVISHLLYMDDLKLFAHTNSQLKELLKITETFSSAIRMEFGVDKCAVMHVQRGEIVESVGTQLTGSINLRALSASETCKYLGMSEALGINVTDMKQSLKERFFGRLKKVLNSLLSGGNKVRAFNGWVMPVLMYSFGILKWTQTELDALDRRVRTLLTANRLHHPRSSVMRLYIPRKCGGRGFLNAKTLHNREICSLREYFLTTDVGMHRDVVAVDKGLTPLSLAKENWRKPVVLDTNDRMEVWKSKELHGRFFKALHGPDVDLQASVAWLRLGDLFGETEGFVCAITDEVMMTNNYRRFIVKDGTVDICRACHRPGESIRHIISGCSRLANGEYLHRHNLVARIIHQQLALKYNLVESEVPYYRYTPDPVLENDHITLYWDRSIITDRTIIANKPDIVLVDRSERRAMIVDITIPHDENLVKAEKDKQIKYLDLAHEVVDMWEVDSAIIVPIVVTANGLIAKSLDQHLRRLSLGSWIKGLIQKAVLLDTARIVRKFLSLEP

SEQ ID NO: 12965 - protein, 1197 aa, Sesamia nonagrioides
MLTRSAALRARPPPPDSLLSSASPPPVSSASVSAVTTPAAAVALSSSDEYFSPPTTPPPARRRGGRRPPDRLGPRGPSASDRVPAPGGSVQRMRWTQSINENVMRSYYGATEGGNNLTAYRVRMLSLFQVLEPAVNVSAQRLSDQVRVIQRNHMLDDTVLDRLRNEMQSSRVIAHQSQTAEIPPQSTNYADEGSNDRATNVSTQCNEELINALEAAIREYRYTSAELRPRLPRLPMHNRNRALMAALDAQLSNYFDTCEDLTDTHSILYCAAVAACRVAHVKFPSDSRATRPKPVVPAWQHRIERRIGGARALIGKLICFREGNTRPRVMRFVRRAFAGTNISPQNYMARVTERIDFLKQKVYAWANRIRRYKRRVERYTQNRTFRSNERWVYRDWERPEQGVTDTCLPDDDAMCSFWRSIWSVPVSHTEGDWARDVERACDPIPEMGAITICPQDVACAVRPLPNWKSPGPDGLHNFWIKWFPRSHARLASQFQTALVSGSLPQFLTTGITHLLHKSGSTAEPKNYRPITCLPTVYKVLTSILKTKINKHIDSNSIMSASQNGCKSGSRGTKELLLIDMAISQQVRRSRKDLSTCWIDYRKAYDSVPHTWLMRVLELYKVDATLRTFLMSCMRTWRTVLRYPGCRNIQRNSEPIRIERGIFQGDSLSPLWFCLALNPLSTLLEDSGLGYRLRRGGQVISHLLYMDDLKLFAPNNSQLRELLKITETFSSSIRMEFGVDKCAVMHVKRGEIMESVGTQLTDSINLRALSASETYKYLGMSEALGINVTDMKQSLKERFFGRLKKVLNSLLSGGNKVRAFNGWVMPVLMYSFGILKWTQTELDALDQRVRTLLTANRLHHPRSSVMRLYIPRKCGGRGFLNAKTLHNREVCSLREYFLETDVGMHRDVVAADKGLTPLSLAKENWRKPVVLDTNDRLEVWKSKELHGRFFRALHGPDVDFQASVAWLRFGDLFGETEGFVFAIMDEVMMTNNYRRFIVKDGTVDICRACHRPGESIRHIISGCSRLANGEYLHRHNLVARIIHQQLALKYNLVESEVPYYRYMPDPVLENGHITLYWDRSIITDRTIVANKPDIVLVDRSERRAMIVDITIPHDENLVKAEKDKQIKYLDLAHEVVDMWEVDSAIIVPIVVTANGLIAKSLDQHLRRLSLGSWIKGLIQKAVLLDTARIVRKFLSLEP

SEQ ID NO: 12966 - protein, 1197 aa, Sesamia nonagrioides
MLTRSAARRARPPSPDSLLSSASPPPASSTTVSAVTTPAAAVALSSSDEYFSPPTTPPPARRRGGRRPPDRLGPRGPSASDRVPAPGGSVQRMRWTQSINENVMRSYYGATEGGNNLTAYRVRMLSLFQVLEPAVNVSAQRLSDQVRVIQRNHMLDDTVLDRLRNEMQSSRIIAHQSQTAEIPPQPTNYADEGSNDRATNVSTQCNEELINALEAAIREYRFTPAEQRPRLPRLPMHNRNRALMAALDAQLSDYFDTCEDLTDTHSILYCAAVAACRVAHVKFPSDSRATRPKPVVPAWQRRIERRIGGARALIGKLICFREGNTRPRVMRFVRRAFAGTNISPQNYMARVTERIDFLKQKVYAWANRIRRYKRRVERYTQNRTFQSNERWVYRDWERPEQGVTDTCLPDDDAMCSFWRSIWSVPVSHTEGDWARDVERACDPIPEMGAITICPQDVACAVRPLPNWKSPGPDGLHNFWIKWFPRSHARLASQFQTALASGSLPQFLTTGITHLLHKSGSTAEPKNYRPITCLPTVYKVLTSILKTKINKHIDSNSIMSASQNGCKSGSRGTKELLLIDMAISQQVRRSRKDLSTCWIDYRKAYDSVPHTWLMRVLELYKVDATLRTFLMSCMKTWRTVLRYPGCRNIQRNSEPIRIERGIFQGDSLSPLWFCLALNPLSTLLEDSGLGYRLRRGGQVISHLLYMDDLKLFAPNNSQLRELLKITETFSSSIRMEFGVDKCAVMHVKRGEIMESVGTQLTDSINLRALSASETYKYLGMSEALGINVTDMKQSLKERFFGRLKKVLNSLLSGGNKVRAFNGWVMPVLMYSFGILKWTQTELDALDQRVRTLLTANRLHHPRSSVMRLYIPRKCGGRGFLNAKTLHNREVCSLRDYFLVTDVGMHRDVVAADKGLTPLSLAKENWRKPVVLDTNDRMEVWKSKELHGRFFRALHGPDVDFQASVAWLRFGDLFGETEGFVFAIMDEVMMTNNYRRFIVKDGTVDICRACHRPGESIRHIISGCSRLANGEYLHRHNLVARIIHQQLALKYNLVESEVPYYRYTPDPVLENGYITLYWDRSIITDRTIVANKPDIVMVDRSERRAMIVDITIPHDENLVKAEKDKQIKYLDLAHEVVDMWEVDSAIIVPIVVTANGLIAKSLDQHLRRLSLGSWIKGLIQKAVLLDTARIVRKFLSLEP

SEQ ID NO: 12967 - protein, 962 aa, Sesamia nonagrioides
MHNRNRALMAALDAQLSNYFDTCEDLTDTHSILYCAAVAACRVAHVKFPSDSRATRPKPVVPAWQRRIKRRIGGARALIGKLICFREGNTRPRVMRFVRRAFSGTNTSPQNYMARVTDRIDFLKQKVYAWANRIRRYKRRVERYTQNRTFQSNERRVYRDWERSEQGVTDTCLPDDDAMCSFWRSIWSVPVSHTEGDWARDVERACDPIPEMGAITICPQDVAHAVRPLPNWKSPGPDGLHNFWIKWFPRSHSRLASQFQTALVSGSLPQFLTTGITHLLHKSGSTAEPKNYRPITCLPTVYKVLTSILKTKINKHIDSNSILSASQNGCRSGSRGTKELLLIDMAISQQVRRSRKDLSTCWIDYKKAYDSVPHTWLMRVLELYKVDATLRTFLMTCMRTWRTVLRYPGCRNIQRNSEPIRIERGIFQGDSLSPLWFCLALNPLSTLLEDSGLGYRLRRGGQVISHLLYMDDLKLFAPNNSQLNELLKITEIFSSSIRMEFGVDKCAVMHVKRGEIMEPVGTQLTSSINLRALSASETYKYLGMSEALGINVTDMKQSLKERFFGRLKKVLNSLLSGGNKVRAFNGWVMPVLMYSFGILKWTQTELDALDQRVRTLLTANRLHHPRSSVMRLYIPRKCGGRGFLNAKTLHNREICSLRDYFLETDVGMQRDVVAADKGLTPLSLANENWRKPVVLDTNDRMEVWKSKELHGRFFRALHGPDVDFQASVAWLRFGDLFGETEGFVFAIMDEVMMTNNYRRFIVKDGTVDICRACHRPGESIRHIISGCSRLANGEYLHRHNLVARIIHQQLALKYKLVESEVPYYRYMPDPVLENGHITLYWDRSIITDRTIIANKPDIVLVDRSERRAMIVDITIPHDENLVKAEKDKQTKYLDLAHEVVDMWEVDSAINVPIVLTANGLIAKSLDQHLRRLSLGSWIKGLIQKAVLLDTARIVRKFLSLEP

SEQ ID NO: 12968 - protein, 887 aa, Sesamia nonagrioides
MRFVRRAFSGTDTSTRDYLFRVTERIDFFKQKIYAWANRIRRYRRRVERYSQNRNFQSDERRVYRAWERSDQGVTDTCLPDDDATCSFWRNIWSVPVSHTEGSWTRVVERACDPVPEMGAITICPQDVARAVRPLPNWKSPGPDGLHNFWIKWFSGSHARLASQFQTALESGSLPQFLTTGVTHLLHKSGSTAEPRNYRPITCLPTVYKVLTSILKYKINTHIDSNSIMSASQNGCRSGSRGTKELLLIDMAISQQVRRSRKDLSTCWIDYKKAYDSVPHTWLMRVLELYKVDATLRTFLMTCMRTWRTVLRYPGCRNIQRNSEPIRIERGIFQGDSLSPLWFCLALNPLSTLLEDSGLGYRLRRGGQVISHLLYMDDLKLFAHTDSQLKELLKITETFSSSIRMEFGVDKCAVMHVKRGEIMESVGTQLTSSINLRALSASETYKYLGMSEALGINVTDMKQSLKERFFGRLKKVLNSLLSGGNKVRAFNGWVMPVLMYSFGILKWTQTELDALDRRVRTLLTANRLHHPRSSVMRLYISRKCGGRGFLNAKTLHNREICSLREYFLTTDVGMHRDVVAVDKGLTSLSLAKENWRKPVVLDTNDRMEVWKSKELHGRFFKALHGPDVDLQASVAWLRFGDLFGETEGFVCAITDEVMMTNNYRRFIVKDGTVDICRACHRPGESIRHIISGCSRLANGEYLHRHNLVARIIHQQLALKYNLVESEVPYYRYTPDPVLENDHITLYWDRSIITDRTIIANKPDIVLVDRSERRAMIVDITIPHDENLVKAEKDKQIKYLDLAHEVVDMSSSSSSSQRLSRLHPRLSRWSPGSAFLHILLHFARSLASCGKSLLARMSSLTTSSQHFFGLPRLFRPGGGAMARHLLPT

SEQ ID NO: 12969 - protein, 1197 aa, Sesamia nonagrioides
MLTRSAARRARPPSPDSLLGSASPPPVSSPTVSAVTTPAAAVALSSSDEYFSPPTTPPPVRRRGGRRPPDRLGPRGPSASDRVPAPGGSVQRMRWTQSINENVMRSYYGATEGGNNLTAYRVRMLSLFQVLEPAVNVSAQRLSDQVRVIQRNHMLDDTVLDRLRNEMQSSRVIAHQSQTAEIPPQSTNYADVGSNDRATNVSTQCNEELINALEAAIREYRSTSAELRPRLPRLPMHNRNRALMAALDAQLSNYFDTCEDLTDTHSILYCAAVAACRVAHVKFPSDSRATRPKPVVPAWQHRIERRIGGARALIGKLICFREGNTRPRVMRFVRRAFASTNISPQNYMARVTERIDFLKQKVYAWANRIRRYKRRVERYTQNRTFQNNERWVYRDWERPEQGVTDTCLPDDDVMCSFWRSIWSVPVSHTEGDWARDVERACDLIPEMGAITICPQDVACAVRPLPNWKSPGPDGLHNFWIKWFPRSHARLASQFQTALVSGSLPQFLTTGITHLLHKSGSIAEPKNYRPITCLPTVYKVLTSILKTKINKHIDSNSIMSASQNGCKSGSRGTKELLLIDMAISQQVRRSRKDLSTCWIDYRKAYDSVPHTWLMRVLELYKVDATLRTFLMSCMRTWRTVLRYPGCRNIQRNSEPIRIERGIFQGDSLSPLWFCLALNPLSTLLEDSGLGYRLRRGGQVISHLLYMDDLKLFAPNNSQLRELLKITETFSSSIRMEFGVDKCAVMHVKRGEIMESVGTQLTGSINLRALSASETYKYLGMSEALGINVTDMKQSLKERFFGRLKKVLNSLLSGGNKVRAFNGWVMPVLMYSFGILKWTQTELDALDQRVRTLLTANRLHHPRSSVMRLYIPRKCGGRGFLNAKTLHNREVCSLREYFLETDVGMHRDVVAADKGLTPLSLAKENWRKPVVLDTNDRLEVWKSKELHGRFFRALHGPDVDFQASVAWLRFGDLFGETEGFVFAIMDEVMMTNNYRRFIVKDGTVDICRACHRPGESIRHIISGCSRLANGEYLHRHNLVARIIHQQLALKYKLVESEVPYYRYMPDPVLENGHITLYWDRSIITDRTIVANKPDIVLVDRSERRAMIVDITIPHDENLVKAEKDKQIKYLDLAHEVVDMWEVDSAIIVPIVVTANGLIAKSLDQHLRRLSLGSWIKGLIQKAVLLDTARIVRKFLSLEP

SEQ ID NO: 12970 - protein, 868 aa, Sesamia nonagrioides
MRFVRRAFSGTDTSTRDYLFRVTERIDFFKQKIYAWANRIRRYKRRVERYSQNRNFQSDERRVYRAWERSDQGVTDTCLPDDDATCSFWRNIWSVPVSHTEGSWTRVVERACDPVPEMGAITICPQDVAHAVRPLPNWKSPGPDGLHNFWIKWFTRSHACLASQFQTALESGSLPQFLTTGVTHLLHKSGSTAEPKNYRPITCLPTVYKVLTSILKSKINTHIDSNSIMSVSQNGCRSGSRGTKELLLIDMAISQQVRRSRKDLSTCWIDYKKAYDSVPHTWLMRVLELYKVDATLRTFLMTCMRTWRTVLRYPGCRNIQRNSEPIRIERGIFQGDSLSPLWFCLALNPLSTLLEDSGLGYRLRRGGQVISHLLYMDDLKLFAHTDSQLKELLKITETFSSSIRMEFGVDKCAVMHVKRGEIMESVGTQLTSSINLRALSASETYKYLGMSEALGINVTDMKQSLKERFFGRLKKVLNSLLSGGNKVRAFNGWVMPVLMYSFGILKWTQTELDALDRRVRTLLTANRLHHPRSSVMRLYIPRKCGGRGFLNAKTLHNREICSLREYFLTTDVGMHRDVVAVDKGLTPLSLAKENWRKPVVLDTNDRMEVWKSKELHGRFFTALHGPDVDLQASVAWLRFGDLFGETEGFVCAIMDEVMMTNNYRRFIVKDGTVDICRACHRPGESIRHIISGCSRLANGEYLHRHNLVARIIHQQLALKYNLVESEVPYYRYTPDPVLENDLITLYWDRSIITDRTIVANKPDIVLVDRSERRAMIVDITIPHDENLVKAEKDKQIKYLDLAHEVIDMWEVDSAIIVPIVVTANGLIAKSLDQHLRRLSLGSWIKGLIQRAVLLDTARIVRKFLSLEP

SEQ ID NO: 12971 - protein, 1197 aa, Sesamia nonagrioides
MLTRSAARRARPPSPDSLLGSASPPPVSSPTVSAVTTPAAAVALSSSDEYFSPPTTPPPVRRRGGRRPPDRLGPRGPSASDRVPAPGGSVQRMRWTQSINENVMRSYYGATEGGNNLTAYRVRMLSLFQVLEPAVNVSAQRLSDQVRVIQRNHMLDDAVLDRLRNEMQSSRVIAHQSQTAEIPPQSTNYADEGSNDRATNVSTQCNEELINALEAAIREYRSTSAELRPRLPRLPMHNRNRALMAALDALLSNYFDTCEDLTDTHSILYCAAVAACRVAHVKFPSDSRATRPKPVVPAWQHRIERRIGGARALIGKLICFREGNTRPRVMRFVRRAFAGTNISPQNYMARVTERIDFLKQKVYAWANRIRRYKRRVERYTQNRTFQNNERWVYRDWERPEQGVTDTCLPDDDVMSSFWRSIWSVPVSHTEGDWARDVERACDLIPEMGAITICPQDVACAVRPLPNWKSPGPDGLHNFWIKWFPRSHARLASQFQTALVSGSLPQFLTTGITHLLHKSGSTAEPKNYRPITCLPTVYKVLTSILKTKINKHIDSNSIMSASQNGCKSGSRGTKELLLIDMAISQQVRRSRKDLSTCWIDYRKAYDSVPHTWLMRVLELYKVDATLRTFLMSCMRTWRTVLRYPGCRNIHRNSEPIRIERGIFQGDSLSPLWFCLALNPLSTLLEDSGLGYRLRRGGQVISHLLYMDDLKLFAPNNSQLRELLKITETFSSSIRMEFGVDKCAVMHVKRGEIMESVGTQLTGSINLRALSASETYKYLGMSEALGINVTDMKQSLKERFFGRLKKVLNSLLSGGNKVRAFNGWVMPVLMYSFGILKWTQTELDALDQRVRTLLTANRLHHPRSSVMRLYIPRKCGGRGFLNAKTLHNREVCSLREYFLETDVGMHRDVVAADKGLTPLSLAKENWRKPVVLDTNDRLEVWKSKELHGRFFRALHGPDVDFQASVAWLRFGDLFGETEGFVFAIMDEVMMTNNYRRFIVKDGTVDICRACHRPGESIRHIISGCSRLANGEYLHRHNLVARIIHQQLALKYKLVESEVPYYRYMPDPVLENGHITLYWDRSIITDRTIVANKPDIVLVDRSERRAMIVDITIPHDENLVKAEKDKQIKYLDLAHEVVDMWEVDSAIIVPIVVTANGLIAKSLDQHLRRLSLGSWIKGLIQKAVLLDTARIVRKFLSLEP

SEQ ID NO: 12972 - protein, 868 aa, Apamea monoglypha
MRFVRRAFSGTDISSQDYLSHVTERIDFLKQKVYAWANRIRRYKRRVERYTQNRTFQSDERWVYRGWERPDQGVADTCLPDDDAMCSFWRSIWSAPVSHTEGDWAREVERACDPIPEMEAITICPQDVARAVRPLPNWKSPGPDGLHNFWIKWFTRSHARLASQFQTALESGSLPQFLTTGVTHLLHKSGNTAEPKNYRPITCLPTVYKVLTSILRAKINKHIDTNSIMSASQNGCKNGSRGTKELLLIDMAISQQVRRSRKDLSTCWIDYKKAYDSVPHTWLMRVLDLYKIDATLRTFLMSCMRQWRTVLRYPGCRNIQRNSEPIRIERGIFQGDSLSPLWFCLALNPLSTLLEDSGLGYRLRRGGQVISHLLYMDDLKLFAPNHLQLMELLKVTETFSSAIRMEFGVDKCAVMHVKRGEIVESVGTQLSDSTNLRALSASETYKYLGMSEALGINVTDMKQSLKERFFGRLKKVLNSLLSGGNKVRAFNSWVMPVLMYSFGILKWTQTELDALDRRVRTLLTANRMHHPRSSVMRLYIPRKCGGRGFLNAKTLHNREICSLREYFLETDVGMHRDVVAVDKGLTPLSLAKENWRKPVVLDTNDRLEVWQSKELHGRFYRALHGPDIDLLASVAWLRFGDLFGETEGFVCAIMDEVMMTNNYRRFIVKDGTVDICRACHRPGESIRHIISGCSRLANGEYLHRHNLVARIIHQQLALKYSLVESEVPYYRYVPDPVLENGNITLYWDRSIITDRTIVANKPDIVVVDRSERRAMIVDITVPHDENLVKAEKDKQIKYLDLAREVVDMWDVDSAIIVPIVVTANGLIAKSLDQHLRRLSLGSWIKGLIQKAVLLDTARIVRRFLSLEP

SEQ ID NO: 12973 - protein, 962 aa, Apamea monoglypha
MHNKNRALVAVLDAQLSSHFDVCEDLTDTHSILYCAAVAACRVAHVKFASDSEATRPKPAIPAWQCRIERRIGGARALIGKLICFREGNTRPRVMRFVRRAFLGTDISSQDYLSRVTERIDFLKQKVYAWANRIRRYKRRVERYTQNRTFQNDERWVYRGWERPDQSVADTCLPDDDAMCSFWRSIWSAPVSHTEGDWTGKIERACELIPEMGAITICPQDVARAVRPLPNWKSPGPDGLHNFWIKWFQRSHAPLAAQFQSALESGLLPQFITTGITHLLHKSGSTADPKNYRPITCLPTIYKVLTSILRAKINKHIDSNSIMSVSQNGCRNGSRGTKELLLIDMAISQQVRRSRKDLSTCWIDYKKAYDSVPHTWLMRVLELYKVDTTLRTFLMTCMGQWRTVLRYPGCRNIQRNSEPIRIERGIFQGDSLSPLWFCLALNPLSTLLDDSGLGYRLRRGGQVISHLLYMDDLKLFAPNNLQLMELLKITETFSSAIRMEFGVDKCAVMHVKRGEIVESVGTQLSDSTNLRALSASETYKYLGMSEALGINVTDMKQSLKERFFGRLKKVLNSLLSGGNKVRAFNSWVMPVLMYSFGILKWTQTELDALDRRVRTLLTANRLHHPRSSVMRLYIPRKCGGRGFLNAKTLHNREICSLREYFLETDVGMHRDVVAVDKGLTPLSLAKENWRKPVVLDTNDRMEVWQSKELHGRFYRALHGPDVDLLASVAWLRFGDLFGETEGFVCAIMDEVMMTNNYRRFIVKDGTVDICRACHRPGVSIRHIISGCSRLANGEYLHRHNLVARIIHQQLALKYNLVESEVPYYRYVPDPVLENGNITLYWDRSIITDRTIVANKPDIVVVDRSERRAMIVDITVPHDENLVKAEKDKQIKYLDLAREVVDMWHVDSAIIVPIVVTANGLIAKSLDQHLRRLSLGSWIKGLIQKAVLLDTARIVRRFLSLEP

SEQ ID NO: 12974 - protein, 909 aa, Apamea monoglypha
MRCRVEDLEPLAFIVRVRKYLIIIIIIKLICFREGNTRPRVMRFVRRAFSGTDISSQDYLSRVTERIDFLKQKVYAWANRIRRYKRRVDRYTQNRTFQSDERWVYRGWERPDQGVADTCLPDDDAMYSFWRSIWSVPVSHTEGDWSREVERACDPIPEMEAITICAQDVARAVRPLPNWKSPGPDGLHNFWVKWLTRSHARLASQFQIALESGSLPQFLTTGVTHLLHKSASTAEPKNYRPITCLPTVYKVLTSILRAKINKHIDTNSIMSASQNGCKNGSRGTKELLLIDMAISQQVRRSRKDLSTCWIDYKKAYDSVPHTWLMRVLELYKVDTTLRTFLMTCMGQWRTVLRYPGCRNIQRNSEPIRIERGIFQGDSLSPLWFCLALNPLSTLLEDSGLGYRLRRGGQVISHLLYMDDLKLFAPNNLQLMELLKITETFSSAIRMEFGVDKCAVMHVKRGEIVESVGTQLSDSTNLRALSASETYKYLGMSEALGINVTDMKQSLKERFFGRLKKVLNSLLSGGNKVRAFNSWVMPVLMYSFGILKWTQTELDALDRRVRTLLTANRLHHPRSSVMRLYIPRKCGGRGFLNAKTLHNREICSLREYFLETDVGMHRDVVAVDKGLTPLSLAKENWRKPVVLDTNDRMEVWQSKELHGRFYRALHGPDVDLLASVAWLRFGDLFGETEGFVCAIMDEVMMTNNYRRFIVKDGTVDICRACHRPGESIRHIISGCSRLANGEYLHRHNLVARIIHQQLALKYNLVESEVPYYRYVPDPVLENGNITLYWDRSIITDRTIVANKPDIVVVDRSERRAMIVDITVPHDENLVKAEKDKQIKYLDLAREVVDMWDVDSAIIVPIVVSANGLIAKSLDQHLRRLSLGSWIKGLIQKAVLLDTARIVRRFLSLEP

SEQ ID NO: 12975 - protein, 917 aa, Apamea monoglypha
MLFTVSRLNLLKINIIPAWQCRIERRIGGARALIGKLICFREGNTRPRVMRFVRRAFSGTDISFQDYLSRVTERIDFLKQKVYAWANRIRRYKRRVDRYTQNRTFQSDERWVYRGWERPDQGVADTGLPDDDAMCSFWRSIWSAPVSHTEGDWAREVERACDPIPEMEAITICPQDVARAVRPLPNWKSPGPDGLHNFWIKWFSRSHARLASQFQTALESGSLPQFLTTGVTHLLHKSGSTAEPKNYRPITCLPTVYKVLTSILRAKINKHIDTNSIMSASQNGCKNGSRGTKELLLIDMAISQQVRRSRKDLSTCWIDYKKAYDSVPHTWLMRVLDLYKVDATLRTFLMSCMRQWRTVLRYPGCRNIQRNSEPIRIERGIFQGDSLSPLWFCLALNPLSTLLEDSGLGYRLRRGGQVISHLLYMDDLKLFAPNNLQLMELLKVTETFSSPIRMEFGVDKCAVMHVKRGEIVESVGTQLSDSTNLRALSASETYKYLGMSEALGINVTDMKQSLKERFFGRLKNVLNSLLSGGNKVRAFNSWVMPVLMYSFGILKWTQTELDALDRRVRTLLTANRMHHPRSSVMRLYIPRKCGGRGFLNAKTLHNREICSLREYFLETDVGMHQDVVAVDKGLTPLSLAKENWRKPVVLDTNDRLEVWQSKELHGRFYRALHGPDVDLLASVAWLRFGDLFGETEGFVCAIMDEVMMRNNYRRFIVKDGTVDICRACHRPGESIRHIISGCSRLANGEYLHRHNPVARIIHQQLALKYSLVESEVPYYRYVPDPVLENGHITLYWDRSIITDRTIVANKPDIVVVDRSERRAMIVDITVPHDENLVKAEKDKQIKYLDLAREVVDMWDVDSAIIVPIVVTANGLIAKSLDQHLRRLSLGSWIKGLIQKAVLLDTARIVRRFLSLEP

SEQ ID NO: 12976 - protein, 1196 aa, Furcula furcula
MLTRSKARQRSPGSLPRSASQLPGRRSDGSPAAVASSESDEYFSPPTSPPPVCRRRGRPPRDLGRLGQPAPNRVLVPGGVVRRMRWTSTINESVMRAYYEATAGGTNLTAYRNRMLSLFQTLEPAVNVSAQRLSDQVRAIQRGNMLDDAVLDRLRSEVQGSRVAPCIPSSQAVAPVIYTAPAPRLEANSDNDGDDITTNVSTYKITQLRSTLEDVVREYRTMPQNLRPRLPRLPMHKRNRALVCALDSLLLSYFDSSEDLADAHSLLYCAAMTACRVARVKVPNADAATRPRPAVPAWQCRIERRIGEARVLIGKLTCFREGNTRPRVMRFVRRAFSGTGIGPREYLSRVTERIDFLKQKVCAWANRIRRYKARVDRYFQNNMFQRDQRWVYRSWERPSQTEGDVRRPDDDAMTTFWRNIWSVPVTHSEGDWIRDVEQVCEPLPEMGAITIWPQDVADAVRQLPNWKAPGPDGLHNFWLKWIRSSHICLASLFQSALESGSLPEFMTTGITHLLHKNNSTTDPKNYRPITCLPTVYKTLTSILRAKIYRHVEDNSIMSASQNGCRSGARGTKELLLIDVAICQQARRSRKDLSTCWIDYKKAYDSVPHTWLMRVLELYKVNATLRTFLASCMRQWRTVLLYPGSRQTLGNGDPIRIERGIFQGDSLSPLWFCLALNPLSTLLKSSGLGYRLRRGSQVISHLLYMDDLKLFAPTELQLMGLLKVTETFSNSIRMEFGVDKCAVMHVKRGRLVESRSVQLSDSTDLRTLSATETYKYLGMSQALGINETDMKQSLRERFLGRLRKVLKSLLSGGNRVRAYNGWVMPVLMYSFGILKWTQTELDTLDRTVRTLLTTYRMHHPRSSVMRLYIPRKCGGRGFLNAKTLHNREICNLREYFLHCGGEMHTDVVAVDNGLTPLSLAKGNWRKPVVLTTGDREAVWQSKELHGRFYRALHGPDVDFSASVAWLRFGDLFGETEGFVCAIMDEVVMTNNYRKYILRDGTIDICRACHRPGESLRHIISGCSRLANGEYLHRHNQVARIIHQQLALKYRLVTSEVPYYRYVPEPVLEDGHITLYWDRSIITDRTIVANKPDIVLIDRTERHAMIVDVTVPHDENLVKAEKDKECKYLDLAHEVVDMWDIDRAIIVPIVVSAHGLMAKSLDKHLKRLALDGWIKGQMQKAVLLETARIVRKFLSLEP

SEQ ID NO: 12977 - protein, 1194 aa, Furcula furcula
MLTRSKAHLRPSDSSPHSASQPPGPSRDGSLAAVASSESDEYFSPPSSPPPVRRRRGRPPRELGLLEQPAPNRVLAPGGVVRRMRWTLSINENVMRAYYEATEGGTNLTAYRDRMLSLFQALEPAVNVSAQRLSDQVRAIQRGHMLDDAVLDRLRSEVQGSRVVPCIPSSQAVAPAVNTAPAPRPAANSDDDRDDMTTDVSTNVSSQLRSTLEDVVREYRTMPQGLRPRLPRLPMHKRNRALVCALDSLLSSYFDSSEDLADAHALLYCAAITACRVARVKFPDAATRPKPAVPAWQCRMERRIGEARVLIGKLTCFREGNMRPRVMRFVRRAFSGTGIDPREYLSRVTERIDFLKQKVCAWANRIRRYRARVDRYSQNNMFQRDQRWVYRSWERPRQIVGEVQRPDDDAMIRFWRNIWSIPVTHSEGDWIGDVEEVCEPLPEMGPITIGPQDVADAVRPLPNWKAPGPDGLHNFWLKCIRSSHICLASLFQSALESGSLPEFMTTGITHLLHKTDSTTNPKNYRPITCLPTVYKTLTSILRAKIYRHVEDNSIMSSSQNGCKSGARGTKELLLIDMAICQQARRNRKDLSTCWIDYKKAFDSVPHTWLMRVLELYKVNTTLRTFLASCMRQWRTVLLYPGSRQTLGNGDPIRIERGIFQGDSLSPLWFCLTLNPLSTLLKSSGLGCRLRRGGQVISHLLYMDDLKLFAPTELQLMGLLKVTETFSNSIRMEFGVDKCAVMHVKRGRMVESRSVQLSDSTDLRTLSATETYKYLGMSQALNINETAMKQSLRERFLGRLRKVLKSLLSGGNKVRAYNGWVMPVLMYSFGILKWTQTELDTLDRTVRTLLTTYRMHHPRSSVMRLYIPRKSGGRGFLNAKTLHNREICNLREYFLHCSGEMHTDVVAVDNGLTPLSLAKGNWRKPVVLTTGDRGAVWQSKELHGRFYRALHGPDVDFTASVAWLRFGDLFGETEGFVCAIMDEVVMTNNYRRYILRDGTIDICRACHRPGESLRHIISGCSRLANGEYLHRHNQVARIIHQQLALKYRLVTSEVPYYRYAPDPVLEDGHITLYWDRSIITDRTIVANKPDIVLIDRTERRAMIVDVTVPHDENLVKAEKDKQCKYLDLAHEVVDMWDIDNAIIVPIVVSAHGLMAKSLDKHLKRLTLDGWIKGQIQKAVLLETARIVRKFLSLEP

SEQ ID NO: 12978 - protein, 1202 aa, Spodoptera exigua
MLTRAAARRARPPPPASSLSSASPLPGSSPTGSDVTPAVAAASSSSDEYYSPPTTPPPTRRRGERRPPARLGPRGPPASDRVPATGGSVQRMRWTQSINENVMRAYYGATEGGNNLTAYRVRMLSLFQVLEPAINVSAQRLSDQVRVIQRNRMLDDTVLDRLRTEMGSCAGASSSRTVAPAMMPPSNRGIVSTAADEESTDTVTHVSTQCSDELRSALECAIREYRYMSPETRPRLPRLPMHNKNRVLVAALDSQLSNHFDDCEDLSDTHSMMYCAAVAACRVAHVKFPTSDVATRLKPAVPAWQRRIERHIAGARALIGKLICFREGNTRPRVMRFVRRAFSGTDISPQDYMSRVTERIDFLKQKVYAWANRIRRYKRRVERYTQNRTFRSNERWVYRAWERPDQGVTDTRLPDDDAMCSFWRSIWSVPVSHTEGDWIREVERACDPIPQMGAINISPQDVARAVRPLPNWKSPGPDGLHNFWIKWFTRSHARLASQFQSALESGSLPQFLTTGVTHLLHKSGSTTEPKNYRPITCLPTVYKVLTSILRSKINSHIDKNNIMSTAQNGCKSGSRGTKELLLIDMTISQQVRRSRKDLSTCWIDYKKAYDSVPHTWLMRVLELYKIDIKLRTFLMSCMRQWSTVLRYPGCRHIQTNSEPVRIERGIFQGDRLSPLWFCLALNPLSTLLENSGLGYRLKRGGQVISHLLYMDDLKLFAPNKLQLMELLKLTEIFSSAIRMEFGVDKCAVMHVKRGEIVESVGTQLTDSINLRSLSPTETYKYLGMSEALGINVTDMKQSLRERFFGRLKKVFNSFLSGGNKVRAFNGWVMPVLMYSFGVLKWSQTELDALDRRVRTMLTAYRMHHPRSSVMRLYIPRKCGGRGFLNAKTLHNLEVCSLREYFLAADVGMHRDVVAVDKGLTPLSLAKENWRKPVVLDTNARREVWQSKELHGRFFRALHGPDVDQLASVAWLRFGDLFGETEGFVCAIMDEVIMTNNYRRFIVKDGTADICRACHRPGESIRHIISGCSRLANGEYLHRHNLVARIIHQQLALKYSLVESEVPYYRYEPDPVLDNGHITLYWDRSIITDRTIVANKPDIVVVDRKERRAMIVDIAVPHDENLMKAEKDKLIKYIDLAREVVDMWEVDSAIIVPIVVSANGLIAKSLDQHLRRLSLGGWIKGLIQKVVLLDTARIVRRFLSLEP

SEQ ID NO: 12979 - protein, 868 aa, Arctia plantaginis
MRFVKQAFLGTTIGPQQYMSCVTERIDFLKQKIYAWANRIRRYKKRIDRYNQNRMFQRNEKWVYRKWEEPDPCVSHGHLPDENVTHTFWRNIWSVPVTHIEGDWLRDVRRSCESITPMEPVIIDKDDVSCAVRSLPNWKSPGLDGLHNFWLKWFRSSHACLASQFQAALNSGSLPQFLTTGITHLLYKSGSVMDPKKFRPITCLPTMYKLLTSILRLKITLHINNNSIMSVSQNGCRSGSRGTKDLLIIDRAISQQVRRNRKSLATCWIDYKKAYDSVPHTWLLRVLELYKIDTTLCTFLKSCMGQWRTALRYPGCRQTTVIDAPIKIERGIFQGDSLSPLWFCLALNPLSTLLEGSGLGYRLQKDDQVISHLLYMDDLKLLAPTKLQLSALLKVTENFSNSIKMEFGVDKCAVMYVKKGVIVESEGIELSDSTKLRSLSATETYKYLGISQSLGIPESDMKQTLQERFFGRLKKVLKSLLSGGNKVRACNGWVMPILMYSFGILKWTQTELDALDRRVRTLLTAFRMHHPRSSVMRLYIPRKLGGRGLLNIKTLHNREICNLREYFLHTDVGMHRNVVGVDIGFTPLALAKENWRKPVVFSTNDRREVWKGKELHGRFYRALNGSDIDFKASTTWLRYGDLFGETEGFVCAIMDEVIMTNNYRKYILKDGTVDICRACHRPGESIRHIISGCSRLANGEYLHRHNQVARIVHQQLALKYHLVNLEVPYYRYVPDPVLENGRATLYWDRSIITDRTIVANKPDIVVIDRLERRAIIVDIAVPHDENLVKVEKEKQIKYLDLSHEIVDMWNVDSVIIVPIVVSAHGLIAKSLDQHLKRLTLDGWIKGLIQKAVLLDTARIVRRFLSLQS

SEQ ID NO: 12980 - protein, 1198 aa, Mamestra configurata
MLTRAAAQRARLPPPASSLSSASPPPEPSPTVSAVIPAVAVASSSSDEYFSPPTSPPPARRRRGRRPPDGLGPRGPPASDRVPAPGGSVQRMRWTQTINENVMRSYYGATEGGTNLTAYRGRMLSLFQVLEPAVNVSAQRLSDQVRVIQRNRMLDDAVLDRLRLESRNGRVSAASPPAAVQIQSSVSPRPNIVGEDDDDGAISVSTQCNERLRSALEDAFREYRSTPPELRPRLPRLPMHNKNRALVCALDSQLANCFDSSEDLADTHSILYCAAAAACRVAHVKFPNSDRATRPAVPAWQCRIERRIGEARALIGKLICFREGNTRRRVMRFVRRAFSGTDTSPRDYLTRVTERIDFLKQKIYAWANRIRRYKRRVERYTQNRTFQSNERWVYRAWERPDQGVTDTRLPDDDVMCSFWRNIWSVPVSHTEGDWTREVERACDPIPEMGAITISPQDVARAVRPLPNWKSPGPDGLHNFWIKWFKRSHARLASQFQSALESGSLPQFLTTGITHLLHKSGSTAEPKNYRPITCLPTVYKVLTSILRAKINQHIETNSIMSASQNGCRNRSRGTKELLLIDVAISQQVRRSRRDLSTCWIDYKKAYDSVPHTWLMRVLELYKVDAVLRTFLMSCMGQWRTVLRYPGCRQIQANSDPIRIERGIFQGDSLSPLWFCLALNPLSTLLEGSGQGYRLRRGGQVISHLLYMDDLKLFAPNNLQLMKLLKVTETFSSAISMEFGVDKCAVMHVKRGEIMESVGTQLSDSIHLRSLSSTETYKYLGMSEALGINANDVKQSLKERFFGRLNKVLNSLLSGGNKVRAFNGWVMPVLMYSFGILKWTQTELDALDRRVRSLLTANRMHHPRSSVMRLYIPRKCGGRGFLNAKTLHNREICSLREFFLEADVGMHRDVVAVDKGLTALSLANENWRKPVVLDTNDRREVWQSKELHGRFYRVLHGPDVDFLASVAWLRFGDLFGETEGFVCAIMDEVMMTNNYRKYIVKDGTVDICRAYHRPGESIRHIISGCSSLANGDYLHRHNLVARIIHQQLALKYNVVESEVPYYRYVPDPVLENGNCTLYWDRSIITDRTIVANKPDIVVIDRLERRAMIDDIAVPHDANLVKSEKDKQTKHLDLAREVVDMWDVNTAVIVPIVVTANGLIAKSLDQHLKRLSLGSWIKGLVQKAVLLDTARIVRRFLSQGP

SEQ ID NO: 12981 - protein, 961 aa, Mamestra configurata
MHNKNRALVAALDSQLSNYFDDCEDLTDTHSIMYCAAVATCRVAHVKMTNDRVTRPKPAVPAWQCRIERRIGGARALIGKLICFREDNTRPRVMRFVRRAFSGTDISPRDYMSRVTERIDFLKQKVYAWANRIRRYRRRVERYTQNRTFRSNERWVYRVWEQPDQGVTDTRLPDDDAMCSFWRNIWSVPVSHTEGDWIREVERACDPLPEMGAITISPQDVARAVRPLPNWKSPGPDGLHNFWIKWLQRSHARLASQYQTALESGSLPEFLTTGVTHLLHKSGSTAEPKNYRPITCLPTVYKVLTSILRAKINNHINSNNIMSVSQNGCRNGSRGTKELLLIDMAISQQVRRSRKDLSTCWIDYKKAYDSVPHTWLMRVLELYKIDTMLRTFLMSCMGQWRTVLRYPGCRNIQRNSEPVRIERGIFQGDSLSPLWFCLALNPLSTLLENSGLGYRLKRGGQVISHLLYMDDLKLFAPSNLQLMELLKVTETFSSAIRMEFGVDKCAVMHVKRGEIMESVGTQLSDSINLRSLSSTETYKYLGMSEALGINVTDMKQSLKERFFGRLKKVFNSLLSGGNKVRAFNGWVMPVLMHSFGVLKWTQTELDALDRRVRTLLTAYRMHHPRSSVMRLYIPRKCGGRGFLNAKTLHNREICSLREYFLAVDVGMHRDVVAVDKGLTPLSLANENWRKPAVLDTNDRRAVWQSKELHGRYFRALHGPDVDQLASVAWLRFGDLFGETEGFVCAIMDEVIMTNNYRRFIVKDGTVDICRACHRPGESIRHIVSGCSRLANGEYLHRHNLVARIIHQQLALKYSLVESEVPYYRYAPDPVLDNGNITLYWDRSIITDRTIVANKPDIVVVDRIERRAMIVDITVPHDENLVKAEKDKQIKYIDLAREVVDMWDVDSAIIVPIVVSANGLIATSLDQHLRRLSLGSWIKGLIQKAVLLDTARIVRRFLSLEP

SEQ ID NO: 12982 - protein, 1208 aa, Amphipyra berbera
MQTRSRAKATVTQNTRPTTSASSLSSASQPPDSSIVSDVTPAAAVASSSSDEFFSPPTSPPPPPARRRGRGRPPASIGPRGPPASDRVPAPGGSVQRMRWTQSMNENCMRAYFGATEGGTNLTAYRGRMLSLFQVLEPAVNVSAQRLSDQVRVIQRDHRLTDVALDRLRSEVQSNRIISPQSQTAAQPRAPTVVPPPPIHADEESNDRVTNVSTQCNEQLRSALELAIREYRFTPPNLRPRIPRLPMHRKNRALMCALDSLLTSYFDNSENLEDTHSILYCAAVAACRVAHVKFDNNDRATRPKPTVPAWQCRIERRINEARALIGKLICFREGNTRPRVMRFVRRAFSGTDINPRDYMSRVTERIDFLKQKVYAWANRIRRYKRRVERYTQNRMFHSDERRVYRTWERPDHDVNDTHLPDNDVMNTFWRNIWSMPVTHTEGDWMQEVQRACEPIEEMGDITIVPQDVTSAVRPMANWKSPGPDGLHNFWLKWLRSSHARLASQFQSSLESGSLPQFLTTGVTHLLHKSGSTAEPKNYRPITCLPTVYKLLTSILRAKINSHIINNSIMSVSQNGCKNGSRGTKELLLIDMAISQQVRRSRKDLSTCWIDYKKAYDSVPHTWLMRVLELYKVNTTLCAFLTSCMGQWRTVLHYPGCRQIQGRGEPIRIERGIFQGDSLSPLWFCLALNPLSTLLEGSGLGYRLRRGGQVISHLLYMDDLKLFAPNNLQLMKLLKVTETFSNSIRMEFGVDKCAVMHVKRGGIMESVGTQLSDSIHLRSLSSTETYKYLGMSETLGINETDMKQSLRERFYGRLKKVLKSLLSGGNKVRAFNGWVMPVLMYSFGILKWTQTELDALDRRVRTLLTAYRMHHPRSSVMRLYIPRKCGGRGFLNAKTLHNREVCSLREYFLQADVGMHRDVVAVDKGFTPLSLAKENWRKPVVLDTNGRREVWQSKELHGRFYRALHGPDVDFLASVAWLRFGDLFGETEGFVCAIMDEVIMTNNYRKYIVKDGTVDICRACHCPGESIRHIISGCSRLANGEYLHRHNLVARIIHQELALKYNLVDAEVPYYKYVPDPVLENGHITLYWDRSIITDRTIVANKPDIVVIDRTERLTMIVDITVPHDENLVKAEKDKEIKYQDLAHEVVDMWEIDSAVIVPIVVTANGLIAKSLDHHLTRLSLGSWVKGLIQKAVLLDTARIVRKFLSLRP

SEQ ID NO: 12983 - protein, 1207 aa, Amphipyra berbera
MLTRSRAKAIAQNTRPRPSASSLSSASQPPDSSIVSDVTPAAAVASSSSDEYFSPPSTPPPPPPRRRGRGRPPASLGPRGPPASDRVPAPGGSVQRMRWTPTMNENCMRAYFGATEGGTNLTAYRGRMLSLFQVLEPAVNVSAQRLSDQVRVIQRDHRLTDDALDRLRSEVQSNCIISLQSQTAAQPQVPPMVPPQPIRADEESDDRVTIVSAQCNEQLRSALELAIREYRFTPPNLRPRIPRLPMNRQNRALMCALDSLLSNYFDNSEGLEDTHSILYCAAVAACRVAHVKFDNNDRATRPKPAVPAWQCRIERRINEARALIGKLICFREGNTRPRVMRFVRRAFSGTDINPREYMSRVTERIDFLKQKVYAWANRIRRYKRRVERYTQNRMFHSDERWVYRTWERPEHDVSDTHLPDNDVMNTFWRNIWSMPVTHTEGDWMQEVQRACEPIEEMGDIIIVPQDVTSAVRPMVNWKSPGPDGLHNFWLKWLRSSHARLASQFQSSLESGSLPPFLTTGITHLLHKSGSTAEPKNYRPITCLPTIYKLLTSILRAKINTHIINNSIMSASQNGCKNGSRGTKELLLIDMAISQQVRRSRKDLSTCWIDYKKAYDSVPHTWLMRVLELYKVNTTLCAFLTSCMGQWRTVLHYPGCRQIQGRGEPIRIERGIFQGDSLSPLWFCLALNPLSTLLEGSGLGYRLRRGGQVISHLLYMDDLKLFAPNNLQLMKLLKVTETFSNSIRMEFGVDKCAVMHVKRGGIMESVGTQLSDSIHLRSLSSTETYKYLGMSEALGINETDMKQSLRERFYGRLKKVLKSLLSGGNKVRAFNGWVMPVLMYSFGILKWTQTELDALDRRVRTLLTAYRMHHPRSSVMRLYIPRKCGGRGFLNAKTLHNREVCSLREYFLQADVGMHRDVVAVDKGFTPLSLAKENWRKPVVLDTNGRREVWQSKELHGRFYRALHGPDVDFLASVAWLRFGDLFGETEGFVCAIMDEVMMTNNYRKYIVKDGTVDICRACHCPGESIRHIISGCSRLANGEYLHRHNLVARIIHQQLALKYNLVDAEVPYYKYVPDPVLENGHITLYWDRSIITDRTIVANKPDIVVIDRTERLTMIVDITVPHDENLVKAEKDKEIKYQDLAHEVVDMWEVDSAVIVPIVVTANGLIAKSLDHHLTRLSLGRWVKGLIQKAVLLDTARIVRKFLSLRP

SEQ ID NO: 12984 - protein, 1210 aa, Amphipyra berbera
MTAMLTRSRAKAITQSTRPRSSAPSLSSASQPPDSSIVSDVTPAAAVASSSSDEFFSPPTSPLPPPARRRGRGRPPASIGPRGRPASDRVPAPGGSVQRMRWTLTMNENCMRAYFGATEGGTNLTAYRGRMLSLFQVLEPTVNVSAQRLSDQVRVIQRDHRLTDAALDRLRSEEQSNRIISLQSQTAAQPQAPTVVPPLPIHADEESDDRVTNVSTQCNDQLRSALELAIREYRFTPPNIRPRIPRLPMHRKNRALMCALDSLLSSYFDNSENLEDTHSILYCAAVAACRVAHAKFDNNDRATRPKPAVPAWQCRIERRINEARALIGKLICFREGNTRPRVMRFVRRAFSGTDINPRDYLSRVTERIDFLKQKVYAWANRIRRYKRRVERYTQNRMFHSDERWVYRTWERPDHDVSDTHLPDNDVMNTFWRNIWSMPVTHIEGDWMQEVQRACEPIEEMGDITIVPQDVTSAVRPMANWKSPGPDGLHNFWLKWLRSSHARLASQFQSSLESGSFPEFLTTGVTHLLHKSGSTAEPKNYRPITCLPTVYKLLTSILRAKINSHIINNSIMSVSQNGCKNGSRGTKELLLIDMAISQQVRRSRKDLSTCWIDYKKAYDSVPHTWLMRVLELYKVNTTLCAFLASCMGQWRTVLHYPGCRQIQGRGEPIRIERGIFQGDSLSPLWFCLALNPLSTLLEGSGLGYRLRRGGQVISHLLYMDDLKLFAPNNLQLVKLLKVTETFSNSIRMEFGVDKCAVMHVKRGGIMESVGTQLSDSIHLRSLSSTETYKYLGMSEALGINETDMKQSLRERFYGRLKKVLKSLLSGGNKVRAFNGWVMPVLMYSFGILKWTQTELDALGRRVRTLLTAYRMHHPRSSVMRLYIPRKCGGRGFLNAKTLHNREVCSLREYFLHADVGMHRDVVAVDKGFTPLSLAKENWRKPVVLDTNGRREVWQSKELHGRFYRALHGPDVDFLASVAWLRFGDLFGETEGFVCAIMDEVILTNNYRKYIVKDGTVDICRACHCPGESIRHIISGCSRLANGEYLHRHNLVARIIHQQLALKYNLVDAEVPYYKYVPDPVLENGHITLYWDRSIITDRTIVANKPDIVVIDRSERLAMIVDITVPHDENLVKAEKDKEIKYQDLAHEVVDMWEVDSAVIVPIVVTANGLIAKSLDQHLTRLALGSWIKGLIQKAVLLDTARIVRRFLSLRP

SEQ ID NO: 12985 - protein, 1111 aa, Amphipyra berbera
MRWTPTMNKNCMRAYFGATEGGTNLTAYRGRMLSLFQVLEPTVNVSAQRLSDQVRVIQRDHRLTDAALDRLRSEVQSNAIISLQSQTAAQPRTPTVVPPLPTHGNEESDDRVTNVSTQCNEQLRSALELAIQEYRFTPPNIRPRIPRLPMHRKNRALMCALDSLLSSYFDNSENLEDTHSILYCAAVAACRVAHAKFDNSDKATRPKRAVPAWQCRIERRINEARALIGKLICFREGNTRPRVMRFVRRAFSGTDINPRDYMSRVTERIDFLKQKVYAWANRIRRYKRRVERYTQNRMFHSDERWVYRTWERPDHDVNDTHPPDNDVMNTFWRNIWSMPVTHTEGDWMQEVQRACEPIEEMGDITIVPQDVTSAVRPMANWKSPGPDGLHNFWIKWLRSSHARLASQFQSSLESGSLPEFLTTGVTHLLHKSGSTAEPKNYRPITCLPTVYKLLTSILRAKINSHIINNSIMSVSQNGCKNGSRGTKELLLIDMAISQQVRRSRKDLSTCWIDYKKAYDSVPHTWLMRVLELYKVNTTLCAFLTSCMGQWRTVLHYPGCQQIQGRGEPIRIERGIFQGDSLSPLWFCLALNPLSTLLEGSGLGYRLRRGGQVISHLLYMDDLKLFAPNNLQLMKLLKVTETFSNSIRMEFGVDKCAVMHVKRGGIMESVGTQLSDSIHLRSLSSTETYKYLGMSETLGINETDMKQSLRERFYGRLKKVLKSLLSGGNKVRAFNGWVMPVLMYSFGILKWTQTELDALDRRVRTLLTAYRMHHPRSSVMRLYIPRKCGGRGFLNAKTLHNREVCSLREYFLQADVGMHRDVVAVDKGFTPLSLAKENWRKPVVLDTNGRREVWQSKELHGRFYRALHGPDVDFLASVAWLRFGDLFGETEGFVCAIMDEVILTNNYRKYIVKDGTVDICRACHCPGESIRHIISGCSRLANGEYLHRHNLVARIIHQQLALKYNLVDAEVPYYKYVPDPVLENGHITLYWDRSIITDRTIVANKPDIVVIDRSERLAMIVDITVPHDENLVKAEKDKEIKYQDLAHEVVDMWEVDSAVIVPIVVTANGLIAKSLDQHLTRLALGSWIKGLMQKAVLLDTARIVRKFLSLRP

SEQ ID NO: 12986 - protein, 1100 aa, Amphipyra berbera
MRWTLTMNENCMRAYFGATEGGTNLTAYRGRMLSLFQVLEPTVNVSAQRLSDQVRVIQRDHRLTDAALDRLRSEVQSNRIISLQSQTAAQPQTPTVVPPPPIHADEESNDRVTNVSTQCNEQLRSALELAIREYRFTPPNIRPRIPRLPMHRKNRALMCALDSLLSSYFDNSENLEDTHSILYCAAVAACRVAHAKFDNNDRATRPKPAVPAWQCRIERRINEARALIGKLICFREGNTRPRVMRFVRRAFSGTDINPRDYLSRVTERIDFLKQKVYAWANRIRRYKRRVERYTQNRMFHSDERWVYRTWERPDHDVSDTHLPDNDVMNTFWRNIWSMPVTHTEGDWMQEVQRACEPIEEMGDITIVPQDVTSAVRPMANWKSPGPDGLHNFWLKWLRSSHARLALQFQSSLESGSLPEFLTTGVTHLLHKSGSTAEPKNYRPITCLPTVYKLLTSILRAKINSHIINNYIMSVSQNGCRNGSRGTKELLLIDMAISQQVRRSRKDLSTCWIDYKKAYDSVPHTWLMRVLELYKVNTTLCAFLTSCMGQWRTVLHYPGCRQIQGRGEPIRIERGIFQGDSLSPLWFCLALNPLSTLLEGSGLGYRLRRGGQVISHLLYMDDLKLFAPNNLQLMKLLKVTETFSNSIRMEFGVDKCAVMHVKRGGIMESVGTQLSDSIHLRSLSSTETYKYLGMSEALVINETDMKQSLRERFYGRLKKVLKSLLSGGNKVRAFNGWVMPVLMYSFGILKWTQTELDALDRRVRTLLTAYRMHHPRSSVMRLYIPRKCGGRGFLNAKTLHNREVCSLREYFLQADVGMHRDVVAVDKGFTPLSLAKENWRKPVVLDTNGRREVWQSKELHGRFYRALHGPDVDFLASVAWLRFGDLFGETEGFVCAIMDEVMMTNNYRKYIGKDGTVDICRACHCPGESIRHIISGCSRLANGEYLHRHNLVARIIHQQLALKYNLVDAEVPYYRYVPDPVLENGHITLYWDRSIITDRTDRTERLTMIVDITVPHDENLVKAEKDKEIKYQDLAHEVVDMWEVDSAVIVPIVVTANGLIAKSLDHHLTRLSLGSWVKGLIQKAVLLDTARIVRKFLSLRP

SEQ ID NO: 12987 - protein, 962 aa, Amphipyra berbera
MNKKNRALMCALDSLLSSYFDNSESLEDTHSILYCAAVAACRVAHAKFDNNDRATRPKPAVPAWQCRIERRINEARALIGKLICFREGNTRPRVMRFMRRAFSGTDINPRDYLSRVTERIDFLKQKVYAWANRIRRYKRRVERYTQNRMFHSDERWVYRTWERPDYNVSDTHLPDNDVMNTFWRNIWSMPVTHTEGDWMQEVQRACEPIEEMGDITIVPQDVTSAVRPMANWKSPGPDGLHNFWLKWLRSSHARLASQFQSSLESGSLPEFLTTGVTHLLHKSGSTAEPKNYRSITCLPTVYKLLTSILRAKINSHIINNSIMSVSQNGCKNGSRGTKELLLIDMAISQQVRRSRKDLSTCWIDYKKAYDSVPHTWLMRVLELYKVNTTLCAFLTSCMGQWRTVLHYPGCRQIQGRGEPIRIERGIFQGDSLSPLWFCLALNPLSTLLEGSGLGYRLRRGGQVISHLLYMDDLKLFAPNNLQLMNLLKVTETFSNSIRMEFGVDKCAVMHVKRGGIMESVGTQLSDSIHLRSLSSTETYKYLGMSEALGINETDMKQSLRERFYGRLKKVLKSLLSGGNKVRAFNGWVMPVLMYSFGILKWTQTELDALDRRVRTLLTAYRMHHPRSSVMRLYIPRKCGGRGFLNAKTLHNREVCSLREYFLQADVGMHRDVVAVDKGFTPLSLAKENWRKPVVLDTNGRREVWQSKELHGRFYRALHGPDVDFLASVAWLRFGDLFGETEGFVCAIMDEVMMTNNYRKYIVKDGTVDICRACHCPGESIRHIISGCSRLANGEYLHRHNLVARIIHQQLALKYNLVDAEVPYYKYVPDPVLENGHITLYWDRSIITDRTIVANKPDIVVIDRRERLTMIVDITVPHDENLVKAEKDKEIKYQDLAHEVVDMWEVDSAVIVPIVVTANGLIAKSLDHHLTRLSLGSWVKGLIQKAVLLDTARIVRKFLSLRP

SEQ ID NO: 12988 - protein, 1108 aa, Amphipyra berbera
MKWTQSINENVMRAYYGSTEGGTNLTAYRVGMLTLFQELEPAINVSAQRLSDQVRVIQRNHRLDDAALERLRLEVQNRRAIPVPSQIAVHQLINVAPPRSDRVDGDEDDGAVTVSSQYNDRLRSALEDAIRECRANPESRPRLPRLPMHNKNRALVCALDSLLTSYFESSEDLGDTHSILYCAAVAVCRVANVKFNNSERATRPKPAVPAWQWIERRIDETRALIGKLICFREGNTRPRVMRFVRRAFSGTGISPREYTSRATERIDFLKQKVCAWASRIRRYKRRVVRYTQNRMFQCDQRWVYRAWERPDQSVSGGRLPDDDAMSSFWRSIWSVPVIHTEGDWMRDIERTCESIEEMGEIVISSQDVADAVRPLPNWKSPGPDGLHNFWIKWLRSSHARLASQFQSSLESGSLPQFLTTGVTHLLHKSGSTAEPKNYRPITCLPTVYKLLTSILRSKINTHIGNNSVLSSSQNGCRNESRGTKELLLIDTAISQQVRRSQKSLSTCWIDYKKAYDSVPHTWLMRVLELYKINTTLRTFLRSCMGQWRTVLRYPGCQPIRGSGEPIRIERGIFQGDSLSPLWFCLALNPLSTLLEGSGLGYPLRRGGQVVSHLLYMDDLKLFAPTKLQLVDLLKVTETFSNSIRMEFGVDKCAVMHVRRGRIMESEGLQLSDSIHLRPLSANDTYKYLGMSEGLGISEADMKQSLRERFFGRLKKVLKSLLSGGNKVRAFNGWVMPVLMYSFGILKWTQTELDALDRRVRTLLTANRMHHPRSSVMRLNIPRKRGGRGLLNAKTLHNREVCSLREFFLHADAGMHRDVVAVDKGLTPLSLARENWRKPVVLSTNDRREIWQSKELHGRFYWALHGPDVDFLASVSWLRFGDLFGETAGFVCAIMDEVIMTNNYQKYIVKDGTVDICRACHCPGESLRHIISGCSRLANGEYLHRHNQVARIIHQQLALKYNLVESEVPYYRYVPDPVLENGRITLYWDRSIITDRTIVANKPDIVVIDRSERRTMIVDVTIPHDRNLVKAEKDKQIKYLDLAHEVVNMWDVESATIVPIVVSANGLMAKNLDKHLMRLSLGGWIKGLIQKAVLLDTARIVRRFLSLEP

SEQ ID NO: 12989 - protein, 1208 aa, Amphipyra berbera
MLTRSRTKTQDTRTRPRPSASSLSSASQPPDSSIVSDVTPAAAVASSSSDEFYSPPTSPPPPPRRGRRGRGRPPACMGPRGPPASDRVPAPGGSVQRMRWTLTMNENCMRAYFGATEGGTNLTAYRGRMLSLFQVLEPTVNVSAQRLSDQVRVIQRDHRLTDAALDRLRSEVQSNRIISLQSQTAAQPQTPTVVPPLPIHADEESDDRVTNVSTQCNEQLRSALELAIREYRFTPPNIRPRIPRLPMHRKNRALMCALDSLLSSYFDNSENLEDTHSILYCAAVAACRVAHAKFDNNDRATRPKPAVPAWQCRIERRINEARALIGKLICFREGNTRPRVMRFVRRAFSGTDINPRDYLSRVTERIDFLKQKVYAWANRIRRYKRRVERYTQNRMFHSDERWVYRTWERPDHDVSDTHLPDNDVMNTFWRNIWSMPVTHAEGDWMQEVQRACEPIEEMGDITIVPQDVTSAVRPMANWKSPGPDGLHNFWLKWLRSSHARLASQFQSSLESGSLPEFLTTGVTHLLHKSGSTVEPKNYRPITCLPTVYKLLTSILRAKINSHIINNSIMSVSQNGCKNGSRGTKELLLIDMAISQQVRRSRMDLSTCWIDYKKAYDSVPHTWLMRVLELYKVNTTLCAFLTSCMGQWRTVLHYPGCRQIQGRGEPIRIERGIFQGDSLSPLWFCLALNPLSTLLEGSGLGYRLRRGGQVISHLLYMDDLKLFAPNNLQLMKLLKVTETFSNSIRMEFGVDKCAVMHVKRGGIMESVGTQLSDSIHLRPLSSTETYKYLGMSEALGINETDMKQSLRERFYGRLKKVLKSLLSGGNKVRAFNGWVMPVLMYSFGILKWTQTELDALDRRVRTLLTAYRMHHPRSSVMRLYIPRKCGGRGFLNAKTLHNREVCSLREYFLQADVGMHRDVVAVDKGFTPLSLAKENWRKPVVLDTNGRREVWQSKELHGRFYRALYGTDVDFLASVAWLRFGDLFGETEGFVCAIMDEVMMTNNYRKYIVKDGTVDICRACHCPGESIRHIISGCSRLANGEYLHRHNLVARIIHQQLALKYNLVDAEVPYYKYVPDPVLENGHITLYWDRSIITDRTTVANKPDIVVIDRSERLTMIVDITVPHDENLVKAEKDKEIKYQDLAHEVVDMWEVDSAVIVPIVVTANGLIAKSLDQHLTRLALGSWVKGLIQKAVLLDTARIVRKFLSLRP

SEQ ID NO: 12990 - protein, 1197 aa, Noctua janthe
MLTRSAARRARLSPPDPSLSSASPPPESRPVVSAVTPAVAVASSSSDEYFSPPTTPPPVRRRGGRRPPDGLGPRGPPASDRVPAPGGSVPRMRWTQSINANVMRAYYGATEGGNNLTAYRVRMLSLFQVLEPAVNVSAQRLSDQVRVIQRNGMLDDTVLDRLRTEMQSSHVIATPPQTVVPPQSTIIPTHDKNVSNDMVTNVSTQCNEEMRCALEGAIREYRFMQPDLRPRVPRLPMHNKNRVLVAVLDSQLSNYFDNCEDLTDAHSVLYCAAVAACRVAHVKFSDDRATRPKPAVPSWQYRIERRIGEARALIGKLICFREGNTRPRVMRFVRRAFSGTDISARDYMSRVTERIDFLKQKVYAWANRIRRYKRRVDRYTQNRTFQRDERWVYRAWERPDQGVADTRLPDDDAMCSFWRSIWSVPVSHTEGEWTREVERACDLVPEMGAITISPQDVVRAVRPLPNWKSPGPDGLHNFWIKWFTRSHARLAILFQSALESGSLPEFLTTGITHLLHKSGSTAEPKNYRPITCLPTVYKVLTSILRAKINKHIDDNSVMSASQNGFRNGSRGTKELLLIDMAISQQVRRSRRDLSTCWIDYKKAYDSVPHTWLMRVLELYKVDSTLRIFLMSCMGQWRTVLRYPGCRQIQRNSEPIRIERGIFQGDSLSPLWFCLALNPLSTLLEDSGLGYRLRRGGQVISHLLYMDDLKLFAPNDLQLMELLKVTETFSSAIRMEFGVDKCAVMHVKRGEIVESVGTQLSDSINLRSLSATETYKYLGMSEALGINVADMKQSLKERFFGRLKKVFNSLLSGGNKVRAFNGWVMPVLMYSFGILKWTQTELDALDRRVRTLLTAYRMHHPRSSVMRLYIPRRCGGRGFLNAKTLHNREICSLREYFLETDVGMHRDVVAVDKGLTPVSLAKENWRKPVVLDTNDRMEVWQSKELHGRFFRALHGPDVDLPASVAWLRSGDLFGETEGFVCAIMDEVMMTNNYRRFIVKDGTVDICRACHRPGESIRHIISGCSRLANGEYLHRHNLVARIIHQQLALKYNLVQSEVPYYKYVPDPVLENGSITLYWDRSIVTDRTIVANKPDIVVVDRSERRAMIVDITVPHDGNLVKAEKDKQIKYLDLAHEVVDMWDVDSAIIVPIVVSAHGLIAKSLDQYLRRLSLGSWIKGLIQKAVLLDTARIVRRFLSLEP

SEQ ID NO: 12991 - protein, 1197 aa, Noctua janthe
MLTRSAARRARLSPPDPSLSSASPPPESRPVVSAVTPAVAVASSSSDEYFSPPTTPPPVRRRGGRRPPDGLGPRGPPASDRVPAPGGSVPRMRWTQSINANVMRAYYGATEGGNNLTAYRVRMLSLFQVLEPAVNVSAQRLSDQVRVIQRNGMLDDTVLDRLRTEMQSSHVIATPPQTVVPPQSTIIPTHDNNVSNDMVTNVSTQCNEEMRCALEGAIREYRFMQPDLRPRVPRLPMHNKNRVLVAVLDSQLSNYFDNCEDLTDAHSVLYCAAVAACRVAHVKFSDDRATRPKPAVPSWQYRIERRIGEARALIGKLICFREGNTRPRVMRFVRRAFSGTDISARDYMSRVTERIDFLKQKVYAWANRIRRYKRRVDRYTQNRTFQRDERWVYRAWERPDQGVADTRLPDDDAMCSFWRSIWSVPVSHTEGEWTREVERACDLVPEMGAITISPQDVVRAVRPLPNWKSPGPDGLHNFWIKWFTRSHARLAILFQSALESGSLPEFLTTGITHLLHKSGSTAEPKNYRPITCLPTVYKVLTSILRAKINKHIDDNSVMSASQNGCRNGSRGTKELLLIDMAISQQVRRSRRDMSTCWIDYKKAYDSVPHTWLMRVLELYKVDSTLRIFLMSCMGQWRTVLRYPGCRQIQRNSEPIRIERGIFQGDSLSPLWFCLALNPLSTLLEDSGLGYRLRRGGQVISHLLYMDDLKLFAPNDFQLMELLKVTETFSSAIRMEFGVDKCAVMHVKRGEIVESVGTQLSDSINLRSLSATETYKYLGMSEALGINVADMKQSLKERFFGRLKKVFNSLLSGGNKVRAFNGWVMPVLMYSFGILKWTQTELDTLDRRVRTLLTAYRMHHPRSSVMRLYIPRRCGGRGFLNAKTLHNREICSLREYFLETDVGMHRDVVAVDKGLTPLSLAKENWRKPVVLDTNDRMEVWQSKELHGRFFRALHGPDVDLPASVAWLRSGDLFGETEGFVCAIMDEVMMTNNYRRFIVKDGTVDICRACHRPGESIRHIISGCSRLANGEYLHRHNLVARIIHQQLALKYNLVESEVPYYKYVPDPVLENGSITLYWDRSIITDRTIVANKPDIVVVDRSERRAMIVDITVPHDENLVKAEKDKQIKYLDLAHEVVDMWDVDSAIIVPIVVSAHGLIAKSLDQYLRRLSLGSWIKGLIQKAVLLDTARIVRRFLSLEP

SEQ ID NO: 12992 - protein, 1197 aa, Noctua janthe
MLTRSATRRARLSPPDPSLSSALPPPESSPIVSAVTPAVAVASSSSDEYFSPPTTPPPVRRRGGRRPPDGLGPRGPPASDRVPAPGGSVPRMRWTQSINANVMRAYYGATEGGNNLTAYRVRMLSLFQVLEPAVNVSAQRLSDQVRVIQRNGMLDDTVLDRLRTEMQSSHVIATPPQTVVPPQSTIIPTHDNNVSNDMVINVSTQCNEEMRCALEGAIREYRFMQPDLRPRVPRLPMHNKNKVLVAVLDSQLSNYFDNCENLTDAHSVLYCAAVAACRVAHVKFSDDRATRPKPAVPSWQYRIERRIGEARALIGKLICFREGNTRPRVMRFVRRAFSGTDISARDYMSRVTERIDFLKQKVYAWANRIRRYKRRMDRYTQNRTFQRDERWVYRAWERPDQGVADTHLPDDDAMCSFWRSIWSVPVSHTEGEWTREVERACDLVPEMGAITISPQDVVRAVRPLPNWKSPGPDGLHNFWIKWFTRSHARLAILFQSALESGSLPEFLTTGITHLLHKSGSTAEPKNYRPIACLPTVYKVLTSILRAKINKHIDDNSVMSASQNGCRNGSRGTKELLLIDMAISQQVRRSRRDLSTCWIDYKKAYDSVPHTWLMRVLELYKVDSTLRIFLMSCMGQWRTVLRYPGCRQIQRNSEPIRIERGIFQGDSLSPLWFCLALNPLSTLLEDSGLGYRLRRGGQVISHLLYMDDLKLFAPNDLQLMELLKVTETFSSAIRMEFGVDKCAVMHVKRGEIVESVGTQLSDSINLRSLSATETYKYLGMSEALGINVADMKQSLKERFFGRLKKVFNSLLSGGNKVRAFNGWVMPVLMYSFGILKWTQTELDALDRRVRTLLTTYRMHHPRSSVMRLYIPRRCGGRGFLNAKTLHNREICSLREYFLETDVGMHRDVVAVDKGLTPLSLAKENWRKPVVLDTNDRMEVWQSKELHGRFFRALHGPDVDLPASVAWLRSGDLFGETEGFVCAIMDEVMMTNNYRRFIVKDGTVDICRACHRPGESIRHIISGCSRLANGEYLHRHNLVARIIHQQLALKYNLVESEVPYYKYVPDPVLENGNITLYWDRSIVTDRTIVANKPDIVVVDRSERRAMIVDITVPHDGNLVKAEKDKQIKYLDLAHEVVDMWDVDSAIIVPIVVSAHGLIAKSLDQYLRRLSLGSWIKGLIQKAVLLDTARIVRRFLSLEP

SEQ ID NO: 12993 - protein, 1197 aa, Noctua janthe
MLTRSATRRARLSPPDPSLSSASPPPESSPIVSAVTPAVAVASSSSDEYFSPPSTPPPVRRRGGRRPPDGLGPRGPPASDRVPAPGGSVPRMRWTQSINANVMRAYYGATEGGNNLTAYRVRMLSLFQVLEPAVNVSAQRLSDQVRVIQRNGMLDDTVLDRLRTEMQSSHVIATPPQTVVPPQSTIIPTHDNNVSNDMVTNVSTQCNEEMRCALEGAIREYRFMQPDLRPRVPRLPMHNKNKVLVAVLDSQLSNYFDNCENLTDAHSVLYCAAVAACRVAHVKFSDDRATRPNPAVPSWQYRIERRIGEARALIGKLICFREGNTRPRVMRFVRRAFSGTDISARDYMSRVTERIDFLKQKVYAWANRIRRYKRRVDRYTQNRTFQRDERWVYRAWERPDQGVADTHLPDDDAMCSFWRSIWSVPVSHTEGEWTREVERACDLVPEMGAITISPQDVVRAVRPLPNWKSPGPDGLHNFWIKWFTRSHARLAILFQSALESGSLPEFLTTGITHLLHKSGSTAEPKNYRPIACLPTVYKVLTSILRAKINKHIDDNSVMSASQNGCRNGSRGTKELLLIDMAISQQVRRSRRDLSTCWIDYKKAYDSVPHTWLMRVLELYKVDSTLRIFLMSCMGQWRTVLRYPGCRQIQRNSEPIRIERGIFQGDSLSPLWFCLALNPLSTLLEDSGLGYRLRRGGQVISHLLYMDDLKLFAPNDLQLMELLKVTETFSSAIRMEFGVDKCAVMHVKRGEIVESVGTQLSDSINLRSLSATETYKYLGMSEALGINVADMKQSLKERFFGRLKKVFNSLLSGGNKVRAFNGWVMPVLMYSFGILKWTQTELDALDRRVRTLLTTYRMHHPRSSVMRLYIPRRCGGRGFLNAKTLHNREIYSLREYFLETDVGMHRDVVAVDKGLTPLSLAKENWRKPVVLDTNDRMEVWQSKELHGRFFRALHGPDVDLPASVAWLRSGDLFGETEGFVCAIMDEVMMTNNYRRFIVKDGTVDICRACHRPGESIRHIISGCSRLANGEYLHRHNLVARIIHQQLALKYNLVESEVPYYKYVPDPVLENGNITLYWDRSIVTDRTIVANKPDIVVVDRSERRAMIVDITVPHDGNLVKAEKDKQIKYLDLAHEVVDMWDVDSAIIVPIVVSAHGLIAKSLDQYLRRLSLGSWIKGLIQKAVLLDTARIVRRFLSLEP

SEQ ID NO: 12994 - protein, 1106 aa, Noctua janthe
MRWTQSINANVMRAYYGATEGGNNLTAYRVRMLSLFQVLEPAVNVSAQRLSDQVRVIQRNGMLDDTVLDRLRTEMQSSHVIATPPQTVVPPQSTIIPTHDNNVSNDMVTNVSTQCNEEMRCALEGAIREYRFMQPDLRPRVPRLPMHNKNKVLVAVLDSQLSNYFDNCENLTDAHSVLYCAAVAACRVAHVKFSDDRATRPKPAVPSWQYRIERRIGEARALIGKLICFREGNTRPRVMRFVRRAFSGTDISARDYMSRVTERIDFLKQKVYAWANRIRRYKRRVDRYTQNRTFQRDERWVYRAWERPDQGVADTHLPDDDAMCSFWRSIWSVPVSHTEGEWTREVERACDLVPEMGAITISPQDVVRAVRPLPNWKSPGPDGLHNFWIKWFTRSHARLAILFQSALESGSLPEFLTTGITHLLHKSGSTAEPKNYRPIACLPTVYKVLTSILRAKINKHIDDNSVMSASQNGCRNGSRGTKELLLIDMAISQQVRRSRMDLSTCWIDYKKAYDSVPHTWLMRVLELYKVDSTLRIFLMSCMGQWRTVLRYPGCRQIQRNSEPIRIERGIFQGDSLSPLWFCLALNPLSTLLEDSGLGYRLRRGGQVISHLLYMDDLKLFAPNDLQLMELLKVTETFSSAIRMEFGVDKCAVMHVKRGEIVESVGTQLSDSINLRSLSATETYKYLGMSEALGINVADMKQSLKERFFGRLKKVFNSLLSGGNKVRAFNGWVMPVLMYSFGILKWTQTELDALDRRVRTLLTTYRMHHPRSSVMRLYIPRRCGGRGFLNAKTLHNREICSLREYFLETDVGMHRDVVAVDKGLTPLSLAKENWRKPVVLDTNDRMEVWQSKELHGRFFRALHGPDVDLPASVAWLRSGDLFGETEGFVCAIMDEVMMTNNYRRFIVKDGTVDICRACHRPGESIRHIISGCSRLANGEYLHRHNLVARIIHQQLALKYNLVESEVPYYKYVPDPVLENGNITLYWDRSIVTDRTIVANKPDIVVVDRSERRAMIVDITVPHDGNLVKAEKDKQIKYLDLAHEVVDMWDVDSAIIVPIVVSAHGLIAKSLDQYLRRLSLGSWIKGLIQKAVLLDTARIVRRFLSLEP

SEQ ID NO: 12995 - protein, 1189 aa, Mythimna ferrago
MLTRAAARRARLPAPASSLSSASPPPEPSPTVSAVTPAVAAASSSSDEYYSPPTTPPPTRRRGGRRPPACLGSRGPPASERVPATGGCVSRMRWTQSINENVMRAYFGATEGGNNLTATVLEPAVNVSAQRLSDQVRVIQRNHMLDDTVLDRLRTEMGSHAVTSSSQTVVPPQVSNHLSINADEEITDMVTYVSTQCNNELRSALECAIREYRNIPPELRPRISRLPMCNKNRALVAALDSQLSNYFDDCEDLTDTHSIMYCAAVAACRVAHIKFPNTDVATRPKPAVPAWQCRIERRIGEARALIGKLICFREGNTRPRVMRFVRRAFSGTDISPRDYMSRVTERIDFLKQKVYAWANRIRRYKRRVERYIQNSTFRSNERWVYRTWERPDQGVTDTHLPDDDAMCSFWRNIWSVPVSHTEGGWTREVERACESITEMGAITISPQDVARAVRPLPNWKSPGPDGLHNFWIKWLQRSHARLASQYQTALESGSLPEFLTTGVTHLLHKSGSTAEPKNYRPITCLPTVYKVLTSILRAKINNHVDNNAIMSASQNGCRNGSRGTKELLLIDMAISQQVRRSRKDLSTCWIDYKKAYDSVPHTWLMRVLELYKVDATLCIFLMSCMRQWRTVLRYPGCRNIQRNSEPVRIERGIFQGDSLSPLWFCLALNPLSTLLENSGLGYRLKRGGQVISHLLYMDDLKLFAPNNLQLMELLKVTETFSSAIRMEFGVDKCAVMHIKRGEIVESVGTQLSDSIHLRSLSPTETYKYLGMSEALGINATDMKQSLKERFFGRLKKVLNSLLSGGNKVRAFNGWVMPVLMYAFGVLKWTQTELDALDRKVLTLLTAYRMHHPRPSVMRLYIPRKCGGRGFLNAKTLHNREVCSLREYFLAADVGMHRDVVTVDKGLTPLSLANENWRKPVVLDTNVRKEVWQSKELHGRFFRALHGPNVDQLASVAWLRVGDLFGETEGFVCAIMDEVIMTNNYRRFIVKDGTVDICRACHRPGESIRHIISGCSRLANGEYLHRHNLVARIIHQQLALKYSLVESEVPYYRYVPDPVLDSGDITLYWDRSIIADRTIVANKPDIVVVDRSERRAMIVDISVPHDENLVKAEKDKQIKYIDLAREVVDMWEVDSAIIVPIVVSANGLIAKSLDQHLRRLSLGDWIKGLIQKAVLLDTARIVRRFLSLEP

SEQ ID NO: 12996 - protein, 1001 aa, Mythimna ferrago
MVTNVSTQCNNELRSALECAIREYRNIPPELRPRIPRLPMCNKNRALVAALDSQLSNYFDDCEDLTETHSIMYCAAVAACRVAHVKFPDSDEATRPKSAVPAWQCRIERRIGGARALIGKLICFREGNTRPRVMRFVRRAFSGTNISPRDYMSRVTERIDFLKQKVYAWANRIRRYKRRVERYTQNRTFRSNERWVYRAWERPDQGVTGARLPEDDAMCSFWRSIWSVPVSHTEGDWTREVERTCDPIPQMGAIDISPQDVARAVRPLPNWKSPGPDGLHNFWIKWFTRSHARLAYQFQSALESGSLPQFLTTGITHLLHKSGSTAEPKNYRPITCLPTVYKVLTSILRSKINSHIDENSIMSPSQNGCRNGSRGTKELLLIDMTISQQVRRSRKDLSTCWIDYKKAYDSVPHTWLMRVLELYKVDATLCTFLMSCMRQWRTVLRYPGCRNIQRNSEPVRIERGIFQGDSLSPLWFCLALNPLSTLLENSGLGYRLKRGGQVISHLLYMDDLKLFAPNNLQLMELLKVTETFSSAIRMEFGVDKCAVMHIKRGEIVESVGTQLSDSIHLRSLSPTETYKYLGMSEALGINATDMKQSLRERFFGRLKKVLNSLLSGGNKVRAFNGWVMPVLMYAFGVLKWTQTELDALDRKVRTLLTAYRMHHPRSSVMRLYIPRKCGGRGFLNAKTLHNREVCSLREYFLAADVGMHRDVVAVDKGLTPLSLANENWRKPVVLDTNVRKEVWQSKELHGRFFRALHGPDVDQLASVAWLRVGDLFGETEGFVCAIMDEVIMTNNYRRFIVKDGTVDICRACHRPGESIRHIISGCSRVANGEYLHRHNLVARIIHQQLALKYSLVESEVPYYRYVPDPVLDSGDITLYWDRSIITDRTIVANKPDIVVVDRSERREMIVDISVPHDENLVKAEKDKQIKYIDLAREVVDMWEVDSAIIVPIVVSANGLIAKSLDQHLRRLSLGDWIKGLIQKAVLLDTARIVRRFLSLEP

SEQ ID NO: 12997 - protein, 1197 aa, Mythimna ferrago
MLTRAAARRARPPPPASSLSSASPPPDPSPTVSAVTPAVAAASSSSDEYYSPPTTPPPARRRGGRRPPACFGPRGPPASDRVPATGGSVPRMRWTQSTNENVMRAYYGATEGGNNLTAYRVRMLSLFQVLEPAVNVSAQRLSDQVRVIQRNHMLDDTVLDRLRTEMSNHANAPSSQPVAPVMVPPSNHVANPADEESTDMVIQVSTQCTNELRSALECAIREYRNMPSVLRPRLPRLPMHNKNKALVAALDMQLSNYFDNCKDLTDTHSIMYCAAVAACRVAHVKFPNSDVATRPKPAVPAWQCRIERRIGGARALIGKLICFREGNTRPRVMRFVRRAFSGTDISPRDYMPRVTERIDFLKQKVYAWANRIRRYKRRVERYTQNRAFQSNERWVYRAWERPDQGVTDTRLPDDDAMCSFWRNIWSVPVSHTEGSWTGEVERACESITEMGAITISPQDVARAVRPLPNWKSPGPDGLHNFWIKWLQRSHARLASQYQAALESSSLPEFLTTGVTHLLYKSGSTAEPKNYRPITCLPTVLTSILRDKINNHIDNNSIMSASQNGCRKGSRGTKELLLIDMAISQQVRRSRKDLSTCWIDYKKAYDSVPHTWLMRVLELYKVDATLRTFLMSCMRQWRTVLRYPGCRNIQRNSEPVRIERGIFQGDSLSPLWFCLALNPLSTLLENSGLGYRLKRGGQVISHLLYMDDLKLFAPNNLQLMELLKVTETFSSAIRMEFGVDKCAVMHIKRGEIVESVGTQLSDSIHLRSLSPTETYKYLGMSEALGINATVMKQSLKERFFGRLKKVLNSLLSGGNKVRAFNGWVMPVLMYAFGVLKWTQTELDALDRRVRTLLTAYRMHHPRSSVMRLYIPRKCGGRGFLNAKTLHNREVCSLREYFLAADVGMHRDVVAVDKGLTPLSLANENWRKPVVLDTNVRKEVWQSKELHGRFFRALHGPDVDKLASVAWLRVGDLFGETEGFVCAIMDEVIMTNNYRRFIVKDGTVDICRACHRPGESIRHIISGCSRLANGEYLHRHNLVARIIHQQLALKYSLVESEMPYYRYVPDPVLDNGDITLYWDRSIITDRTIVANKPDIVVVDRSERRAMIVDISVPHDENLVKAEKDKQIKYIDLAREVVDMWEVDSAIIVPIVVSANGLIAKSLDQHLRRLSLGDWIKGLIQKAVLLDTARIVRRFLSLEP

SEQ ID NO: 12998 - protein, 1200 aa, Mythimna ferrago
MLTRAAARRARPPPPASSLSSASLPPEPSLTVSAVTPAAAAASSSSDEYYSPPTTPPPARRRGGRRPPACLGPRGPSVSDGVPAAGGSVPCMRWTQSTNENVMRAYYGATEGGNNLTAYRVRMLSLFQVLEPAVNVSAQRLSDQVRVIQRNHMLDDTVLDRLRTEMSNRVITPPSQPVVPVVVPQSSHISLHTDEVSTDTVTNVSTQCNNELRSALECAIREYRNMPLELRPRLPRLPMHNKNKALVAALDSQLSNYFDDCEDLTDTHSIMYCAAVAACRVAHVKFPNSDVATRPKPAVPAWQCRIERRIGGARALIGKLICFREGNTRPRVMRFVRRAFSGTDISPRDYMSRVTERIDFLKQKVYAWANRIRRYKRRVERYIRNNTFRSNERWVYRAWERPDQGVTDTRLPDDDAMCSFWRNIWSVPVSHTEGGWTREVERACESITEMGAITISPQDVARAVRPLPNWKSPGPDGLHNFWIKWLQRSHARLASQYQTALESSSLPEFLTTGVTHLLHKSGSTAEPKNYRPITCLPTVYKVLTSILRAKINQHVDNNAIMSASQNGCRNGSRGTKELLLIDMAISQQVRRSRKDLSTCWIDYKKAYDSVPHTWLMRVLELYKVDATLRTFLMSCMRQWRTVLRYPGCRNIQRNSEPVRIERGIFQGDSLSPLWFCLALNPLSTLLENSGLGYRLKRGGQVISHLLYMDDLKLFAPNNLQLMELLKVTETFSSAIRMEFGVDKCAVMHIKRGEIVESVGIQLSDSIHLRSLSPTETYKYLGMSEALGINATDMKQSLRERFFGRLKKVLNSLLSGGNKVRAFNGWVMPVLMYAFGVLKWTQTELDALDRRVRTLLTAYRMHHPRSSVMRLYIPRKCGGRGFLNAKTLHNREVCSLREYFLAADGGMHRDVVAVDKGLTPLSLANENWRKPVVLDTNVRKEVWQSKELHGRFFRALHGPDVDQLASVAWLRVGDLFGETEGFVCAIMDEVIMTNNYRRFIVKDGTVDICRACHRPGESIRHIISGCSRLAIGEYLHRHNLVARIIHQQLALKYSLVESEVPYYRYVPDPVLDNGDITLYWDRSIITDRTIVANKPDIVVVDRSERRAMIVDISVPHDENLAKAEKDKQIKYIDLAREVVDMWEVDSAIIVPIVVSANGLIAKSLDQHLRRLSLGDWIKGLIQKAVLLDTARIVRRFLSLEP

SEQ ID NO: 12999 - protein, 1200 aa, Mythimna ferrago
MLTRAAARRARPPPPASSLSSASPPPDPSPTVSAVTPAVAAASSSSDEYYSPPTTPPPARRRGGRRPPACFGPQGPPASDRVPATGGSVPRMRWTQSTNENVMRAYYGATEGGNNLTAYRVRMLSLFQVLEPAVNVSAQRLSDQVRVIQRNHMLDDTVLDRLRMEMSNHVIAPSSQPVVPVMVPPSNHVANPADVESTDMVIQVSTQCTNELRSALECAIREYRNMPSVLRPRLPRLPMHNKNKALVAALDMQLSNYFDNCKDLTDAHSIMYCAAVAACRVAHVKFPNSDVATRPKPAVPAWQCRIERRIGGARALIGKLICFREGNTRPRVMRFVRRAFLGTDICSRDYMLRVTERIDFLKQKVYAWANRIRRYKRRVERYTQNRAFQSNERWVYRAWERPDQGVTDTRLPDDDAMCSFWRNIWSVPVSHTEGGWTREVEQACEPITEMGAITISPQDVARAVRPLPNWKSPGPDGLHNFWIKWLQRSHACLASQYQAALESSSLPEFLTAGVTHLLHKSGSTAEPKNYRPITCLPTVYKVLTSILRDKINNHIDNNSIMSASQNGCRKGSRGTKKLLLIDMAISQQVRRSRKDLSTCWIDYKKAYDSVPHTWLMRVLELYKIDATLRTFLMSCMRQWRTVLRYPGCRNIQRSSEPVRIERGIFQGDSLSPLWFCLALNPLSTLLENSGLGYQLKRGGQVTSHLLYMDDLKLFAPNKLQLMELLKVTETFSSAIRMEFGVDKCAVMHVKRGEIVESVSTQLSDSISLRSLSATETYKYLGMSEALGINATDMKQSLRERFFGRLKKVFNSLLSGGNKVRAFNGWVMPVLMYSFGVLKWTQTELDALDRRVRSLLTANRMHHPRSSVMRLYIPRKCGGRGFLNAKTLHNREVCSLREYFLAADVGMHRDVVAVDKGLTPLSLGNENWRKPVVLDTNDRKEVWQSKELHGRFFRALHGPDVDQLASVAWLRVGDLFGETEGFVCAIMDEVIMTKNYRRFIVKDGTVDICRACHRPGESIRHIISGCSRLANGEYLHRHNLVARIIHQQLALKYSLVESEVPYYRYVPDPVLDNGDITMYWDRSIITDRTIVANKPDIVVVDRSERRAMIVDISVPHDENLVKAEKDKQIKYIDLAREVVDMWDVDSAIIVPIVVSGNGLIAKSLDQHLRRLALGSWIKGLIQKAVLLDTARIVRRFLSLEP

SEQ ID NO: 13000 - protein, 1200 aa, Mythimna ferrago
MLTRSRARSQIAQPTSSGSSLSSASQPPGPAPAVSPEIPVAAVALSSSDEYFSPPTTPPPARRRGRGRPPACLGPRGPPASDRVLAAGGSVQRMRWTQSINENVMRSYFGATEGGTNLTAYRGRMLSLFQVLEPAVNVSAQRLSDQVRVIQRNRMLDVAVLDRLRLESRNGRVSPISPPAAVQRQPSVSPRPDHVGEDDDDEAISVSTQCNARLRSALEDAFREYRSIPPELRPRLPRLPMHRKNRALVCALDSQLSNCFDSSEDLSDTHSILYCAAAAACRVAHVKIPNNDRATRPAKPAWQCRIERRIGEARALIGKLICFREGNTRPRVMRFVRRAFSGTDISPRDYLPRITERIDFLKQKVYAWANRIRRYKRRVERYTQNHTFQSNERWVYRAWERPDQSVIDTRLPDDDAMYSFWRSIWSVPVNHTEGDWTREIERECELIPEMGAINISPQDVARAVRPLPNWKSPGPDGLHNFWLKWFQSSHARLASQFQSTLESGSLPQFLTTGITHLLHKSGSTAEPKNYRPITCLPTVYKVLTSILRAKINNHIETNSIMSASQNGCRNGSRGTKELLLIDVAISQQVRRSRRDLSTCWIDYKKAYDSVPHTWLMRVLELYKVDATLRAFLMSCMGQWRTVLHYPGCRRVSENSEPLRIERGIFQGDSLSPLWFCLALNPLSTLLEGSGLGYRLRREGQVISHLLYMDDLKLFASNNLQLMELLKVTETFSSAIRMEFGLDKCAVMHVKRGEIMESVGTQLSDSIHLRSLCSTETYKYLGMSEALGINAADVKQSLRERFFGRLNKVLNSLLSGGNKVRAFNGWVMPVLMYSFGILKWTQTELDALDRRVRTLLTANRMHHPRSSVMRLYIPRKCGGRGFLNAKTLHNREVCSLREYFLETDVGMHRDVVAVDKGLTPLSLASENWRKPIVMDTNERKEVWKGKELHGRFYRALHGPDVDLLASVSWLRFGNLFGETEGFVFAIMDEVMMTNNYRKYIVKDGTVDICRACHRPGESIRHIISGCSHLANGDYLHRHNLVARINHQQLALKYNLVESEVPYYKYVPDPVLENGSVTLYWDRSIITDRTIVANKPDIVVIDRLERRTMIVDIAVPHDENLVKAEKDKQTKYLDLAREVVDMWEVDRAIIVPIVVTANGLIAKSLDQHLRRLSLGSWIKGLIQKAVLLDTARIVRRFLSQEP

SEQ ID NO: 13001 - protein, 1035 aa, Mythimna ferrago
MRSALSVLFELGGIDWHVHPSPIAKVVLANTMPYKILQANLQRKNLATQELMLEAERRKATAALIQEPYVGSVKRIIIIIIIIISALDSQLSNCFDSSEDLTDTHSILYCAAAAACRVAHVKIPNSDRATRPAKPAWQCRIERRIGEARALIGKLICFREGNTRPRVMRFVRRAFSGTDISPRDYLPRITERIDFLRQKVYAWANRIRRYKRRVERYTQNRAFQSNERWVYRAWERPDQSVIDTRLPDDDAMYSFWRSIWSVPVNHTEGDWTRKVERECELLPEMGAVTISPQDVARAVRPLPNWKSPGPDGLHNFWLKWFKSSHARLASQFQSALESGSLPQFLTTGITHLLHKSGSTAEPKNYRPITCLPTVYKVLTSILRAKINSHIETNSIMSASQNGCRNGSRGTKELLLIDVAISQQVRRSRRDLSTCWIDYKKAYDSVPHTWLMRVLELYKIDVTLRTFLMSCMGQWRTVLHYPGCRRVSENSEPLRIERGIFQGDSLSPLWFCLALNPLSTLLEGSGVGYRLRREGQVISHLLYMDDLKLFASNNLQLMELLKVTETFSSAIRMEFGLDKCAVMHVKRGEIMESVGTQLSDSIHLRSLCSTETYKYLGMSEALGINAADVKQSLRERFFGRLNKVLKSLLSGGNKVRAFNGWVMPVLMYSFGILKWTQTELDALDRRVRTLLTANRMHHPRSSVMRLYIPRKCGGRGFLNAKTLHNREVCSLREYFLETDVGMHRDVVAVDKGLTPLSLANENWRKPIVMDTNERKEVWKGKELHGRFYRALHGPDVDLLASVSWLRFGDLFGETEGFVFAIMDEVMMTNNYRKYIVKDGTVDICRACHRPGESIRHIISGCSHLANGDYLHRHNLVARIIHQQLALKYNLVESEVPYYRYVPDPVLENGSVTLYWDRSIITDRTIVANKPDIVVIDRLERRTMIVDIAVPHDENLVKAEKDKQTKYLDLAREVVDMWEVDRAIIVPIVVTANGLIAKSLDQHLRRLSLGSWIKGLIQKAVLLDTARIVRRFLSQEP

SEQ ID NO: 13002 - protein, 975 aa, Mythimna ferrago
MPLELRPRLPRLPMHNKNKALVAALDSQLSNYFDDCEDLTDTHSIMYCAAVAACRVAHVKFPNSDVATRPKPAVPAWQCRIERRIGGARALIGKLICFREGNTRPRVMRFVRRAFSGTDISPRDYMSRVTERIDFLKQKVYAWANRIRRYKRRVERYIQNSTFRSNERWVYRGWERPDQGVTDTRLPDDDAMCSFWRNIWSVPVSHTEGGWSREVERACESITEMGAITISPQDVARAVRPLPNWKSPGPDGLHNFWIKWLQRSHARLASQYQTALESGSLPEFLTTGVTHLLHKSGSTAEPKNYRPITCLPTVYKVLTSILRAKINHRVDNNAIMSASQNGCRNGSRGTKELLLIDMAISQQVRRSRKDLSTCWIDYKKAYDSVPHTWLMRVLELYKVDATLRTFLMSCMRQWRTVLRYPGCRNIQRNSDPVRIERGIFQGDSLSPLWFCLALNPLSTLLENSGLGYRLKRGGQVISHLLYMDDLKLFAPNNLQLMELLKVTETFSSAIRMEFGVDKCAVMHIKRGEIVESVGIQLSDSIHLRSLSPTETYKYLGMSEALGINATDMKQSLKERFFGRLKKVLNSLLSGGNKVRAFNGWVMPVLMYAFGVLKWTQTELDALDRRVRTLLTAYRMHHPRSSVMRLYIPRKCGGRGFLNAKSLHNREVCSLREYFLAADGGMHRDVVAVDKGLTPLSLANENWRKPVVLDTNVRKEVWQSKELHGRFFRALHGPDVDQLASVAWLRVGDLFGETEGFVCAIMDEVIMTNNYRRFIVKDGTVDICRACHRSGESIRHIISGCSRLANGEYLHRHNLVARIIHQQLALKYSLVESEVPYYRYVPDPVLDNGDITLYWDRSIITDRTIVANKPDIVVVGRSERRAMIVDISVPHDENFAKAEKDKQIKYIDLAREVVDMWEVDSAIIVPIVVSANGLIAKSLDQHLRRLSLGDWIKGLIQKAVLLDTARIVRRFLSLEP

SEQ ID NO: 13003 - protein, 1200 aa, Mythimna ferrago
MLTRSRARSQIEQPTSSGSSLSSASQPPGPAPAVSPEIPVAAVASSSSDEYFSPPTTPPPARRRGRGRPPACLGPRGPPASDRVLAAGGSVQRMRWTQSINENVMRSYFGATEGGTNLTAYRGRMLSLFQVLEPAVNVSAQRLSDQVRVIQRNRMLDDAVLDRLRLESRNGRVSPISPPAAVQRQPSVSPRPDHVGEDDDDEAISVSTQCNARLRSALEDAFREYRSIPPELRPRLPRLPMHRKNRALVCALDSQLSNCFDSSEDLSDTHSILYCAAAAACRVAHVKIPNNDRATRPAKPAWQCRIERRIGETRALIGKLICFREGNTRPRVMRFVRRAFSGTDISPRDYLPRITERIDFLKQKVYAWANRIRRYKRRVERYTQNHTFQSNERWVYRAWERPDQSVIDTRLPDDDAMYSFWRSIWSVPVNHTEGDWTREIERECELIPEMGAINISPQDVACAVCPLPNWKSPGPDGLHNFWLKWFQSSHARLASQFQSALESGSLPQFLTTGITHLLHKSGSTAEPKNYRPITCLPTVYKVLTSILRAKINNHIETNSIMSASQNGCRNGSRGTKELLLIDVAISQQVRRSRRDLSTCWIDYKKAYDSVPHTWLMRVLELYKVDATLRAFLMSCMGQWRTVLHYPGCRRVSENSEPLRIERGIFQGDSLSLLWFCLALNPLSTLLEGSGLGYRLRREGQVISHLLYMDDLKLFASNNLQLMELLKVTETFSSAIRMEFGLDKCAVMHVKRGEIMESVGTQLSDSIHLRSLCSTETYKYLGMSEALGINAADVKQSLRERFFGRLNKVLNSLLSGGNKVRAFNGWVMPVLMYSFGILKWTQTELDALDRRVRTLLTTNRMHHPRSSVMRLYIPRKCGGRGFLNAKTLHNREVCSLMEYFLETDVGMHRDVVAVDKGLTPLSLASENWRKPIVMDTNERKEVWKGKELHGRFYRALHGPDVDLLASVSWLRFGNLFGETEGFVFAIMDEVMMTNNYRKYIVKDGTVDICRACHRPGESIRHIISGCSHLANGDYLHRHNLVARIIHQQLALKYNLVESEVPYYKYVPDPVLENGSVTLYWDRSIITDRTIVANKPDIVVIDRLERRTMIVDIAVPHDENLVKAEKDKQTKYLDLAREVVDMWEVDRAIIVPIVVTANGLIAKSLDQHLRRLSLGSWIKGLIQKAVLLDTARIVRRFLSQEP

SEQ ID NO: 13004 - protein, 1106 aa, Eilema sororculum
MRWTNSINENVMRAYFAATEGGTNLSAYRSRMLPLFQALEPSVNTSAQRLSDQVRVIQRNHMLNETVLETLRQECLRNICVNPALAPAPASTTALNEDSHVTRDDTPIPVSIQYNEEIKEALEYALREYRSMPIHVRPRLPRLPIHRRNIALVSALDSLLPKYLENSENLGDTHSILYCTAVAACRMAGAKFHIKDPAIRPKPAIPAWQCRIERRVAEARVLIGKLICFRSGNTRPRVMRYVTRAFAGTNISPQDYTSRVTERIDFLKQKVCAWANRIRRYKKRVDRYTVNRMFQRDQRWVYRSWERTDESVDDLRRPDAEATNGFWHNIWSVPVSHTEGDWMREVERACETIPEMEEIYIDATDVDCAVRSLSNWKSPGPDGLHNFWLKWLRSSHVVLASQFQSAIESGTLPAFMTTGVTHLLHKTGNTLEPNNYRPITCLPTVYKLLTSILRAKINNHINNNSIMCTSQNGCRNGARGTKELLLIDMTISQQARRNRKDLVACWIDYKKAFDSVPHTWLLRVLELYKVNTTLCTFLRSCMGQWRTVLLYPGCRQALGSGEPITIERGIFQGDSLSPLWFCLALNPLSTLLVNSGLGYRLRREGQMVSHLFYMDDLKLFAHTNPQLIALLKVTETFSNSIKMAFGVDKCAVIHVKRGRVVESEGIQLSDSTNLRSLLVTETYKYLGMSQALCINEVGMKQMLQERFFGRLKKVLNSLLSGGNKVRACNSWVMPLLMYSFGILKWTQTELDTIDRKVRTQLTAFRMHHPRSSVMRLYIPRKCGGRGFLNAKTLHNREVCNLRDYFLKSNVDMHRDVVNVDTGLTPLGLAKENWRRPTIVGTDSRREVWQSKELHGRFYRALHRPEVDLLASVSWLRFSDLFGETEGFVCAIADEVIKTNNYRKYIMRDGTIDICRACHQPGESLRHITSGCSRLANGEYLHRHNQVARIIHQRLALKYNLVEVEVPYYRYVPEPVLENSHITLYWDRSIITDRTVVANKPDIVVIDRSERRALIVDVTIPHDENLVKAEKDKQVKYLDLAHEVVDMWNVDSAIIVPIVVSVNGLIAKSLDQHLKRLGLDGWVKGQMQKAVLLDTARIVRKFLSLEP

SEQ ID NO: 13005 - protein, 868 aa, Eilema sororculum
MRYVTRAFAGTDISPQDYTSRVTERIDYLKQKVYAWANRIRRYKKRVDRYTVNRMFQRDQRWVYRSWERTEESVDDVRRPDAEVTNAFWRSIWSVPVSHTEGDWMHEVERACETIPEMEEINIDAIDVDCAVRSLSNWKSPGPDGLHNFWLKWLRSSHVVLASQFQSAVESGTLPAFMTTGVTHLLHKTGSTLEPNNYRPITCLPTVYKLLTSILRAKINNHINNNSIMCASQNGCRNGARGTKELLLIDMAISQQARRNRKDLTACWIDYKKAFDSVPHTWLLRVLELYKVNTTLCTFLRSCMGQWRTVLFYPGCRQALGGGVPITIERGIFQGDSLSPLWFCLALNPLSTLLVNSGLGYRLRREGQMVSHLFYMDDLKLFAHTNPQLITLLKITETFSNSIKMAFGVDKCAVIHVKRGRVVESEGIQLSDSTNLRSLLVTETYKYLGMSQALCINEVDMKQMLQERFFGRLKKVLNSLLSGGNKVRACNSWVMPLLMYSFGILKWTQTELDTIDRKVRTQLTAFRMHHPRSSVMRLYIPRKCGGRGFLNAKTLHNREVCNLRDYFLKSNVDMHRDVVNVDTGLTPLGLAKENWRRPTIVSTDSRREVWQSKELHGRFYRALHRPEVDLLASVSWLRFSDLFGETEGFVCAIADEVIKTNNYRKYIMRDGTIDICRACHQPGESLRHITSGCSRLANGEYLHRHNQVARIIHQRLALKYNLVEFEVPYYRYVPEPVLENTHITLYWDRSIITDRTVVANKPDIVVIDRSERRALIVDITIPHDENLVKAEKDKQVKYLDLAHEVVDMWNVDSAIIVPIVVSVNGLIAKSLDQHLKRLGLDGWVKGQMQKAVLLDTARIVRKFLSLEP

SEQ ID NO: 13006 - protein, 1192 aa, Eilema sororculum
MLTRAQAKRNRSAPITSPDSSLSSAAQPPAVEPAASSSSSSDEFFSPPTSPTPVRRPGRGRPPTCLGPRRPPASNGAPATGGDVHRMRWTNSINENVMRAYFAATEGGTNLSAYRTRMLPLFQALEPSINVSAQRLSDQVRVIQRNRMLNETVLETLRLECLRNICVTPAPVPVPASTVELNDDTCVAPDDTPIPVSIQYNEEIKEALECALREYRSMPVHVRPRLPRLPIHRRNIALVSALDSLLPRYLENSENLGDTHSILYCTAVAACRMAGAKFPIKDPAIRPKSAIPAWQCRIERRVTEARVLIGKLICFRSGNTRRRVMRYVTRAFAGTDISPQDYTSRVTERIDFLKQKVYAWANRIRRYKKRVDRYTVNRMFQRDQRWVYRSWERTEEGVDDVRRPDAEVTNAFWRSIWSVPVSHTEGDWMHEVERACETIPEMEEINIDAIDVDCAVRSLSNWKSPGPDGLHNFWLKWLRSSHVVLASQFQSAVESGTLPAFMTTGVTHLLHKTGSTLEPNNYRPITCLPTVYKLLTSILRAKINNHINTNSIMCASQNGCRNGARGTKELLLIDMAISQQARRNRKDLTACWIDYKKAFDSVPHTWLLRVLELYKVNTTLCTFLRSCMGQWRTVLFYPGCRQALGGCVPITIERGIFQGDSLSPLWFCLALNPLSTLLVNSGLGYRLRREGQMVSHLFYMDDLKLFAHTNPQLITLLKITETFSNSIKMAFGVDKCAVIHVKRGRVVESEGIQLSDSTNLRSLLVTETYKYLGMSQALCINEVDMKQMLQERFFGRLKKVLNSLLSGGNKVRACNSWVMPLLMYSFGILKWTQTELDTIDRKVRTQLTAFRMHHPRSSVMRLYIPRKCGGRGFLNAKTLHNREVCNLRDYFLKSNVDMHRDVVNVDTGLTPLGLAKENWRRPTIVSTDSRKEVWQSKELHGRFYRALHRPEVDLLASVSWLRFSDLFGETEGFVCAIADEVIKTNNYRKYIMRDGTIDICRACHQPGESLRHITSGCSRLANGEYLHRHNQVARIIHQRLALKYNLVEVEVPYYRYVPEPVLENTHITLYWDRSIITDRTVVANKPDIVVIDRSERRALIVDVTIPHDENLVKAEKDKQVKYLDLAHEVVDMWNVDSAIIVPIVVSVNGLIAKSLDQHLKRLGLDGWVKGQMQKAVLLDTARIVRKFLSLEP

SEQ ID NO: 13007 - protein, 1199 aa, Ptilodon capucinus
MSAAVNEPNAQSTPPDPSPRSASPSPASIIRTSVTAVASSESDEYFSPPTSPPPVRQQRGRPPGHLGLLGQPAPNRVLVPSGVVRRMRWTSSINENVMRAYYEATEGGTNLTAYRNRMLPLFQSLEPAVNVSAQRLSDQVRVIQRGNMLADTVLDRLRSEMQSRRVVPVASSQPAAQPVASATVTSRLAADSDVDRDNAPINVSNQYNELLRSTLEDVVRVYRSMPNHLRPRIPRLPMHKGNRALVGALDSLLSIYFDSSDNLADTHSILYCAAITVCRVARVKVFNTDTATRPKPAVPAWQCRIERRISEARALIGKLSCFREGNTRPRVMRFVKRAFAGTDVSPREYISRVTERIDFLKQKIYAWANRIRRYKVRVDRYSQNSMFQRDQRWVYRSWERPSEPVSELQRPDDNATTTFWRDIWSVPVTHYEGDWIGDVERMCEPIKEMEAISIGPLDVANAVRSLPNWKAPGPDGLHNFWLKWLRSSHVRLASQFQSALQSGSLPEFITTGVTHLLHKTGSTTDPKNYRPITCLPTIYKTLTSILRAKIARHVEDNSIMSASQNGCRSGSRGTKELLLIDMTICQQARRNRKDLSTCWIDYKKAYDSVPHTWLVRVLELHKIDTTLRTFLESCMRQWKTVLLCPGSRQILGNGEPIRIERGIFQGDSLSPLWFCLALNPLSTLLEESGFGFRLRRGGQVISHLLYMDDLKLFAPTALQLTGLLKVTETFSNSIRMEFGVDKCAVMHAKQGRLVESEGIQLSDSIQLRSLAATETYKYLGMSQGLGISETDMKQLLRDRFLGRLKKVLKSLLSGGNKVRAYNGWVMPVLMYSFGILKWTQTELDTLDRTVRTTLTSYRMHHPRSSVMRLYIPRKCGGRGFLNVKTLHNREICSLREYFLRADGEMHVDVVAVDNGLTPLSLAKENWRKPVVLTTDDRRLVWQGKELHGRYYRALHGPDVDLAASVAWLRFGDLFGETEGFVCAIMDEVVMTNNYRKYILRDGTIDICRACHRPGESLRHIISGCSRLANGQYLHRHNQVARIIHQQLALKYRLVTSEVPYYRYEPQPVLEEGHISLYWDRSIITDRTIVANKPDIVLIDRQERRAMIVDITVPHDENLVKAEKDKESKYLDLAHEVVDMWDIDAAIIVPIVVSAHGLLAKSLDKHLKRLALGGWIKGQIQKAVLLETARIVRKFLSLEP

SEQ ID NO: 13008 - protein, 1212 aa, Ptilodon capucinus
MTDAPRRNPRRLCRQRTVNEPNAQSTPPDPSPRSASPSPASIIRTSVTAVASSESDEYFSPPTSPPPVRQQRGRPPGHLGLLGQPAPNRVLVPSGVVRRMRWTSSINENVMRAYYEATEGGTNLTAYRNRMLPLFQSLEPAVNVSAQRLSDQVRVIQRGNMLADTVLDRLRSEMQSRRVVPVASSQPAAQPVASATVTSRLAADSDVDRDNAPINVSNQYNELLRSTLEDVVRVYRSMPNHLRPRIPRLPMHKGNRALVGALDSLLSIYFDSSDNLADTHSILYCAAITVCRVARVKVFNTDTATRPKPAVPAWQCRIERRISEARALIGKLSCFREGNTRPRVMRFVKRAFAGTDVSPREYISHVTERIDFLKQKIYAWANRIRRYKVRVDRYSQNSMFQRDQRWVYRSWERPSEPVSELQRPDDNATTTFWRDIWSVPVTHYEGDWIGDVERMCEPIKEMEAISIGPLDVANAVRSLPNWKAPGPDGLHNFWLKWLRSSHVRLASQFQSALQSGSLPEFITTGVTHLLHKTGSTTDPKNYRPITCLPTIYKTLTSILRAKIARHVEDNSIMSASQNGCRSGSRGTKELLLIDMTICQQARRNRKDLSTCWIDYKKAYDSVPHTWLVRVLELYKIDTTLRTFLESCMRQWKTVLLCPGSRQILGNGEPIRIERGIFQGDSLSPLWFCLALNPLSTLLEESGFGFRLRRGGQVISHLLYMDDLKLFAPTALQLTGLLKVTETFSNSIRMEFGVDKCAVMHAKQGRLVESEGIQLSDSIQLRTLAATETYKYLGMSQGLGISETDMKQLLRDRFLGRLKKVLKSLLSGGNKVRAYNGWVMPVLMYSFGILKWTQTELDTLDRTVRTTLTSYRMHHPRSSVMRLYIPRKCGGRGFLNVKTLHNREICSLREYFLRADGEMHVDVVAVDNGLTPLSLAKENWRKPVVLTTDDRRLVWQGKELHGRYYRALHGPDVDLAASVAWLRFGDLFGETEGFVCAIMDEVVMTNNYRKYILRDGTIDICRACHRPGESLRHIISGCSRLANGQYLHRHNQVARIIHQQLALKYRLVTSEVPYYRYEPQPVLEDGHISLYWDRSIITDRTIVANKPDIVLIDRQERRAIIVDITVPHDENLVKAEKDKESKYLDLAHEVVDMWHIDAAIIVPIVVSAHGILAKSLDKHLKRLALGGWIKGQIQKAVLLETARIVRKFLSLEP

SEQ ID NO: 13009 - protein, 1212 aa, Ptilodon capucinus
MTDAPRRNPRRLCRQRTVNEPNAQSTPPDSSPRSASPSPASIIRTSVTAVASSESDEYFSPPTSPPPVRQQRGRPPGHLGLLGQPAPNRVLVPSGVVRRMRWTSSINENVMRAYYEATEGGTNLTAYRNRMLPLFQSLEPAVNVSAQRLSDQVRVIQRGNMLADTVLDRLRSEMQSRRVVPVASSQPAAQPVASATVTSRLAADSDVDRDNAPIDVSNQYNDLLRSTLEDVVRVYRSMPNHLRPRIPRLPMHKGNRAIVGALDSLLSIYFDSSDNLADTHSILYCAAITVCRVARVKVFNTDTATRPKPAVPAWQCRIERRISEARALIGKLSCFREGNTRPRVMRFVRRAFAGTDVSPREYISRVTERIDFLKQKIYAWANRIRRYKVRVDRYSQSSMFQRDQRWVYRSWERPNEPVSELQRPDDNAMTTFWRDIWSVPVTHYEGDWIGDVERMCEPIKEMEAISIGPLDVANAVRSLPNWKAPGPDGLHNFWLKWLRSSHVRLASQFQSALQSGSLPEFITTGVTHLLHKSGSTTDPKNYRPITCLPTIYKTLTSILRAKIARHVEDNSIMSASQNGCRSGSRGTKELLLIDMTICQQTRRNRKDLSTCWIDYKKAYDSVPHTWLVRVLELYKIDTTLRTFLESCMRQWKTVLLCPGSRQILGNGEPIRIERGIFQGDSLSPLWFCLALNPLSTLLEESGLGFRLRRGGQVISHLLYMDDLKLFAPTALQLSGLLKVTETFSNSIRMEFGVDKCAVMHAKQGRLVESEGIQLSDSIQLRSLAATETYKYLGMSQGLGISETDMKQLLRDRFLGRLKKVLKSLLSGGNKVRAYNGWVMPVLMYSFGILKWTQTELDTLDRTVRTTLTAYRMHHPRSSVMRLYIPRKCGGRGFLNVKTLHNREICSLREYFLRADGEMHADVVAVDNGLTPLSLAKENWRKPVVLTTDDRRLVWQGKELHGRYYRALHGPDVDLAASVAWLRFGDLFGETEGFVCAIMDEVVMTNNYRKYILRDGTIDICRACHRPGESLRHIISGCSRLANGQYLHRHNQVARIIHQQLALKYRLVTSEVPYYRYEPQPVLEEGHISLYWDRSIITDRTIVANKPDIVLIDRQERRAMIVDITVPHDENLVKAEKDKESKYLDLAHEVVDMWDIDAAIIVPIVVSAHGLLAKSLDKHLKRLALGGWIKGQIQKAVLLETARIVRKFLSLEP

SEQ ID NO: 13010 - protein, 868 aa, Hydraecia micacea
MRFVRRAFSGTDISSRDYLSRVTERIDFLKQKICAWANRILRYRRRVERYTQNRRFQSDERWVYRAWERPDQGVTDTRLPDDDAMCSFWRNIWSVPVSHTEGDWTGKIERACDLIPEMEALIISPQDVARAVRPLPNWKSPGPDGLHNFWIKWFKRSHDRLASQFQSALESGSLPQFLTTGITHLLYKSGSTADPKNYRPITCLPTVYKVLTSILRAKINKHIDTNSIMSVSQNGCKNGSRGTKELLLIDMTINQQVRRSRKDLSTCWIDYKKAYDSVPHTWLMRVLELYKVDTTLCTFLMSCMGQWRTVLRYPGCRNIQRNSEPIRIERGIFQGDSLSPLWFCLALNPLSTLLEDSGLGYRLRRGGQVISHLLYMDDLKLFAPNNLQLMELLKITETFSSAIRMEFGVDKCAVMHVKRGEIVESVGNQLSDSTNLRALSASDTYKYLGMSEALGINVTDMKQSLKERFFGRLKKVFNSLLSGGNKVRAFNDWVMPVLMYSFGILKWTQTELDALDRKVRTLLTANRMHHPRSSVMRLYIPRKCGGRGFLNAKTLHNREICSLREYFLETDVGMHRDVVVVDNGLTPLSLGKENWRKPVVLDTNDRMEVWQSKELHGRFFRALHGPDVDLLASVAWLRFGDLFGETEGFVCAIMDEVMMTNNYRRFIVKDGTVDICRACHRPGESIRHIISGCSRLANGEYLHRHNLVARIIHQQLALKYSLVESEVPYYRYVPDPVLENGNITLYWDRSIITDRTIVANKPDIVMMDRLERRTMIVDITIPHDENLVKAEKDKQIKYLDLAREVVDMWDVDSAIIVPIVVTANGLIAKSLDQHLRRLSLASWIKGLIQKAVLLDTARIVRRFLSLEP

SEQ ID NO: 13011 - protein, 1194 aa, Hydraecia micacea
MNMRLQELVRIIIIIIIIPAPLVSSPTVSDVTAPAAAVASSSSDEYFSPPTTPPPARRRGGRRPPDSLGPRGPPASDRVPAPGGSVQRMRWTRSINENVMRSYYGATEGGSNLTAYRVRMLSLFQVLEPAVNVSAQRLSDQVRVIQRNHMLDDTVLDRLRNEIQSSHAIAPQSQTAVILPQSNTSHADEGSNDRATNVSTQCNEELSSALEDAIQEYRFMSPELRPRLPRLPMHNKNRALVAVLNSQLSKYFDDCEDLTDTHSILYCAAVAACRVAHVKFTNDSRATRPKPAVPAWQCRIERRIGGARALIGKLICFREGNTRPRVMRFVRRAFLGTDISPQDYTSCVTERIDFLKQKVYAWANRIRRYKRRVERYTQNRTFQSDERWVYRDWERPDQSVADTCLPDDDAMCSFWRSIWSVPVSHTEGDWARDVERACDPIPEMEAITICPQDVARAVRPLPNWKSPGPDGLHNFWIKWFSRSHARLASQFQTALESGSLPQFLTTGITHLLHKSGSTAEPKNYRPITCLPTVYKVLTSILRAKINKHIDTNFIMSASQNGCRNGSRGTKELLLIDMTISQQVRRFRKDLSTCWIDYKKAYDSVPHTWLMRVLELYKVDTTLRTFLMSCMGQWRTVLRYPGCRNIQRNSEPIRIERGIFQGDSLSPLWFCLALNPLSTLLEDSGLGYRLRRGGQVISHLLYMDDLKLFAPNNLQLMELLKVTQTFSNAIRMEFGVDKCAVMHVKRGEIVESVGNQLSDSTNLRALSASETYKYLGMSEALGINVTDMKQSLKERFFGRLKKVLNSLLSGGNKVRAFNGWVMPVLMYSFGILKWTQTELDALDRRVRTLLTANRMHHPRSSVMRLYIPRKCGGRGFLNSKTLHNREICSLREYFLETDVGMHRDVVMVDKGLTPLSLAKENWRKPVVLDTNDRMEVWQSKELHGRFFRALHGPDVDLLASVAWLRFGDLFGETEGFVCAIMDEVMMTNNYRRFIVKDGTVDICRACHRPGESIRHIISGCSRLANGEYLHRHNLVARIIHQQLALKYSLVESEVPYYRYVPDPVLENGNITLYWDRSIITDRTIVANKPDIVVVDRSERRAMIVDITVPHDENLVKAEKDKQIKYLDLAREVVDMWDVDSAIIVPIVVTANGLIAKSLDQHLRRLSLASWIKGLIQKAVLLDTARIVRRFLSLEP

SEQ ID NO: 13012 - protein, 1207 aa, Amphipyra tragopoginis
MLTRSRAKTLQRTHPTPSASSLSSASQPPEPASIVSDVTLAAAVASSSSDEYFSPATSPSPPPARRRGRGRPPTCLGPRGPPASDRVPAPGGSVQRMRWTQSMNENCMRAYFGATEGGTNLTAYRGRMLSLFQTLEPAVNVSAQRLSDQVRVIQRDHRLDDAALGRLRDEMQNSHATPPPSQIRTQPLVPPAVPLQPNHADEEEQDRAISAGTQYSEIMRSALEDALREFRSTPPELRPRLPRLPMHNKNRALVCALDSLLSNVLESSKDIGDTHSILYCAAVAAYRVAHVKFPNDNRATRPKSTVPAWQCRIERRIDEARVLIGKLTCFREGNIRPRVMRFVRRAFSGTDVSPGEYVSRVTERIDFLKQKVYAWANRIRRYRRRVDRYTQNRIFQSDQRWVYRTWERPDQGVSDTHLPDNDVMNAFWRNIWSVPVTHTEGDWMQEVQRACEPIQEMGAVTIGPQDVTSAVRPMPNWKSPGPDGLHNFWIKWLRSSHARLASQFQSSLESGSLPSFLTTGVTHLLFKSGSTAEPKNYRPITCLPTVYKLLTSILRAKINNHIDNNAIMSDSQNGCRNGSRGTKELLLIDMAISQQVRRSRKDLSTCWIDYKKAYDSVPHTWLMRVLELYKINATLRTFLMSCMGQWRTVLHYPGCRQIQGNGELIRIERGIFQGDSLSPLWFCLALNPLSTLLEGSGLGYRLRRGGQVISHLLYMDDLKLFAPNNLQLVELLKVTETFSNSIRMEFGVDKCAIMHVKRGRIMESVGTQLSDAIHLRSLSSTETYKYLGMSEALGINEADMKQSLKERFFGRLIKVLKSLLSGGNKVRAFNGWVMPVLMYSFGILRWTQTELDALDRRVRTLLTAYRMHHPRSSVMRLYIPRKCGGRGFLNAKTLHNREVCSLREYFSQADVGMHRDVVAVDKGLTPLSLAKENWRKPVVLDTNGRREVWRSKELHGRFYRALHGPDVDFLASVAWLRFGDLFGETEGFVCAIMDEVMMTNNYRKYIVKDGTVDICRACHCPGESIRHIVSGCSRLANGEYLHRHNLVARIIHQQLALKYNLVDTEVPYYKYVPDPVLENGHVTLYWDRSIITDRTIVANKPDIVVIDRLERRTVIVDIAVPHDENLVKAENDKKIKYLDLAHEVVDMWDVDSAVIVPIVVTANGLIAKSLDQHLMRLSLGSWIKGLIQKAVLLDTARIVRKFLSLEP

SEQ ID NO: 13013 - protein, 1205 aa, Amphipyra tragopoginis
MLTRSRAKTQQSTHLPPSASSLSSASQPPEPASIVSDVTPAAAVASSSSDEYFSPATTPPPARRRGRGRPPACLGPRGPPASDRVPAPGGSVQRMRWTQSMNENCMRAYFGATEGGTNLTAYRGRMLSLFQALEPAVNVSAQRLSDQVRVIQRDHRLDDAALDRLRNEMQNSHVTPLPAQIRTQPLVPPAVPLEPNHGDEEEEDRAISAGTQCSELMRSALEDALREFRSTPPELRPRLPRLPMHNKNRALVCTLDLLLSNVFESSEDLGDTHSILYCAAVAACRVAHVKFPNDNRATRPKSAVPAWQCRIERRIDEARVLIGKLTCFREGNRRPRVMRFVRRAFSGTDIGPGEYVSRITERIDFLKQKVYAWANRIRRYRRRVDQYTQNRIFQSDQRWVYRTWERPDQGVSDAHLPDNDVMNAFWRNIWSVPVTHTEGDWMQEVQRACEPIQEMGAVTIGPQDVASAVRPMPNWKSPGPDGLHNFWIKWLRSSHARLASQFQSSLESGSLPSFLTTGVTHLLFKSGGTAEPKNYRPITCLPTVYKLLTSILRAKLNHHIDSNAIMCATQNGCKNGSRGTKELLLIDMAISQQVRRSRKDLSTCWIDYKKAYDSVPHTWLMRVLELYKINATLRTFLMSCMGQWRTVLHYPGCRQIQGNGELIRIERGIFQGDSLSPLWFCLALNPLSTLLEGSGLGYRLRRGGQVISHLLYLDDLKLFAPNNLQLLELLKVTETFSNSIRMEFGVDKCAVMHVKRGRIMESVGTQLSDFIHLRSLSSTETYKYLGMSEALGINEADMKQSLRERFFGRLIKVLKSLLSGGNKVRAFNGWVMPVLMYSFGILRWTQTELDALDRRVRTLLTAYRMHHPRSSVMRLYIPRKCGGRGFLNAKTLHNREVCSLREYFSQADVGMHRDVVAVDKGLTPLSLAKENWRKPVVLDTNGRRDVWRSKELHGRFYRALHGPDVDFLASVAWLRLGDLFGETEGFVCAIMDEVMMTNNYRKYIVKDGTVDICRACHCPGESIRHIVSGCSRLANGEYLHRHNLVARIIHQQLALKYNLVDTEVPYYRYVPDPVLENGHVTLYWDRSIITDRTIVANKPDIVVIDRLERRTMIVDITVPHDENLVKAENDKKINYLDLAHEVVDMWDVDSAVIVPIVVTANGLIANSLDQHLMRLSLGSWIKGLIQKAVLLDTARIVRKFLSLEP

SEQ ID NO: 13014 - protein, 1198 aa, Amphipyra tragopoginis
MLTRARSKAARTPPPDSPLRSASQPPELGPPVTPAAAAASSSSDEYFSPPTSPRPVRQQGRHRPPTSLGPRGPPAPSRVLATGGCVQRMKWTQSINENVMRAYYGSTEGGTNLTAYRVRMVTLFQELEPAINFSAQRLSDQVRVIQRNHRLDDAALDRLRLEVQNSRVTPFPSQTAVHEVNINIVPLRSDYVDGDMEDRAVTVSSQYNDQLRSALEDAIREYRANPELRPRLPRLPMHNKNRALVCALDSLLSSYFESSEDLGDTHSILYCAAVAACRVANVKFNNSERATRPKPAVPVWQCRIERRIDGARALIGKLICFREGNTRPRVMRFVRRAFSGTGISPREYMSQVTERIDFLKQKVCAWASRIRRYKRRVERYTRNRMFQCDQRWLYRAWERPEQGVSDGRLPDDDAMSSFWRSIWSVPVTHTEGDWMWDIERACEPIEEMGEILISPDDVASAARPLPNWKSPGPDGLHNFWIKWLRSSHARLASQFQSSLESGSLPQFLTTGVTHLLHKSGSTAEPKNYRPITCLPTVHKLRTSILRSKINTHVENNSVMSSSQNGCKNGSRGTKELLLIDMAINQQVRRSRKSLSTCWIDYKKAYDSVPHAWLMRVLELYKINTTLRTFLRSCMGQWRTVLRYPGCQLIRGSDVPIRIERGIFQGDSLSPLWFCLALNHLSTLLEGSGLGYPLRRGGQVVSHLLYMDDLKLFAPTKLQLVELLKVTETFSNSIRMEFGVDKCAVIHVRRGGIMESEGLQLSDSIHLRPLSANDTYKYLGMSEGLGISEADMKQSVRERFFGRLKKVLKSLLSGGNKVRAFNGWVMPVLMYSFGILKWTQTELDALDRRVRSLLTANRMHHPRSSVMRLYIPRKCGGRGLLNAKTLHNREVCSLREYFLHADAGMHRDVVAVDKGLTPLNLAKENWRKPVVLSTNDRREIWQSKELHGRFYRALHGPDVDFQASVSWLRFGDLFGETEGFVCAIMDEVIMTNNYRKYIVKDGTVDICRPCHCPGESLRHIISGCSRLANGEYLHRHNQVARIIHQQLALKYNLVESEVPYYKYVPDPVLENGHITLYWDRSIITDRTIVANKPDIVVIDRSERRTMIVDVTIPHDENLVKAEKDKQIKYLDLAHEVVNMWDVDSAIIVPIVVTANGLMAKSLDQHLKRLSLGGWIKGLIQKAVLLDTARIVRRFLSLEP

SEQ ID NO: 13015 - protein, 921 aa, Amphipyra tragopoginis
MEMNKRDNNSERATRPKPAVPVWQCRIERRIDGARALIGKLICFREGNTRPRVMRFVRRAFSGTGISPREYMSRVTERIDFLKQKVCAWASRIRRYKRRVERYTQNRMFQCDQRWLYRAWERPEQGVSDGRLPDDDAMSSFWRSIWSVPVTHTEGDWMRDIERACEPIEEMGEILISPHDVASAARPLPNWKSPGPDGLHNFWIKWLRSSHARLASQFQSSLESGSLPQFLTTGVTHLLHKSGSTAEPKNYRPITCLPTVYKLLASVLRSKINTHVENNSVMSSSQNGCKNGSRGTKELLLIDMAISQQVRRSRKNLSTCWIDYKKAYDSVPHTWLMRVLELYKINTTLRTFLRSCMGQWRTVLRYPGCRLIRGSDVPIRIERGIFQGDSLSPLWFCLALNPLSTLLEGSGLGYPLRRGGQVVSHLLYMDDLKLFALTKLQLVELLKVTETFSNSIRMEFDVDKCAVMHVRRGGIVESEGLQLSDSIHLRPLSANDTYKYLGMSEGLGISEADMKQSLRERFFGRLKKVLKSLLSGGNKVRAFNGWVMPVLMYSFGILKWTQTELDALDRRVRSLLTANRMHHPRSSVMRLYIPRKCGGRGLLNAKTLHNREVCSLREYFLHADAGMHRDVVAVDKGLTPLNLAKENWRKPVVLSTNDRREVWQSKELHGRFYRALHGPDVDFQASVSWLRFGDLFGETEGFVCAIMDEVIMTNNYRKYIVKDGTVDICRACHCPGESLRHIVSGCSRLANGEYLHRHNQVARIIHQQLALKYNLVESEVPYYKYVPDPVLENGHITLYWDRSIITDRTIVANKPDIVVIDRSERRTMIVDVTIPHDENLVKAEKDKQIKYLDLAHEVVDMWDVDSATIVPIVVTANGLMAKSLDQHLKRLSLGGWIKGQIQKAVLLDTARIVRRFLSLGP

SEQ ID NO: 13016 - protein, 1204 aa, Amphipyra tragopoginis
MITRSRAKTQSTQPPPSASSLSSASQPPESASIVSDVTPAAAVASSSSDEYYSPPTSPPPARRRGRGRPPACLGPRGPPASDRVPASGGSVQRMRWTQSMNENCMRAYFGATEGGTNLTAYRGRMLSLFRALEPAVNVSAQRLSDQVRVIQRDHRLDGAALDRLRSEMQSSHVVPLQSQTAVQSQVPSVVAPRSIPADEESDGRVTNVSTQSNEQLRSALELAFRECRSTLPDLRPRLSRLPMNNKNKALMCALDSLLSSYFDGSEDLADTHSILYCAAVAACRVAHVKVDNNDRATRPKPAVPAWQCRIERRIGEARALIGKLICFREGNTRPRVMRFVRRAFSGTDTSPRDYMSRVAERIDFLKQKVYAWANRIRRYKRRVERYTQNRMFQRDQRWVYRAWERPDQGVRDVHLPDDDAMNSFWRSIWSVPVSHAEGDWMRDVERVCEPILDMGAISISPQDVASAARPLPNWKSPGPDGLHNFWLKWLRSSHARLASQFQSSLETGTLPQFLTTGVTHLLHKSGSTAEPKNYRPITCLPTVYKLLTSILRRKISSHIENNSIMSASQNGCRNGSRGTKELLLIDMAISQQVRRSRKDLSTCWIDYKKAYDSVPHTWLLRVLELYKVNTTLCAFLTSCMGQWRTVLRYPGCRQIQGIGEPIRIERGIFQGDSLSPLWFCLALNPLSTLLEGSGLGYRLRRGGQVISHLLYMDDLKLVAPNNLQLLDLLKVTETFSNSIRMEFGVDKCAVMHVKRGRIMESEGTQLSDSIQLRSLSSTETYKYLGMSEALGINEADMKQSLRERFYGRLKKVLKSLLSGGNKVRAFNGWVMPVLMYSFGILKWTQTELDALDRRVRTLLTAYRMHHPRSSVMRLYIPRKCGGRGFLNAKTLHNREVCSLREYFSQADVGMHRDVVAVDKGLTPLSLAKENWRKPAVLDTNGRKDVWRSKELHGRFYRALHGPDVDFLASVAWLRFGDLFGETEGFVCAIMDEVMMTNNYRKYVVKDGTVDICRACHCPGESIRHIVSGCSRLANGEYLHRHNLVARIIHQQLALKYNLVDAEVPYYRYVPDPVLENGHITLYWDRSIITDRTIVANKPDIVVIDRSERRAVIVDVTVPHDENLVKAENDKKIKYLDLAREVVDMWEIDSAVIVPIVVTANGLIAKSLDQHLMRLSLGSWIKGLIQRAVLLDTARIVRKFLSLEP

SEQ ID NO: 13017 - protein, 1204 aa, Amphipyra tragopoginis
MMTRSRAKAQSTQPPPSASSLSSASQPPEPASTVSDVTPAAAVASSSSDEYFSPATSPPPARRRGRGRPPASLGPRGPPASDRVPAPGGSVQRMRWTQSMNENCMRAYFGATEGGTNLTAYRGRMLSLFQALEPAVNVSAQRLSDQVRVIQRDRRLDDAALDRLRSEVQSSRIGALQSQTAVQSQVPLEVVPRSIPADEEGDDRVTNVSTQCNEQLRSALELAIREYRSTPPDLRPRLPRLPMNKKNKALMCALDSLLSSYFDGSEDLTDTHSILYCAAVAACRVAHVKVDNNDRATRPKLAVPAWQCRIERRIGEARALIGKLICFREGNTRPRVMRFVRRAFSGTDTNPRDYMSRVTERIDFLKQKVYAWANRIRRYKRRVERYTQNRMFQRDQRWVYRAWERSDQGVGDAHLPDDDAMNSFWRSIWSVPVSHTEGGWIRDVERVCEPILDMGAISISPQDVASAVRPLPNWKSPGPDGLHNFWLKWLRSSHARLASQFQSSLETGTLPQFLTTGVTHLLHKSGSTAEPKNYRPITCLPTVYKLLTSILRGRISSHIENNSIMSASQNGCRNGSRGTKELLLIDMAISQQVRRSRKDLSTCWIDYKKAYDSVPHAWLMRVLELYKINATLRAFLMSCMGQWRTVLHYPGCRQIQGNGELIRIERGIFQGDSLSPLWFCLALNPLSTLLEGSGLGYRLRRGGQVISHLLYMDDLKLFAPNNLQLLELLKVTETFSNSIRMEFGVDKCAVMHVKRGRIMESVGTQLSDSIQLRSLSSTETYKYLGMSEALGINEADMKQSLKERFFGRLIKVLKSLLSGGNKVRAFNGWVMPVLMYSFGMLRWTQTELDALDRRVRTLLTAYRMHHPRSSVMRLYIPRKCGGRGFLNAKTLHNREVCSLREYFSQADVGMHRDIVAVDKGLTPLSLAKENWRKPVVLDTNGRREVWRSKELHGRFYRALHGPDVDFLASVAWLRFGDLFGETEGFVCAIMDEVMMTNNYRKYIVKDGTVDICRACHCPGESIRHIVSGCSRLANGEYLHRHNLVARIIHQQLALKYDLVDSEVPYYRYVPDPVLENGHVTLYWDRSIITDRTIVANKPDIVVIDRSERRAMIVDITVPHDENLVKAENDKKIKYLDLAHEVVDMWDIDSAVIVPIVVTANGLIAKSLDQHLMRLSLGSWIKGLIQKAVLLDTARIVRKFLSLEP

SEQ ID NO: 13018 - protein, 1203 aa, Amphipyra tragopoginis
MLTRSRAKTQGTRLPSSASSLSSASQPPEPASTVSDVTPAAAVASSSSDEYFSPPTSPPPRRRGRGRPPASLGPRGPPASDGVPAAGGSVQRMRWTQSMNENCMRAYFGATEGGTNLTAYRGRMLSLFRTLEPAVNVSAQRLSDQVRVIQRDHRLDDAALDRLRSEVQSSHVISLQSQTAVQLQVPTVVPPWSIFADEESDDRVTNVSTQCSDQLRSALELAIREYRSTPPDLRPRLPRLPMNKKNRALMCALDPLLSSYFDGSEDLADAHSILYCAAVAACRVARVKFDNNDRATRPKPAVPAWQCRIERRIGGARALIGKLICFREGNTRPRVMRFVRRAFSGTDTSPRDYMSRVTERIDFLKQKVYAWANRIRRYKRRVERYTQNRMFQRDQRWVYRAWERPDQGVGDAHLPDDDAMNSFWRSIWSVPVSHTEGDWMRDVERVCEPILDMGAISISPQDVASAVRPLPNWKSPGPDGLHNFWLKWLRSSHARLASHFQSSLETGTLPQFLTTGVTHLLHKSGSTAEPKNYRPITCLPTVYKLLTSILRCKISCHIENNSIMSASQNGCRNGSRGTKELLLIDMAISQQVRRSRKDLSTCWIDYKKAYDSVPHTWLMRVLELYKVNTTLCTFLTSCMGQWRTVLRYPGCRQIQGIGEPIRIERGIFQGDSLSPLWFCLALNPLSTLLEGSGLGYRLRRGGQVISHLLYMDDLKLFAPNNLQLLELLKVTETFSNAISMEFGVDKCAVMHVKRGGIMESVGTQLSDSINLRSLSSTETYKYLGMSEALGINEADMKQSLRERFYGRLKKVLKSLLSGGNKVRAFNGWVMPVLMYSFGILRWTQTELDALDRRVRTLLTAYRMHHPRSSVMRLYIPRKCGGRGFLNAKTLHNREVCSLREYFSQADVGMHRDVVAVDKGFTPLSLAKENWRKPVVLDTNGRREVWRSKELHGRFYRALHGPDVDFLASVAWLRFGDLFGETEGFVCAIMDEVMMTNNYRRYIVKDGTVDICRACHCPGESIRHIVSGCSRLANGEYLHRHNLVARIIHQQLALKYNLVDVEVPYYKYVPDPVLENGHVTLYWDRSIITDRTIVANKPDIVVIDRSERRAMIVDITVPHDENLVKAENEKKIKYLDLAREVVDMWEVDSAVIVPIVVTANGLIAKSLDQHLMRLSLGSWIKGLIQKAVLLDTARIVRKFLSLEP

SEQ ID NO: 13019 - protein, 1203 aa, Amphipyra tragopoginis
MLTRARARQKDARPRSPDSSLCSASQPPESSPPVSAVTPAAAVASSSSDEYFSPPSSPPPVRRRGGARPPACLGPRSQSASDRVPAAGGNVSRMRWTQSINENVMRAYYGATDGGINLTAYRDRMLSLFQVLEPAINVSTQRLSDQVRVIQRNRRLDDTVLERLRSETQNNRTVTSPAQSAVQPQLPAVPPRPSHADGEGDGEVIEVSNQCSDELRSALEGAILEYRTTPPELRPRLPRLPMHKKNRALVCALDSLLSNYFDGSEDLADTHSILYCAAIAACRVAHVKFTESDRATRPKPVVPAWQCRIERRIGGARALIGKLICFREGNTRPRVMRFVRRAFSGTDISPRDYMSRITERIDFLKQKVYAWANRIRRYKRRVERYTQNRTFQSDQRRVFRTWERPDPSGSDVRLPDDEAMGSFWRSIWSVPIAHTEGGWMRDIERACEPIPEMGAIIISPQDVAGAARPLPNWKSPGPDGLHNFWLKWLRSSHACLASQFQSSLESGSLPQFLTTGATHLLYKSGSTAEPKNYRPITCLPTVYKLLTSILRVKISNHIDNNSILSPSQNGCRSGSRGTKELLLIDMTISQQVRRSRKDLSTCWIDYKKAYDSVPHTWLMRVLELYKINTTLRTFLMSCMRQWRTVLRYPGCREIRGRGEPIRIERGIFQGDSLSPLWFCLALNPLSTLLEGTRLGYRLRREGQVISHLLYMDDLKLFAPTDLRLMELLKVTENFSSSIRMEFGVDKCAVMHVKRGGIVESEGIQISNSIQLRSLSPTETYKYLGMSEALGISEADMRQSLRERFFGRLNKVLRSLLSGGNKVRAFNGWVMPVLMYSFGILKWTQTDLEALDRRVRALLTVHRMHHPRSSVMRLYIPRKCGGRGFLNAKTLHNREVCSLREYFLQAEGEMHRDVVAVDKGLTPLALAKENWRKPAVLSTNDREEVWQSKELHGRFYRALHGPDVDFPASVSWLRFGDLFGETEGFVCAIMDEVMMTNNYRKYIVKDGTVDICRACHRPGESIRHIISGCSRLANGEYLHRHNLVARIIHQQLALKYNLVESEVPYYRYVPDPVLENGHATLYWDRSIITDRTIVANKPDIVVIDRSERRTMIVDITVPHDENLVKAEKDKQIKYLDLAHEVVGMWDVDSAVVVPIVVTANGLIAKSLDQHLKRLSLGGWIKGLLQKAVLLDTARIVRRFLSLEP

SEQ ID NO: 13020 - protein, 1205 aa, Amphipyra tragopoginis
MITRSQVRLQRTRPPSSASSLSSASQPPESSPTVSAVTPAAAVASSSSDEYFSPPTSPPPARRRGGRRPPDRLGLRGPLASDRVPAPGGSVTRMRWTKTINENAMRAYFGATEGGTNLTAYRSRMLSLFQVLEPTVNVSAQRLSDQVRAIQRGHMLDDTVLDRLRSEIQCSPVISSSPQAPGHISRNIPVTSPRLQQVVEEDDDRATVVSIQCNEQLRRALEDAMREYRSTRPEVRPRLPRLPMHRKNRALMCALDSLLSNYFDGSEDLGDTHSILYCAAVAACRVAHVKFINNERATRPKNAVPAWQCRIERRIAEARALIGKLVCFREGNTRPRVMRFVRRAFLGTDVSPREYMSRVTERIDFLKQKVYAWANRIRRYRRRVDRYNQNRMFRSDERWVYRTWERPDQGVDAAHLPDDDAMNSFWRSFWSVPVTHTEGDWMRDVERMCEPILDMGAITISPQDVAGAVRPLPNWKSPGPDGLHNFWLKWLRSSHARLASQFQSSLETGTLPQFLTTGVTHLLHKSGSTAEPKNYRPITCLPTVYKVLTSILRTKINSHIDNNSIMSASQNGCRNGSRGTKELLLIDMAISQQVRRSRKDLSTCWIDYKKAFDSVPHTWLMRVLELYKVNTTLRTFLTSCMGQWRTVLHYPGCRQIQGRGEPIRIERGIFQGDSLSPLWFCLALNPLSTLLEGSGLGYRLRRGGQVISHLLYMDDLKLFAPNNLQLMELLKVTETFSNSIRMEFGVDKCAVMHVKRGGIMESVGTQLSDSIHLRSLSSTETYKYLGMSEALGINVTDMKQSLRERFYGRLKKVLKSLLSGGNKVRAFNGWVMPVLMYSFGILKWTQTELDALDRRVRSLLTAYRMHHPRSSVMRLYIPRKCGGRGFLNAKTLHNREVCSLREYFSQTSVGMHRDVVAVDKGFTPLSLAKENWRKPVVLDTNGRREVWRSKELHGRFYRALHGPDVDFLASVAWLRFGDLFGETEGFVCAIMDEVMMTSNYRKYIVKDGTVDICRACHCPGESIRHIVSGCSRLANGEYLHRHNLVARIIHQQLALKYNLVDAEVPYYKYVPDPVLENGHVTLYWDRSIITDRTIVANKPDIVVIDRSERLTMIVDIAVPHDENLVKAEKDKEIKYQDLAHEVVDMWNVDSAVIVPIVVTANGLIAKSLDQHLKRLSLGGWIKGLIQKAVLLDTARIVRRFLSLRP

SEQ ID NO: 13021 - protein, 1204 aa, Noctua pronuba
MITRSRAKQQKAHPPSPGSSLSSASQPPGRATSVSSVSPVAAVASSSSDEFFSPPSTPSPPRRRGRGRPPAGLGPRGQQAPNRVPAAGGNVSRMRWTQSINENVMRAYYGATEGGSNLTAYRGRMLSLFQVLEPGVSVSAQRLSDQVRVIQRNHMLDDTVLDRLRFDSRSNLVTPASPMIAVQLQNVSSAPPRSDHDGEEDDDEVISVSTQCNAQLRSALEGAFREYRSIPPELRPRLPRLPMHKKNKALVCALDSQLSTCFDSSKDLADTHSILYCGAVAACRVAHVKFPNNDRATRPKLAVPAWQRRIERRIGEARALIGKLICFREGNTRPRVMRFVRRAFSGTGISFRDYLARVTERIDFLKQKICAWANRIRRYKRRVERYTQNRTFQSDERWVYRAWERPDQGVTDTRLPDADAMCLFWRSIWSVPVSHTEGDWTREVEQACDPIPEMGAIIISPQDVACAVRPLPNWKSPGPDGLHNFWIKWFQRSHARLASQFQSALESGSLPQFLTTGITHLLHKSGSTAEPKNYRPITCLPTVYKVLTSILRAKINHHIDSNSIMSASQNGCRNGSRGTKELLLIDMAISQQVRRSRRDLSTCWIDYKKAYDSVPHTWLMRVLELYKVDATLRTFLKSCMGHWRTVLRYPGCRQIQGNSEPIRIERGIFQGDSLSPLWFCLALNPLSTLLEGSGLGYRLRRGGQVISHLLYMDDLKLFAPNNLQLMKLLKVTETFSSAIRMEFGVDKCAVMHVKRGEIMESVGTQLSDSIHLRSLSSTETYKYLGLSEALGINTTDMKQSLRERFFGRLNKVLGSLLSGGNKVRAFNGWVMPVLMYSFGILKWTQTELDALDRRVRALLTANRMHHPRSSVMRLYIPRKCGGRGFLNAKTLHNREVCSLREYFLEADVGMHRDVVSVDKGLTPLSLANENWRKPRVLDTNDRKEVWQGKELHGRFYRALHGPDVDFLASVSWLRFGDLFGETEGFVCAIMDEVMMTNNYRKYIVKDGTVDICRACHRPGESIRHIISGCSRLANGEYLHRHNLVARIIHQQLALKYNLVESEVPYYKYAPDPVLDDGNITLYWDRSIITDRTIVANKPDIVVIDRLERRAMIVDITVPHDENLVKAEKDKQFKYLDLAREVVDMWDVSTAVIVPIVVSANGLIAKSLDQHLRRLSLGSWIKRLIQKAVLLDTARIVRRFLSQEP

SEQ ID NO: 13022 - protein, 1203 aa, Noctua pronuba
MLTRSRARLQAHPPSPDSSLSSASQLPGRASIVSAVSPVAAVASSSSDEFFSPPSTPPPPRRRGRGRPPAGLGPRGQQAPNRVPAAGGNVSRMRWTQSINENVMRAYYGATEGGSNLTAYRGRMLSLFQVLEPGVSVSAQRLSDQVRVIQRNHMLDDTVLDRLRFDSRSNLVTPAPPMIAVQLQNVSSTPPRSDLDGEDGNDEVISVSTQCNAQLRSALEGAFREYRSTPPELRPRLPRLPMHKKNKALVCALDSQLSTCFDSSKDLADTHSILYCGAVAACRVAHVKFPNNDRATRPKLAVPAWQSRIERRIGEARALIGKLICFREGNTRPRVMRFVRRAFSGTGISFRDYLARVTERIDFLKQKICAWASRIRRYKRRVERYTQNRTFQSDERWVYRAWERPDQGVTDTHLPDDDAMCSFWRSIWSMPVSHIEGDWTREVERACDPIPQMGAINISPQDVACAVRPLPNWKSPGPDGLHNFWIKWFQRSHVRLASQFQSALESGSLPQFLTTGITHLLHKSGSTAEPKNYRPITCLPTVYKVLTSILRAKINHHIDSNSIMSASQNGCRNGSRGTKELLLIDMAISQQVRRSRKNLSTCWIDYKKAYDSVPHTWLMRVLELYKVDATLRTFLMSCMGHWRTVLRYPGCRQIQGNSEPIRIERGIFQGDSLSPLWFCLALNPLSTLLEGSGLGYRLRRGGQVISHLLYMDDLKLFAPNNLQLMKLLKVTETFSSAIRMEFGVDKCAVMHVKRGEIMESVGTQLSDSIQLRSLSSTDTYKYLGMSEALGINTADMKQSLRERFFGRLNKVLSSLLSGGNKVRAFNGWVMPVLMYSFGILKWTQTELDVLDRRVRALLTANRMHHPRSSVMRLYIPRKCGGRGFLNAKTLHNREVCSLREYFLEADVGMHRDVVSVDKGLTPLSLANENWRKPRVLDTNDRKEVWQGKELHGRFYRALHGPDVNFLASVSWLRFGDLFGETEGFVCAIMDEVMMTNNYRKYIVKDGTVDICRACHRPGESIRHIISGCSRLANGEYLHRHNLVARIIHQQLALKYNLVESEVPYYKYAPDPVLDNGNITLYWDRSIITDRTIVANKPDIVVIDRLERRAMIVDITVPHDENLVKAEKDKQFKYLDLAHEVVDMWDVNTAVIVPIVVSANGLIAKSLDQHLKRLALGSWIKGLIQKAVLLDTARIVRRFLSQEP

SEQ ID NO: 13023 - protein, 1203 aa, Noctua pronuba
MLTRSRARLQAHPPSPDSSLSSASQLPGRASIVSAVSPVAAVASSSSDEFFSPPSTPPPPRRRGRGRPPAGLGPRGQQAPNRVPAAGGNVSRMRWTQSINENVMRAYYGATEGGSNLTAYRGRMLSLFQVLEPGVSVSAQRLSDQVRVIQRNHMLDDTVLDRLRFDSRSNLVTPAPPMIAVQLQNVSSTPPRSDLDGEDGNDEVISVSTQCNAQLRSALEGAFREYRSTPPELRPRLPRLPMHKKNKALVCALDSQLSTCFDSSKDLVDTHSILYCGAVAACRVAHVKFPNNDRATRPKLAVPAWQSRIERRIGEARALIGKLICFREGNTRPRVMRFVRRAFSGTGISFRDYLARVTERIDFLKQKICAWANRIRRYKRRVERYTQNRTFQSDERWVYRAWERPDQGVTDTHLPDDDAMCSFWRSIWSMPVSHIEGDWTREVEQACDPIPQMGAINISPQDVACAVRPLPNWKSPGPDGLHNFWIKWFQRSHVRLASQFQSALESGSLPQFLTTGITHLLHKSGSTAEPKNYRPITCLPTVYKVLTSILRAKINHHIDSNSIMSASQNGCRNGSRGTKELLLIDMAISQQVRRSRKNLSTCWIDYKKAYDSVPHTWLMRVLELYKVDATLRTFLMSCMGHWRTVLRYPGCRQIQGNSELIRIERGIFQGDSLSPLWFCLALNPLSTLLEGSGLGYRLRRGGQVISHLLYMDDLKLFAPNNLQLMKLLKVTETFSSAIRMEFGVDKCAVMHVKRGEIMESVGTQLSDSIQLRSLSSTDTYKYLGMSEALGINTADMKQSLRERFFGRLNKVLSSLLSGGNKVRAFNGWVMPVLMYSFGILKWTQTELDVLDRRVRALLTANRMHHPRSSVMRLYIPRKCGGRGFLNAKTLHNREVCSLREYFLEADVGMHRDVVSVDRGLTPLSLANENWRKPRVLDTNDRKEVWQGKELHGRFYRALHGPDVDFLASVSWLRFGDLFGETEGFVCAIMDEVMMTNNYRKYIVKDGTVDICRACHRPGESIRHIISGCSRLANGEYLHRHNLVARIIHQQLALKYNLVESEVPYYKYAPDPVLDNGNITLYWDRSIITDRTIVANKPDIVVIDRLERRAMIVDITVPHDENLVKAEKDKQFKYLDLAHEVVDMWDVNTAVIVPIVVSANGLIAKSLDQHLKRLALGSWIKGLIQKAVLLDTARIVRRFLSQEP

SEQ ID NO: 13024 - protein, 1050 aa, Noctua pronuba
MLDDTVLDRLRSESRSNPVTPASPMIAVQLQSVTSTSPRADHGGEEDDNEVISVSTQCNAQLRSALEGAFREYRSTPPELRPRLPRLPMHKKNKALMCALDSQLSNCFDSSKDLADTHSMLYCGAVAACRVAHVKFPNNDRATRPKLAVPAWQCRIERRIGEARALIGKLICFREGNTRPRVMRFVRRAFSGIDISFRDFLARVTERIDFLKQKICAWASRIRRYKRRVERCTQNRTFRSDERWVYRAWERPDQGVTDTRLPDDDAMCSFWRSIWSVPVSHTEGDWIREVERACDPIPQMGAINISPQDVACAVRPLPNWKSPGPDGLHNFWIKWFQRSHARLASQFQSALESGSLPQFLTTGITHLLHKSGSTTEPKNYRPITCLPTVYKVLTSILRAKINHHIDSNSIMSASQNGCRNGSRGTKELLLIDMAISQQVRRSRKDLSTCWIDYKKAYDSVPHTWLMRVLELYKVDATLRTFLMSCMGHWKTVLRYPGCRQIQGNSEPIRIERGIFQGDSLSPLWFCLALNPLSTLLEGSGLGYRLRRGGQVISHLLYMDDLKLFAPNNLQLMKLLKVTETFSSAIRMEFGVDKCAVMHVKRGEIMESVRTQLSDSIYLRSLSSTETYKYLGMSEALGINTADMKQSLRERFFGRLNKVLGSLLSGGNKVRAFNSWVMPVLMYSFGILKWTQTELDALDRRVRALLTANRMHHPRSSVMRLYIPRKCGGRGFLNAKTLHNREICSLREYFLEADVGMHRDVVSVDKGLTPLSLANGNWRKPRVLDTNDRKEVWQGKELHGRFYRALHGPDVDFLASVSWLRFGDLFGETEGFVCAIMDEVMMTNNYRKYIVKDGTVDICRACHRPGESIRHIISGCSRLANGEYLHRHNLVARIIHQQLALKYNLVESEVPYYKYAPDPVLDDGNITLYWDRSIITDRTIVANKPDIVVIDRLERRAMIVDITVPHDENLVKAEKDKQFKYLDLAREVVDMWDVSTAVIVPIVVSANGLIAKSLDQHLRRLALGSWIKGLIQKAVLLDTARIVRRFLSQEP

SEQ ID NO: 13025 - protein, 977 aa, Noctua pronuba
MSPDLRPWLPRLPMNKKNRALVCALDALLPNFIESSANLCDTHSILYCTATAACRVANVKFPNTDSATRPKSAVPVWQCRIERRINEARALIGKLICFREGNTRPRVMRFVRRAFSGTDISPREYMSRVTERIDFLKQKVYAWANRILRYRRRVDRYTQNRMFQSDERWVYRTWERPVTIQGVTDAHLPENDAMSAFWRSIWSVPVGHTEGDWMRVVEKACDSIPEMEAISISPLDVARAVRPLPNWKSPGPDGLHNFWIKWLQRSHACLASQFQSSLETGSLPSFFTTGVTHLLDKSGSTAEPKNYRPITCLPTVYKVLTSILRVKIVRHIDSNSIMSVSQNGCRNGSRGTKELLLIDMAISQQVRRSRRDLSTCWIDYKKAYDSVPHTWLRRVLELYKIDATLRTFLVSCMGQWSTVLLYPGSRQVLGNDEPIRIERGIFQGDSLSPLWFCLALNPLSTLLEDSGLGYRLRRGGQVISHLLYMDDLKIFAPSNLQLMELLKVTETFSSAIRMEFGVDKCAVMHVKRGEIMESVGTQLSDSICLRSLSSTETYKYLGISEALGINAADMKQSLKERFFGRLSKVLKSLLSGGNKVRAFNGWVMPVLMYSYGILKWTQTELDALDRKVRTLLTANRMHHPRSSVMRLYIPRKCGGRGFLNAKTLHNREVCSLREYFLETDVGMHRDVVSVDKGLTPLSLANENWRKPVVLDTNDRKEVWQSKELHGRFFRALHGPDVDLLASVSWLRFGDLFGETEGFVCAIMDEVIMTNNYRKYIVKDGTVDICRACYRPGESIRHIVSGCSRLANGEYLHRHNLVARIIHQQLALQYNLVGTEVPYYKYVPDPVLENGHATLYWDRSIITDRTILANKPDIVVIDRQERRAMIVDITVPHDENLVKAENDKKIKYLDLAHEVVDMWDVDSAIIVPIVVTVNGLIAKSLDQHLRRLSLRGWVKGLIQKAVLLDTARIVRRFLSLEP

SEQ ID NO: 13026 - protein, 1200 aa, Tinea trinotella
MLTRSRARNQSAQLTSSGSSLSSASQPPRSTPTVSPVISVAAVASSSSDECFSPPTTPPSARRRGGGRPPASLEPRGPSASGGVPATSGRVQRMRWTQSINENVMRSYFGATEGGISLTAYRGRMLTLFQVLEPAVNVSAQRLSDQVRVIQRNRMLDDVVLDRLRLESRSSHVSPVSPPVAVQLQPSALPRPNNIEENDDDVTISVSNQYNEQLRSALEDAFREYRSTPPGLRPRIPRLPMHKKNRALVCALDSQLVNHFKSSKDLADTHSILYCAAVAVCRVAHVQFPNNDRAARLAVLAWQCRIERRIGEARALIGKLISFREGNTRPRVMRFVRRAFSGTDISSRDYQTRVTERIDFLKQKIYAWANRIRRYKRRVERYTQNRTFQSNERWVYRAWERPDQDVSDMCLPDDDAMSLFWRNIWSVPVGHTEGEWTREVERACDLIPEMGAIIISPQDVACAVRPLSNWKSPGLDGLHNFWIKYFQRSHARLAAQFQSALELGSLPQFLTTGITHLLHKSGSTAEPKNYRPITCLPTVYKVLTSILRAKIDKHIDTNCIMSASQNGCRSGSRGTKELLLIDVAISQQVRRSRRDLSTCWIDYKKAYDSVPHTWLMRVLELYKVDAALRTFLVSCMGQWRTVLHYPGCRRILGNGEPIKIERGIFQGDSLSPLWFCLALNPLSTLLDGSGQGYRLRRDGQVISHLLYMDDLKLFAPNNLQLMKLLKVTETFSSAISMEFGVDKCAIMHVKRGEIMESVGTQLSDSIHLRSLCSTETYKYLGMSEALGINAVDVKQSLRDRFFGRLNKVLNSLLSGGNKVRAFNGWVMPVLMYSFGILKWTQTELDALDRRVRTLLTANRMHHPRSSVVRLYIPRKCGGRGFLNAKTLHNREVCSLREYFLKTDVGMHRDVVAVDKGLTSLSLANENWRKPVVLDANDRREVWQSKELHGRFYRALHGPDVDFLASVSWLRFGDLFGETEGFVCAIMDEVMMTNNYRKYIVKDGTVDICRACHRPGESIRHIISGCSRLANGDYLHRHNLVARIIHQQLALKYNLVESEVPYYRYVPDPVLENGNITLYWDRSIITDRTIVANKPDIVVIDRLERRTIIVDVAVPHDENLVKAEKDKQIKYLDLAREVVDMWEVDTAIIVPIVVTANGLIAKSLDEHLKRLSLGSWIKRLIQKAVLLDTARIVRRFLSQEP

SEQ ID NO: 13027 - protein, 1170 aa, Tinea trinotella
MPTVSPVISVAAVASSSSDECFSPPTISPSARRRGGGRPPASLEPRGPSASGGVPATSGRVQRMRWTQSINENVMRSYFGATEGGISLTAYRGRMLTLFQVLEPAVNVSAQRLSDQVRVIQRNRMLDDVVLDRLRLESRSSHVSPVSPPVAVQLQPSALPRPNNIEENDDDVTISVNNQYNEQLRSALENAFWEYRSTPPGLRPRIPRLPMHKKNRALVCALDSQLANQFESSKDLADTHSILYCAAVAVCRVAHVKFPNNDRAARLAVPAWQCRIERRISDARALIGKLISFREGNTRPRVMRFVRRAFSGTDISSRDYQTRVTERIDFLKQKIYAWANRIRRYKRQVERYTQNRTFENNERWVYRAWERPDQDVSDTCLPDDDAMSLFWRNIWSVPVGHTEGEWTREVERACDLIPEMGAINISPQDVACAVRPLPNWKSPGLDGLHNFWIKYFQRSHACLAAQFQSALELGSLPQFLTTGITHLLHKSGSTAEPKNYRPITCLPTVYKVLTSILRAKINNHIDANCIMSASQNGCRSGSRGTKELLLIDVAISQQVRRSRRDLSTCWIDYKKAYDSVPHTWLMRVLELYKVDAALRTFLVSCMGQWRTVLHYPGCRRILGNGEPIKIERGIFQGDSLSPLWFCLALNPLSTLLDGSGQGYRLRRDGQVISHLLYMDDLKLFAPNNLQLMKLLKVTETFSSAISMEFGVDKCAIMHVKRGEIMESVGIQFSDSIHLRSLCSTETYKYLGMSETLGINAVDVKQSLRDRFFGRLNKVLNSLLSGGNKVRAFNGWVMPVLMYSFGILKWTQTELDALDRRVRTLLTANRMHHPRSSVMRLYIPRKCGGRGFLNAKTLHNREVCSLREYFLKTDVGMHRDVVAVDKGLTSLSLANENWRKPVVLDANDRREVWQSKELHGRFYRALHGPDVDFLASVSWLRFGDLFGETEGFVCAIMDEVMMTNNYRKYIVKDGTVDICRACHRPGESIRHIISGCSRLANGDYLHRHNLVARIIHQQLALKYNLVESEVPYYRYVPDPVLENGNITLYWDRSIITDRTIVANKPDIVVIDRLERRTIIVDVAVPHDENLVKAEKDKQIKYLDLAREVVDMWEVDAAIIVPIVVTANGLIAKSLDKHLKRLSLGSWIKRLIQKAVLLDTARIVRRFLSQEP

SEQ ID NO: 13028 - protein, 1046 aa, Tinea trinotella
MLDDVVLDRLRLESRSSHVSPVSPPVAVQLQPSALPRPNNIEENDDDVTISVSNQYNEQLRSALEDAFREYRSTPPGLRPRIPRLPMHKKNRALVCALDSQLVNHFKSSKDLADTHSILYCAAVAVCRVAHVKFPNNDRAARLAVPAWQCRIERRIGEARALIGKLISFREGNTRPRVMRFVRRAFSGTDISSRDYQTRVTERIDFLKQKIYAWANRIRRYKRRVERYTQNSTFQSNERWVYRAWERPDQDVSDMCLPDDDAMSLFWRNIWSVPVGHTEGEWTREVERACDFIPEMGAIIISPQDVACAVRPLSNWKSPGLDGLHNFWIKCFQRSHARLAAQFQSALELGSLPQFLTTGITHLLHKSGSTAEPKNYRPITCLPTVYKVLTSILRAKIDKHIDTNCIMSASQNGCRSGSRGTKELLLIDVAISQQVRRSRRDLSTCWIDYKKAYDSVPHTWLMRVLELYKVDAALRTFLVSCMGQWRTVLHYPGCRRILGNGEPIKIERGIFQGDSLSPLWFCLALNPLSTLLDGSGQGYRLRRDGQVISHLLYMDDLKLFAPNNLQLMKLLKVTETFSSAISMEFGVDKCAIMHVKRGEIMESVGTQLSDSIHLRSLCSTETYKYLGMSEALGINAVDVKQSLRDRFFGRLNKVLNSLLSGGNKVRAFNGWVMPVLMYSFGILKWTQTELDALDRRVRTLLTANRMHHPRSSVMRLYIPRKCGGRGFLNAKTLHNREVCSLREYFLKTDVGMHRDVVAVDKGLTSLSLANENWRKPVVLDANDRREVWQSKELHGRFYRALHGPDVDFLASVSWLRFGDLFGETEGFVCAIMDEVMMTNDYRKNIVKDGTVDICRACHRPGKSIRHIISGCSRLANGDYLHRHNLVARIIHQQLALKYNLVESEVPYYRYVPDPVLENGNITLYWDRSIITDRTIVANKPDIVVIDRLERRTIIVDVAVPHDENLVKAEKDKQIKYFDLAREVVDMWEVDTAIIVPIVVTANGLIAKSLDEHLKRLSLGSWIKRLIQKAVLLDTARIVRRFLSQEP

SEQ ID NO: 13029 - protein, 1200 aa, Ochropleura plecta
MKMITRSAARRDARLPPPGPSLSSASPPPEPSLVVSAVTSAVAVASSSSDEYFSPPTTPPPARRRGGRRPPDGLGLRGPPASDRVPAPGGSVQRMRWTSSINENVMRSYYGATEGGNNLTAYRVRMLSLFQVLEPAVNVSAQRLSDQVRVIQRNRMLDDTVLDRLRTEMQSSQVITSSSQAVVPPQSHQLVSRADEVSNDMATNVSTQCSEEMRSALEGAIREYRYMSPELRPRLPRLPMHNKNRALVAVLDSQLSNYFDNCENLTDAHSILYCAAVAACRVAHVKFPDDGATRPKPAVPFWQCRIERRIGVARALIGKLICFKEGNTRPRVMRFVRRAFAGTDISPPDYMSRITERIDFLKQKVYAWANRIRRYKRRVERYTLNRTFQSDERWVYRAWERPDQGVSDTHLPDDDAMCLFWRSIWSVPVSHTEGEWTREVERACDPIPEMGALTISPQDVACAVRPLPNWKSPGPDGLHNFWIKWIQRSHVRLAALFQSALESGSLPKFLTTGITHLLHKSGSTAEPKNYRPITCLPTLYKVLTSILRAKITKHIDDNSIMSASQNGCRNGSRGTKELLLIDMAISQQVRRSRRHLSTCWIDYKKAYDSVPHTWLMRVLDLYKIDATLRTFLISCMRQWSTVLRYPGCRQIQRNSEPIRIERGIFQGDSLSPLWFCLALNPLSTLLENSGLGYRLKRGGQVISHLLYMDDLKLFAPNDLQLMELLKVTETFSSAIRMEFGVDKCAVMHVKRGEIVESVGTQLSDSINLRSLSATETYKYLGMSEALGINVADMKQLLKERFFGRLRKVFNSLLSGGNKVRAFNGWVMPVLMYSFGILKWTQTELDALDRKVRTLLTAFRMHHPRSSVMRLYIPRSCGGRGFLNAKTLHNREICSLREYFLETDVGMHRDVVAVDKGLTPLSLAKENWRKPVVLDTNDRREVWQSKELHGRFFRALHGPDVDQSASVAWLRSGDLFGETEGFVCAIMDEVMMTNNYRRFIVKDGTVDICRACHRPGESIRHIISGCSRLANGEYLHRHNLVARIIHQQLALKYNLVEAEVPYYRYEPDPVLEHGYITLYWDRSIITDRTVVANKPDIVVVDRSERRAMIVDITVPHDENLVKAEKDKQIKYIDLAREVVDMWDVDSAIIVPIVVSANGLIAKSLDQYLRRLSLGSWIKGLIQKAVLLDTARIVRRFLSLEP

SEQ ID NO: 13030 - protein, 1106 aa, Hecatera dysodea
MRWTQTINENVMRSYYGATEGGNNLTAYRGRMLSLFQVLEPAVNVSAQRLSDQVRVILRNRMLDDSVLDRLRMEICSSHVITPSPQTVAQPQLIQIPSHADEESDDRVTNVSTQCNEELRSALESAIREFRYVSPELRPRIPRLPMHNKNRALVAALDSQLSNYFDNCEDLTDAHSIMYCAAVAACRVAHVKMPNDRVTRPKPAIPAWQCRIERRIGGARALIGKLICFREGNTRPRVMRFVRRAFSGTEISPLDYLSRVTERIDFLKQKVYAWANRIRRYKRRVERYTQNRTFRSNERWVYKAWERPDQDVTDTRPPDDDAMCSFWRNIWSAPVSHTEGDWIREVERACDPLPDMGAIIISPQDVARAVRPLPNWKSPGPDGLHNFWIKWLHSSHACLASRYQESLESGSLPEFLMTGITHLLHKSGSTAEPKNYRPITCLPTVYKVLTSILRDKINQHINSNNIMSASQNGCRNGSRGTKELLLIDIAISQQVRRSRKDLSTCWIDYKKAYDSVPHTWLLRVLELYKIDATLRTFLMSCMGHWRTVLRYPGCRHVQGNSEPIRIERGIFQGDSLSPLWFCLALNPLSTLLGNSGLGYRLKRGGQVISHLLYMDDLKLFAPTNLQLMELLKVTETFSNAIRMEFGVDKCAIMHVKRGEIMESVGTQLSDSINLRCLSSTETYKYLGMSEALGINVTDMKQSLKERFFGRLKKVLNSLLSGGNKVRAFNGWVMPVLMYSFGVLKWTQTELDALDRRVRTLLTTYRMHHPRSSVMRLYIPRKCGGRGFLNAKTLHNREICSLREYFLAAEVGMHRDVVAVDKGLTPLSLANENWRKPAVLDTNDRRAVWQSKELHGRFFRALHGPDVDQLASVAWLRFGDLFGETEGFVCAIMDEVIMTNNYRRFIVKDGTVDICRACHRPGESIRHIVSGCSRLANGEYLHRHNLVARIIHQQLALKYSLVNSEVPYYRYVPDPVLDSGNITLYWDRSIITDRTIVANKPDIVVVDRIERRTMIVDITVPHDENLVKAEKDKQIKYLDLAREVVDMWDVDSAIIVPIVVSANGLIAKSLDQHLRRLSLGSWIKGLIQKAVLLDTARIVRRFLSLEP

SEQ ID NO: 13031 - protein, 923 aa, Hecatera dysodea
MNKGNNNNNNIINSDRVARPAVPAWQCRIERRIGEARALIGKLICFREGNTRRRVMRFVRRAFSGTDISPRDYLTRVTERIDFLKQKVYAWANRIRRYKRRVERYTQNRTFQGNERWVYRAWERPDQGVTDTRLPDDEAMLSFWRNIWSVPVSHTEGDWTREVERACDPIPEMGAINISPQDVARAVRPLPNWKSPGPDGLHNFWIKWFKGSHARLASQFQSALGSGSLPKFLTTGITHLLHKSGSTAEPKNYRPITCLPTVYKVLTSILRAKINNHIDSNSIMSASQNGCRNGSRGTKELLLIDVAISQQVRRSRRDLSTCWIDYKKAYDSVPHTWLMRVLELYKVDAVLRTFLMSCMGQWSTVLHYPGCRQTQANSEPIRIERGIFQGDSLSPLWFCLALNPLSTLLEGSGQGYRLRRGGQVISHLLYMDDLKLFAPNNLQLMKLLKVTETFSSDISMEFGVDKCAVMHVKRGEIMESVGTQLSDSILLRSLCSTETYKYLGMSEALGINATGVKQSLKERFFGRLNKVLNSLLSGGNKVRAFNGWVMPVLMYSFGILKWTQTELDALDRRVRSLLTANRMHHPRSSVMRLYIPRKCGGRGFLNAKTLHNREICSLREYFLEADVGMHRDVVAVDKGLTPLSLANENWRKPVVLDTNDRRVVWQSKELHGRFYRVLHGPDVDFLASVAWLRFGDLFGETEGFICAITDEVMMTNNYRKYIVKDGTVDICRACHRPGESIRHIISGCSSLANGDYLHRHNLVARIIHQQLALKYNLVESEVPYYRYAPDPVLENGNCTLYWDRSIITDRTIVANKPDIVVIDRLERRAMIVDIAVPHDENLVKAEKDKQSKYLDLAREVVDMWNVNTAVIVPIVVTANGIIAKSLDQHLKRLSLGSWIKGLIQKAVLLDTARIVRRFLSREP

SEQ ID NO: 13032 - protein, 1046 aa, Hecatera dysodea
MLDDAVLDRLRLESRNSRVSPASPPAAVQIQPSISPRPDHVSEDVDDGTISVSTQCNERLRSALEDAFREYRSTPPELRPRLPRLPMHNKNRALVCALDSQLSIYFDSSENLTDTHSILYCGAAAACRVAHVKFPNSDRVAQPAVPAWQCRIERRIGEARALIGKLICFREGNTRRRVMRFVRRAFSGTDISPRDYLTRVTERIDFLKQKVYAWANRIRRYKRRVERYTQNRTFQGNERWVYRAWERPDQGVTDTRLPDDEAMLSFWRNIWSVPVSHTEGDWTREVERACDPIPEMGAINISPQDVARAVRPLPNWKSPGPDGLHNFWIKWFKGSHARLASQFQSALGSGSLPKFLTTRITHLLHKSGSTAEPKNYRPITCLPTVYKVLTSILRAKINNHIDSNSIMSASQNGCRNGSRGTKELLLIDVAISQQVRRSRRDLSTCWIDYKKAYDSVPHTWLMRVLELYKVDAVLRTFLMSCMGQWSTVLHYPGCRQTQANSEPIRIERGIFQGDSLSPLWFCLALNPLSTLLEGSGQGYRLRRGGQVISHLLYMDDLKLFAPNNLQLMKLLKVTETFSSDISMEFGVDKCAVMHVKRGEIMESVGTQLSDSILLRSLCSTETYKYLGMSEALGINATGVKQSLKERFFGRLNKVLNSLLSGGNKVRAFNGWVMPVLMYSFGILKWTQTELDALDRRVRSLLTANRMHHPRSSVMRLYIPRKCGGRGFLNAKTLHNREVCSLREYFLEADVGMHRDVVAVDKGLTPLSLANENWRKPVVLDTNDRRVVWQSMELHGRFYRVLHGPDVDFLASVAWLRFGDLFGETEGFICAITDEVMMTNNYRKYIVKDGTVDICRACHRPGESIRHIISGCSSLANGDYLHRHNLVARIIHQQLALKYNLVESEVPYYRYAPDPVLENGNCTLYWDRSIITDRTIVANKPDIVVIDRLERRAMIVDIAVPHDENLVKAEKDKQSKYLDLAREVVDMWNVNTAVIVPIVVTANGIIAKSLDQHLKRLSLGSWIKGLIQKAVLLDTARIVRRFLSREP

SEQ ID NO: 13033 - protein, 1200 aa, Mythimna impura
MLTRAAARRARPPPPASSLSSASPPPESSPTVSAVTPAVAVASSSSDEYFSPPTSPPPARRRRGRRPPSGLGPRGPPVSDRVPAPGGSVQRMRWTQSINENVMRAYYGATEGGNNLTAYRVRMLSLFQVLEPAVNVSAQRLSDQVRVIQRNHMLDDTVLDRLRTEMSNHAIAPSSQSVVPVMVPPSYHLSDHADEAITDMVTHVSTQCNNELRSALECAIREYRNMPLELRPRLPRLPMHNKNKALVAALDLQLSNYFDDCKDLTDTHSIMYCAAVAACRVAHVKFPNCDVATRPKPAVPAWQCRIERRIGGARALIGKLICFREGNTRPRVMRFVRRAFSGTDISPRDYMSRVTERIDFLKQKVYAWANRIRRYKRRVERYTQNRTFRSNERWVYRAWERPDQGVTDACLPDDDAMSSFWRSIWSVPVSHTEGDWTREVERACDPIPQMGAIDISPQDVARAVRPLPNWKSPGPDGLHNFWIKWFTRSHARLAYQFQSALESGSLPQFLTTGITHLLHKSGSTAEPKNYRPITCLPTVYKVLTSILRSKINSHIDKNLIMSPSQNGCRNGSRGTKELLLIDMTISQQVRRSRKDLSTCWIDYKKAYDSVPHTWLMRVLELYKIDTTLRTFLMSCMRQWSTVLRYPGCRHTQRNSEPVRIERGIFQGDSLSPLWFCLALNPLSTLLENSGLGYRLKRGGQVISHLLYMDDLKLFAPNNLQLMELLKVTETFSSAIRMEFGVDKCAVMHVKRGEVVESVGTQLTDSINLRSLSPTETYKYLGMSEALGINITDMKQSLKERFFGRLKKVLNSLLSGGNKVRAFNGWVMPVLMYSFGVLKWTQTELDALDRRVRTLLTAYRMHHPRSSVMRLYIPRKCGGRGFLNAKTLHNREVCSLREYFLAADVGMHRDVVAVDKGLTPLSLANENWRKPVVLDTNDRREVWQSKELHGRFFRALHGPDVDQLASVTWLRFGDLFGETEGFVCAIMDEVIMTNNYRRFIVKDGTVDICRACHRPGESIRHIISGCSRLANGEYLHRHNLVARIIHQQLALKYSLVESEVPYYRYEPDPVLDNGHITLYWDRSIITDRTIVANKPDIVVVDRSERRAMIVDISVPHDENLVKAEKDKQIKYIDLAHEVVDMWDVDSAIIVPIVVSANGLIAKSLDQHLRRLALGGWIKGLIQKVVLLDTARIVRRFLSLEP

SEQ ID NO: 13034 - protein, 992 aa, Mythimna impura
MEYLLNNNNNNIREYRNMPLELRPRLPRLPMHNKNKALVAALDLQLSNYFDDCKDLTDTHSIMYCAAVAACRLAHVKFPNCDVATRPKPAVPAWQCRIERRIGGARALIGKLICFREGNTRPRVMRFVRRAFSGTDISPRDYMSRVTERIDFLKQKVYAWANRIRRYKRRVDRYTQNRTFRSNERWVYRAWERPDQGVTDACLPDDDAMSSFWRSIWSVPVSHTEGDWTREVERACDPIPQMGAIDISPQDVARAVRPLPNWKSPGPDGLHNFWIKWFTRSHARLAYQFQSALESGSLPQFLTTGITHLLHKSGSTAEPKNYRPITCLPTVYKVLTSILRSKINSHIDKNLIMSPSQNGCRNGSRGTKELLLIDMTISQQVRRSRKDLSTCWIDYKKAYDSVPHTWLMRVLELYKIDTTLRTFLMSCMRQWSTVLRYPGCRHTQRNSEPVRIERGIFQGDSLSPLWFCLALNPLSTLLENSGLGYRLKRGGQVISHLLYMDDLKLFAPNNLQLMELLKVTETFSSAIRMEFGVDKCAVMHVKRGEVVESVGTQLTDFINLRSLSPTETYKYLGMSEALGINITDMKQSLKERFFGRLKKVFNSLLSGGNKVRAFNGWVMPVLMYSFGVLKWTQTELDALDRKVRTLLTAYRMHHPRSSVMRLYIPRKCGGRGFLNAKTLHNREVCSLREYFLAADVGMHRDVVTVDKGLTPLSLANENWRKPVVLDTNDRREVWQSKELHGRFFRALHGPDVDQLASVAWLRSGDLFGETEGFVCAIMDEVIMTNNYRRFIVKDGTVDICRACHRPGESIRHIISGCSRLANGEYLHRHNLVARIIHQQLALKYSLVESEVPYYRYEPDPVLDNGHITLYWDRSIITDRTIVANKPDIVVVDRSERRAMIVDISVPHDENLVKAEKDKQIKYIDLAREVVDMWDVDSAIIVPIVVSGNGLIAKSLDQHLRRLALGDWIKGLIQKAVLLDTARIVRRFLSLEP

SEQ ID NO: 13035 - protein, 1200 aa, Mythimna impura
MLTRSRAQKLHTHPTSSGSSLSSASQPPGPAPTVSPEIPVAAVASSSSDEYFSPPTTPPPARRRGRGRPPASLGPRGPPASDRVPAAGGSVQRMRWTSSINENVMRSYFGATEGGINLTAYRGRMLSLFQVLEPAVNVSAQRLSDQVRVIQRNRMLDDAVLDRLRLESQSSRVSPATTPAAVQRLPTASPRPDQVGDADDDAAISVSTQCNDRLRGALEDAFREYRSTPPGLRPRLPRLPMHKRNRALVCALDSQLSNCFDSSKDLTDTHSILYCAAVAACRVAHVKFPNCDRATRPAVPAWQCRIEHRIGEARALIGKLICFREGNTRPRVMRFVRRAFSGTNISSRDYLPCVTERIDFLKQKIYAWANRIRRYKRRVERYTWNRTFQSNERWVYRDWERPDQGVTDTRLPDDDAMCSFWRSIWSAPVSHTEGDWIREVERACDLLPEMGAITISPQDIARAVRPLPNWKSPGPDGLHNFWVKWFQRSHARLASQFQSALESGSLPQFLTTGITHLLHKSGSTAEPKNYRPITCLPTVYKVLTSILRAKINSHIETNSIMSASQNGCRNGSRGTKELLLIDIAISQQVRRSRKNLSACWIDYKKAYDSVPHTWLMRVLELYKVDATLRTFLKSCMGQWRTVLHYPGCRQIQENNEPIRIERGIFQGDSLSPLWFCLALNPLSTLLEGSGLGYRLKRGGQVISHLLYMDDLKLFAPNNLQLVELLKVTETFSSAIRMEFGLDKCAVIHVKRGEIMESVGIQLSDSIHLRSLCSTETYKYLGMSESLGINTDDVKQSLKERFFGRLNKVLNSLLSGGNKVRAFNGWVMPVLMYSFGILKWTQTELDALDRRVRTLLTANRMHHPRSSVMRLYIPRKCGGRGFLNAKTLHNREVCSLREYFLKTDVGMHRDVVAVDKGLTPLSLANENWRKPIVLDTNDRREVWQSKELHGRFYRALHGPDVDLLASVSWLRFGDLFGETEGFVFAIMDEVMMTNNYRKYIVKDGTVDICRACHRPGESIRHIISGCSHLANGDYLHRHNLVARIIHQQLALKYNLVESEVPYYRYVPDPVLDNGNITLYWDRSIITDRTIVANKPDIVVIDRLERRTMIVDIAVPHDENLVKAEKDKQTKYLDLAREVVDMWEVDRAIIVPIVVTANGLIAKSLEQHLRRLSLGSWIKGLIQKAVLLDTARIVRRFLSQEP

SEQ ID NO: 13036 - protein, 1198 aa, Mythimna impura
MLTRAAARRARLPPPASSLSSASPPPEPSPTVSAVTPAVAVASSSSDEYFSPPTSPPPARRRRGRRPPSGLGPRGPPASDRVPAPGGSVQRMRWTQSINENVMRAYYGATEGGNNLTAYRVRMLSLFQVLEPAVNVSAQRLSDQVRVIQRNHMLDDTVLDRLRTEMSNHTIAPSSQSVVPVMVPPSYHLSGHVDEEITDMVTHVSTQCNNELRSALECAIREYRNMPLELRPRLPRLPMHNKNKALVAALDLQLSNYFDDCKDLTDTHSIMYCAAVAACRLAHVKFPNCDVATRPKPAVPAWQCRIERRIGGARALIGKLICFREGNTRPRVMRFVRRAFSGTDISPRDYMSRVTERIDFLKQKVYAWANRIRRYKRRVDRYTQNRTFRSNERWVYRAWERPDQGVTDACLPDDDAMSSFWRSIWSVPVSHTEGDWTREVERACDPIPQMGAIDISPQDVARAVRPLPNWKSPGPDGLHNFWIKWFTRSHARLAYQFQSALESGSLPQFLTTGITHLLHKSGSTAEPKNYRPITCLPTVYKVLTSILRSKINSHIDKNLIMSPSQNGCRNGSRGTKELLLIDMTISQQVRRSRKDLSTCWIDYKKAYDSVPHTWLMRVLELYKIDTTLRTFLMSCMRQWSTVLRYPGCRHTQRNSEPVRIERGIFQGDSLSPLWFCLALNPLSTLLENSGLGYRLKRGGQVISHLLYMDDLKLFAPNNLQLMELLKVTETFSSAIRMEFGVDKCAVMHVKRGEVVESVGTQLTDFINLRSLSPTETYKYLGMSEALGINITDMKQTLKERFFGRLKKVFNSLLSGGNKVRAFNGWVMPVLMYSFGVLKWTQTELDALDRKVRTLLTAYRMHHPRSSVMRLYIPRKCGGRGFLNAKTLHNREVCSLREYFLAADVGMHRDVVTVDKGLTPLSLANENWRKPVVLDTNDRREVWQSKELHGRFFRALHGPDVDQLASVAWLRSGDLFGETEGFVCAIMDEVIMTNNYRRFIVKDGTVDICRACHRPGESIRHIISGCSRLANGEYLHRHNLVARIIHQQLALKYSLVESEVPYYRYEPDPVNGHITLYWDRSIITDRTIVANKPDIVVVDRSERRAMIVDISVPHDENLVKAEKDKQIKYIDLAREVVDMWDVDSAIIVPIVVSGNGLIAKSLDQHLRRLALGDWIKGLIQKAVLLDTARIVRRFLSLEP

SEQ ID NO: 13037 - protein, 1112 aa, Mythimna impura
MRWTQSMNENVMRAYYGSTEGGTSLTAYRDRMLSLFQDLEPTVNVSAQRLSDQVRFIQRNHRLDDAALDRLRSEVLSNQIVSTSIQTQTAATPTTNAISPRSILNNDDADERVVTVSSQCNDELRSALEDALREYRLTPTELRPRLPRLPMHKKNRALVCTLDSLLKNIFESSENLVDTHSILYCGAVAACRLANIKFPNTDGTIRPKPAVPAWQYRIERRIDGARVLIGKLHSFREGNTRPRVMRFVRRAFLGTSISPQEYMSRVTERIDFLKQKVCAWASRIRRYKRRVDRYSQNRIFQSDERWVYRAWERPEQNVIDGLRPDDFATITFWRNIWSVPVSHTEGGWIREVERVCEAIPEMEKITISPADVAKAVRPLPNWKSPGPDGLQNFWLKWYRNSHAPLASQFQSTLESGSLPEYLTTGVTHLLHKTGNPAEPKNYRPITCLSTVYKLLTSILREKINRHIENNSIMSASQNGCRNGSRGTKELLLIDMAVSQQARRSRKDLSTCWIDYKKAYDSVPHTWLMRVLELYKIDTTLRTFLESCMRQWKTVLRYPGCRPIQGDDEPIRIKRGIFQGDSLSPLWFCLALNPLSTLLEDSGLGYRLRRGGQAISHLLYMDDLKLFAPSNLQLMELLKVTETFSSAIRMEFGVDKCAAMHVKQGEIMESEGIQLPDSIHLKSLSSTETYRYLGMSEALGINNADMKQSLKERFFGRLKKVLNSLLSGGNKVRAFNGWVMPVLMYSFGILKWTQTELDALDRRVRTLLTANRMHHPRSSVMRLYISRKCGGRGFLNAKTLHNREVCSLREYFLKTDVGMHRDVVAVDKGLTPLSMAKEDWRKPVVLTTDDRKEVWKGKELHGRFYRALHEPDVDFLASVAWLRFSDLFGETEGFVCAIMDEVILTNNYRKYIMKDGTVDVCRACHRPGESIRHIISGCSRLANGEYLHRHNQVARIIHQQLALKYNLVDSEVPYYKYVPDPVLENDHVTLYWDRSIITDRTIVANKPDIVVIDRLARRAIIVDVTIPHDENLVKAEKEKQIKYLDLAHEVVGMWNMDSAVIVPIVVTANGLIAKSFDDHLSKLSLRGWIKGLIQKAVLLDTARIVRRFLSLEP

SEQ ID NO: 13038 - protein, 1085 aa, Mythimna impura
MTAYRVRMLSLFQVLEPAVNVSAQRLSDRVRVIQRNHMLDDTVLDRLRTEMSNHAIAPSSQSVVPVMVPPSYHLSGHVDEEITDMVTHVSTQCNNELRSALECAIREYRNMPLELRPRLPRLPMHNKYKALVAALDLQLSNYFDDCKDLTDTHSIMYCAAVAACRLAHVKFPNCDVATRPKPAVPAWQCRIERRIGGARALIGKLICFREGNTRPRVMRFVRRAFSGTDISPRDYMSRVTERIDFLKQKVYAWANRIRRYKRRVDRYTQSRTFRSNERWVYRDWERPDQGVTDACLPDDDAMSSFWRSIWSVPVSHTEGDWTRGVERACDPIPQMGAIDISPQDVARAVRPLPNWKSPGPDGLHNFWIKWFTRSHARLAYQFQSALESGSLPQFLTTGITHLLHKSGCTAEPKNYRPITCLPTVYKVLTSILRSKINSHIDKNLIMSPSQNGCGNGSRGTKELFLIDMTISQQVRRSRKDLSTCWIDYKKAYDSVPHTWLMRVLELYKIDTTLRTFLMSCMRQWSTVLRYPGCRHTQRNSEPVRIERGIFQGDSLSPLWFCLALNPLSTLLENSGLGYRLKRGGQVISHLLYMDDLKFFAPNNLQLMELLKVTETFSSAIRMEFGVDKCAVMHVKRGEVVESVGTQLTDFINLRSLSPTETYKYLGMSEALGINITDMKQSLKERFFGRLKKVFNSLLSGGNKVRAFNGWVMPVLMYSFGVLKWTQTELDALDRKVRTLLTAYRMHHPRSSVMRLYIPRKCGGRGFLNAKTLHNREVCSLREYFLAADVGMHRDVVTVDKGLTPLSLANENWRKPVVLDTNDRREVWQSKELHGRFFRALHGPDVDQLGSVAWLRSGDLFGETEGFVCAIMDEVIMTNNYRRFIVKDGTVDICRACHRPGESIRHIISGCSRLANGEYLHRHNLVARIIHQQLALKYSLVESEVPYYRYEPDPVLDNVHITLYWDRSIITDRTIVANKPDIVVVDRSERRAMIVDISVPHDENLVKAEKDKQIKYIDLAREVVDMWDVDSAIIVPIVVSGNGLIAKSLDQHLRRLALGDWIKGLIQKAVLLDTARIVRRFLSLEP

SEQ ID NO: 13039 - protein, 1107 aa, Mythimna impura
MRWTQSINENVMRSYFGATEGGSNLTAYRGRMLSLFQMLEPAVNVSAQRLSDQVRVIQHNRMLDDAVLDRLRLESRSSRVSPASPQAAVQLQSNVSLQPDHVEEDDDDGAISVSNQCNVRLRSALEDAFREYRFTPAELRPRLPCLPMHKKNRALVCALDSQLSNCFDSSEDLTDTHSILYCAAVAACRVARVKFPNSDRVTRPAVPAWQCRIERRIGEARALIGKLICFREGNTRPRVMRFVRRAFSGTNISPRDYLPHITERIDFLKQKVYAWANRIRRYKRRVERYTQNRTFQRNERWVYRAWERPDQGVIDTRLPDDDAMCSFWRSIWSVPVSHTEGDWTREIERTCDLIPEMGPINISPQDVARAVRPLPNWKSPGPDGLHNFWLKWFQRSHARLASQFQSALESGSLPQFLTTGITHLLHKSGSTAEPKNYRPITCLPTVYKVLTSILRAKINSHIETNSIMSASQNGCRNGSRGTKELLLIDVAISQQVRRSRRDLSTCWIDYKKAYDSVPHTWLMRVLELYKVDATLRTFLMSCMRQWRTALHYPGCRQIRESSEPIRIERGIFQGDSLSPLWFCLALNPLSTLLEGSGLGYRLRRGGQVISHRLYMDDLKLFASNNLQLMELLKVTETFSSAIRMEFGLDKCAVMHVKRGEIMESVGTQLSDSIYIRSLCSTETYKYLGMSEALGINAADMKQSLRERFFGRLNKVLNSLLSGGNKVRAFNGWVMPVLMYSFGILKWTQTELDALDRRVRSLLTANQMHHPRSSVMRLYIPRKCGGRGFLNAKTLHNREICSLREYFLKTDVGMHRDVVAVDKGLTPLSLVNENWRKLTVMDTNERRAVWQGKELHGRFYRALHGPDVDLLASVSWLRFGDLFGETEGFVFAIMDEVMMTNNYRKYIVKDGTVDICRACHRPGESIRHIISGCSHLANGDYLHRHNLVAGIIHQQLALKYNLVESEVPYYRYVPDPVLENGSVTLYWDRSIITDRTIVANKPDIVVIDRLERRTMIVDIAVPHDENLVKAEKDKQTKYLNLAREVVDMWEVDRAVIVPIVVTANGLIAKSLEQHLRRLSLGSWIKGLIQKAVLLDTARIVRRFLSQEP

SEQ ID NO: 13040 - protein, 1200 aa, Mythimna impura
MLTRAAARRARPPPPDPSLSSASPPPEPSPIVSAVTSAAAVASSSSDEYFSPPTTPPPARRRGGRRPPSGLGPRGPPASDRVPAPGGSVQRMRWTRSINENVMRSYYGATEGGNNLTAYRVRMLSLFQVLEPAVNVSAQRLSDQVRVIQRNHMLDDTVLDRLRTEMGSHAIAPSSQTVVPSQVSPSNHLPNHADEESTDMVTHVSTQCSNELRSALECAIREYRNMPLELRPRLPRLPMCNKNKALVAALDSQLSNYFDDCEDLTDTHSIMYCAAVAACRVAHVKFPNSDVATRPKPAVPAWQCRIERRIGGAGALIGKLICFREGNTRPRVMRFVRRAFSGTDISPRDYMSCVTERIDFLKQKVYAWANRIRRYKRRVERYTQNRTFRSNERWVYRAWEQPDQGVADTRLPDDDVMSSFWRNIWSVPVSHTEGGWTREVERACEPIPEMGAITISPQDVARAVRPLPNWKSPGPDGLHNFWIKWLQRSHARLASQYQTALESGSLPEFLTTGVTHLLHKSGSTAEPKNYRPITCLPTVYKVLTSILRAKINHHVDNNAIMSASQNGCRNGSRGTKELLLIDMAISQQVRRSRKDLSTCWIDYKKAYDSVPHTWLMRVLELYKIDATLRTFLMSCMRQWRTVLRYPGCRHIQRNSEPVRIERGIFQGDSLSPLWFCLALNPLSTLLENSGLGYRLKRGGQVISHLLYMDDLKLFAPNNLQLMELLKVTETFSSAIRMEFGVDKCAVMHVKRGEIVESVGTQLSDSINLRSLSPTETYKYLGMSEALGINATDMKQTLRERFFGRLKKVFNSLLSGGNRVRAFNGWVMPVLMYSFGVLKWTQTELDALDRRVRTLLTAYRMHHPRSSVMRLYIPRKCGGRGFLNAKTLHNREVCSLREYFLTADVGMHRDVVAVDKGLTPLSLANESWRKPLVLDTNDRREVWQSKELHGRFFRALHGPDVDQLASVAWLRVGDLFGETEGFVCAIMDEVIMTNNYRRFIVKDGTVDICRACHRPGESIRHIISGCSRLANGEYLHRHNLVARIIHQQLALNYSLVESEVPYYRYVPDPVLDNGDITLYWDRSIITDRTIVANKPDIVVVDRRERRTMIVDISVPHDENLVKAEKDKQIKYIDLAREVVDMWDVDSAIIVPIVVSANGLIAKSLDQHLRRLALGGWIKGLIQKAVLLDTARIVRRFLSLEP

SEQ ID NO: 13041 - protein, 1200 aa, Mythimna impura
MLTRSRAKKANTHPTSSGSSLSSASQPPGPAPTVSPEIPVAAVASSSSDEYFSPPTTPPPARRRGRGRPPASLGSRGPPASDRVLAAGGSVQRMRWTQSINENVMRSYFGATEGGSNLTAYRGRMLSLFQVLEPAVNVSAQRLSDQVRVIQRNRMLDDAVPDRLRLESRSSRVSPASPQAAVQLQSNVSLRPDHVGEDDDDGAISVSNQCNVRLRSALEDAFREYRFTPAELRPRLPRLPMHKKNRALVCALDSQLSNCFDSSEDLTDTHSILYCAAVAACRVARVKFPNSDRVTRPAVPAWQCRIERRIGEARALIGKLICFREGNTRPRVMRFVRRAFSGTDISPRDYLPHITERIDFLKQKVYAWANRIRRYKRRVERYTQNRTFQRNERWVYRAWERPDQGVIDTRLPDDDAMCSFWRSIWSVPVSHTEGDWIREIERTCDLIPEMGAITISPQDVARAVRPLPNWKSPGPDGLHNFWLKWFQRSHARLASQFQSALESGSLPQFLTTGITHLLHKSGSTAEPKNYRPITCLPTVYKVLTSILRAKINSHIETNSIMSASQNGCRNGSRGTKELLLIDVAISQQVRRSRRDLSTCWIDYKKAYDSVPHTWLMRVLELYKVDATLRTFLMSCMRQWRTALHYPGCRQTRESSEPIRIERGIFQGDSLSPLWFCLALNPLSTLLEGSGLGYRLRRGGHVISHLLYMDDLKLFASNNLQLMELLKVTETFSSAIRMEFGLDKCAVMHVKRGEIMESVGTQLSDSIYIRSLCSTETYKYLGMSEALGINAADMKQSLRERFFGRLNKVLNSLLSGGNKVRAFNGWVMPVLMYSFGILKWTQTELDALDRRVRSLLTANRMHHPRSSVMRLYIPRKCGGRGFLNAKTLHNREICSLREYFLKTDVGMHRDVVAVDKGLTPLSLVNENWRKPTVMDTNERRAVWQGKELHGRFYRALHGPDVDLLASVSWLRFGDLFGETEGFVFAIMDEVMMTNNYRKYIVKDGTVDICRACHRPGESIRHIISGCSHLANGDYLHRHNLVARIIHQQLALKYNLVESEVPYYRYVPDPVLENGGVTLYWDRSIITDRTIVANKPDIVVIDRLERRTMIVDIAVPHDENLVKAEKDKQTKYLDLAREVVDMWEVDRAIIVPIVVTANGLIAKSLEQHLRRLSLGSWIKGLIQKAVLLDTARIVRRFLSQEP

SEQ ID NO: 13042 - protein, 962 aa, Mythimna impura
MHKKNRALVCTLDSLLKNIFESSENLVDTHSILYCGAVAACRLANIKFPNTDGTIRPKPAVPAWQHRIERRIDGARVLIGKLHSFREGNTRPRVMRFVRRAFLGTSISPQEYMSRVTERIDFLKQKVCAWASRIRRYKRRVDRYSQNRIFQSDERWVYRAWERPEQNVIDGLRPDDFATITFWRNIWSVPVSHTEGGWIREVERVCEAIPEMEKITISPADVAKAVRPLPNWKSPGPDGLQNFWLKWYRNSHAPLASQFQSTLESGSLPEYLTTGVTHLLHKTGNPAEPKNYRPITCLSTVYKLLTSILREKINRHIENNSIMSASQNGCRNGSRGTKELLLIDMAVSQQARRSRKDLSTCWIDYKKAYDSVPHTWLMRVLELYKIDTTLRTFLESCMRQWKTVLRYPGCRPIQGDDEPIRIKRGIFQGDSLSPLWFCLALNPLSTLLEDSGLGYRLRRGGQAISHLLYMDDLKLFAPSNLQLMELLKVTETFSSAIRMEFGVDKCAAMHVKQGEIMESEGIQLPDSIHLKSLSSTETYRYLGMSEALGINNADMKQSLKERFFGRLKKVLNSLLSGGNKVRAFNGWVMPVLMYSFGILKWTQTELDALDRRVRTLLTANRMHHPRSSVMRLYISRKCGGRGFLNAKTLHNREVCSLREYFLKTDVGMHRDVVAVDKGLTPLSMAKEDWRKPVVLTTDDRKEVWKGKELHGRFYRALHEPDVDFLASVAWLRFSDLFGETEGFVCAIMDEVILTNNYRKYIMKDGTVDVCRACHRPGESIRHIISGCSRLANGEYLHRHNQVARIIHQQLALKYNLVDSEVPYYKYVPDPVLENDHVTLYWDRSIITDRTIVANKPDIVVIDRLARRAIIVDVTIPHDENLVKAEKEKQIKYLDLAHEVVGMWNMDSAVIVPIVVTANGLIAKSFDDHLSKLSLRGWIKGLIQKAVLLDTARIVRRFLSLEP

SEQ ID NO: 13043 - protein, 1046 aa, Mythimna impura
MLDDAVLDRLRLESRSSRVSPASPQAAVQLQSNVSLRPDHVGEDDDDGAISVSNQCNVRLRSALEDAFREYRFTPAELRPRLPRLPMHKKNRALVCALDSQLSNCFDSSEDLTDTHSILYCAAVAACRVARVKFPNSDRVTRPAVPAWQCRIERRIGEARALIGKLICFREGNTRPRVMRFVRRAFSGTDISPRDYLPHITERIDFLKQKVYAWANRIRRYKRRVERYTQNRTFQRNERWVYRAWERPDQGVIDTRLPDDDAMCSFWRSIWSVPVSHTEGDWIREIERTCDLIPEMGAITISPQDVARAVRPLPNWKSPGPDGLHNFWLKWFQRSHARLASQFQSALESGSLPQFLTTGITHLLHKSGSTAEPKNYRPITCLPTVYKVLTSILRAKINSHIETNSIMSASQNGCRNGSRGTKELLLIDVAISQQVRRSRRDLSTCWIDYKKAYDSVPHTWLMRVLELYKVDATLRTFLMSCMRQWRTALHYPGCRQTRESSEPIRIERGIFQGDSLSPLWFCLALNPLSTLLEGSGLGYRLRRGGHVISHLLYMDDLKLFASNNLQLMELLKVTETFSSAIRMEFGLDKCAVMHVKRGEIMESVGTQLSDSIYIRSLCSTETYKYLGMSEALGINAADMKQSLRERFFGRLNKVLNSLLSGGNKVRAFNGWVMPVLMYSFGILKWTQTELDALDRRVRSLLTANRMHHPRSSVMRLYIPRKCGGRGFLNAKTLHNREICSLREYFLKTDVGMHRDVVAVDKGLTPLSLVNENWRKPTVMDTNERRAVWQGKELHGRFYRALHGPDVDLLASVSWLRFGDLFGETEGFVFAIMDEVMMTNNYRKYIVKDGTVDICRACHRPGESIRHIISGCSHLANGDYLHRHNLVARIIHQQLALKYNLVESEVPYYRYVPDPVLENGGVTLYWDRSIITDRTIVANKPDIVVIDRLERRTMIVDIAVPHDENLVKAEKDKQTKYLDLAREVVDMWEVDRAIIVPIVVTANGLIAKSLEQHLRRLSLGSWIKGLIQKAVLLDTARIVRRFLSQEP

SEQ ID NO: 13044 - protein, 868 aa, Phlogophora meticulosa
MRYVRRAFLGTDISPRDYMSRVTERIDFLKQKVYAWASRIRRYKRRVERYTQNRTFQSNERWVYRAWERPIQGVTDTHLPDDDVMCSFWRNIWSVPVSHTEGDWTREVERACDPIPQMGAITISPQDVARAVRPLPNWKSPGPDGLHNFWIKWLQKSHARLASQFQSALETGSLPQFLTTGITHLLHKSGSTAEPKNYRPITCLPTVYKVLTSILRVKINNHIDSNSIMSASQNGCRNGSRGTKELLLIDTAISQQVRRSRKDLSTCWIDYKKAYDSVPHTWLKRVLELYKVDATLRTFLTSCMGQWRTVLRYPGCRQIQRNSEPIRIERGIFQGDSLSPLWFCLALNPLSTLLEDSGLGYRLKRGGQVVSHLLYMDDLKLFAPSDLQLMELLTVTKTFSSAIRMEFGVDKCAVMHVKRGKIVESVGTQLPDFINFRALSPIETYKYLGMSEALGINAADMKQSLKERFFGRLKKVCNSLLSGGNKVRAFNGWVMPVLMYSFGILKWTQTELDALDRRVRTFLTASRMHHPRSSVMRLYIPRKCGGRGFLNAKTLHNREICSLRDYFLETDVGMHRDVVAVDQGLTPLSLAKENWRKPVVLDTNDRKEVWQSKELHGRFFQALHGPDVDQLASVSWLRFGDLFGETEGFVCAIMDEVIMTNNYRRFIVKDGTVDICRACHRPGESIRHIISGCSRLANEEYLHRHNLVARIIHQQLALKYSLVESEVPYYKYVPDPVLENGSVTLYWDRSIITDRTIVANKPDIVVMDRIERRATIIDVTVPHDGNLVKAEKDKQIKYLDLAREVVDMWDVDSAIVVPIVVSANGLIAKSLDQHLRRLALGSWIKGLIQKAVLLDTARIVRRFLSLEP

SEQ ID NO: 13045 - protein, 1198 aa, Phlogophora meticulosa
MLTRSAARRARPPPPASSLSSASSPPKPSTIVSTVKPAVPVASSSSDEYFSPPTSPPPARRRRGRRPPDGLGPRGPPASDRVPAPGGSVQRMRWTQSINENVMRSYYGATEGGSNLTAYRVRMLSLFQVLEPAVNVSAQRLSDQVRVIQRNHMLDDVVLDRLRTEMQSSRVITSPSHTVVPPQYNIVLSSFADGEGSDKVTNVSTQYNEELRSALEGAIREYRFMLPALRPRLPRLPMHNKNRALVAALDSQLSNYFDNCDDLTDAHSILYCAAVAACRVAHVKFPYDIATRPKPAVPAWQCRIERRIAGARALIGKLVCYREGNTRPRVMRYVRRAFLGTDISPRDYMSRVTERIDFLKQKVYAWASRIRRYKRRVERYTQNRTFQSNERWVYRAWERPVQGVTDTHLPDDDVVCSFWRNIWSVPVSHTEGDWTREVERACDPIPQMGAITISPQDVARAVRPLPNWKSPGPDGLHNFWIKWLQKSHARLASQFQSALETGSLPQFLTTGITHLLHKSGSTAEPKNYRPITCLPTVYKVLTSILRVKINNHIDSNSIMSASQNGCRNGSRGTKELLLIDTAISQQVRRSRKDLSTCWIDYKKAYDSVPHTWLKRVLELYKVDATLRTFLTSCMGQWRTVLRYPGCRQIQRNSEPIRIERGIFQGDSLSPLWFCLALNPLSTLLEDSGLGYRLKRGGQVVSHLLYMDDLKLFAPSDLQLMELLTVTKTFSSAIRMEFGVDKCAVMHVKRGKIVESVGTQLPDFINFRALSPIETYKYLGMSEALGINAADMKQSLKERFFGRLKKVCNSLLSGGNKVRAFNGWVMPVLMYSFGILKWTQTELDALDRRVRTFLTASRMHHPRSSVMRLYIPRKCGGRGFLNAKTLHNREICSLRDYFLETDVGMHRDVVAVDQGLTPLSLAKENWRKPVVLDTNDRKEVWQSKELHGRFFQALHGPDVDQLASVSWLRFGDLFGETEGFVCAIMDEVIMTNNYRRFIVKDGTVDICRACHRPGESIRHIISGCSRLANEEYLHRHNLVARIIHQQLALKYSLVESEVPYYKYVPDPVLENGSVTLYWDRSIITDRTIVANKPDIVVMDRIERRATIIDVTVPHDGNLVKAEKDKQIKYLDLAREVVDMWDVDSAIVVPIVVSANGLIAKSLDQHLRRLALGSWIKGLIQKAVLLDTARIVRRFLSLEP

SEQ ID NO: 13046 - protein, 1198 aa, Phlogophora meticulosa
MLTRSAARRARPPPPASSLSSASSPPKPSTIVSTVKPAVPVASSSSDEYFSPPTSPPPARRRRGRRPPDGLGPRGPPASDRVPAPGGSVQRMRWTQSINENVMRSYYGATEGGSNLTAYRVRMLSLFQVLEPAVNVSAQRLSDQVRVIQRNHMLDDVVLDRLRTEMQSSRVITSPSHTVVPPQYNIVLSSFADGEGSDKVTNVSTQYNEELRSALEGAIREYRFMLPALRPRLPRLPMHNKNRALVAALDSQLSNYFDNCDDLTDAHSILYCAAVAACRVAHVKFPNDIATRPKPAVPAWQCRIERRIAGARALIGKLVCYREGNTRPRVMRYVRRAFLGTDISPRDYMSRVTERIDFLKQKVYAWASRIRRYKRRVERYTQNRTFQSNERWVYRAWERPVQGVTDTHLPDDDVMCSFWRNIWSVPVSHTEGDWTREVERACDPIPQMGAITISPEDVARAVRPLPNWKSPGPDELHNFWIKWLQKSHARLASQFQSALETGSLPQFLTTGITHLLHKSGSTAEPKNYRPITCLPTVYKVLTSILRVKINNHIDSNSIMSASQNGCRNGSRGTKELLLIDTAISQQVRRSRKDLSTCWIDYKKAYDSVPHTWLKRVLELYKVDATLRTFLTSCMGQWRTVLRYPGCRQIQRNSEPIRIERGIFQGDSLSPLWFCLALNPLSTLLEDSGLGYRLKRGGQVVSHLLYMDDLKLFAPSDLQLMELLKVTKTFSSAIRMEFGVDKCAVMHVKRGKIVESVGTQLPDFINFRALSPIETYKYLGMSQALGINAADMKQSLKERFFGRLKKVCNSLLSGGNKVRAFNGWVMPVLMYSFGILKWTQTELDALDRRVRTFLTASRMHHPRSSVMRLYIPRKCGGRGFLNAKTLHNREICSLRDYFLETDVGMHRDVVAVDQGLTPLSLAKENWRKPVVLDTNDRKEVWQSKELHGRFFQALHGPDVDQLASVSWLRFGDLFGETEGFVCAIMDEVIMTNNYRRFIVKDGTVDICRACHRPGESIRHIISGCSRLANEEYLHRHNLVARIIHQQLALKYSLVESEVPYYKYVPDPVLENGSVTLYWDRSIITDRTIVANKPDIVVMDRIERRATIIDVTVPHDGNLVKAEKDKQIKYLDLAREVVDMWDVDSAIVVPIVVSANGLIAKSLDQHLRRLALGSWIKGLIQKAVLLDTARIVRRFLSLEP

SEQ ID NO: 13047 - protein, 1046 aa, Phlogophora meticulosa
MLDDVVLDRLRTEMQSSRVITSPSHTVVPPQYNIVLSSFADGEGSDKVTNVSTQYNEELRSALEGAIREYRFMLPALRPRLPRLPMHNKNRALVAALDSQLSNYFDNCDDLTDAHSILYCAAVAACRVAHVKFPYDIATRPKPAVPAWQCRIERRIAGARALIGKLVCYREGNTRPRVMRYVRRAFLGTDISPRDYMSRVTERIDFLKQKVYAWASRIRRYKRRVERYTQNRTFQSNERWVYRAWERPVQGVTDTHLPDDDVMCSFWRNIWSVPVSHTEGDWTREVERACDPIPQMGAITISPQDVARAVRPLPNWKSPGPDGLHNFWIKWLQKSHARLASQFQSALETGSLPQFLTTGITHLLHKSGSTAEPKNYRPITCLPTVYKVLTSILRVKINNHIDSNSIMSASQNGCRNGSRGTKELLLIDTAISQQVRRSRKDLSTCWIDYKKAYDSVPHTWLKRVLELYKVDATLRTFLTSCMGQWRTVLRYPGCRQIQRNSEPIRIERGIFQGDSLSPLWFCLALNPLSTLLEDSGLGYRLKRGSQVVSHLLYMDDLKLFAPSDLQLMELLTVTKTFSSAIRMEFGVDKCAVMHVKRGKIVESVGTQLPDFINFRALSPIETYKYLGMSEALGINAADMKQSLKERFFGRLKKVCNSLLSGGNKVRAFNGWVMPVLMYSFGILKWTQTELDALDRRVRTFLTASRMHHPRSSVMRLYIPRKCGGRGFLNAKTLHNREICSLRDYFLETDVGMHRDVVAVDQGLTPLSLAKENWRKPVVLDTNDRKEVWQSKELHGRFFQALHGPDVDQLASVSWLRFGDLFGETEGFVCAIMDEVIMTNNYRRFIVKDGTVDICRACHRPGESIRHIISGCSRLANEEYLHRHNLVARIIHQQLALKYSLVESEVPYYKYVPDPVLENGSVTLYWDRSIITDRTIVANKPDIVVMDRIERRATIIDVTVPHDGNLVKAEKDKQIKYLDLAREVVDMWDVDSAIVVPIVVSANGLIAKSLDQHLRRLALGSWIKGLIQKAVLLDTARIVRRFLSLEP

SEQ ID NO: 13048 - protein, 1198 aa, Xestia xanthographa
MLTRSAAARRARLPPPDSSLSSASPPPEPSPIVSAVTPAVAVASSSSDEYFSPPTTPPPARRRGGRRPPDGLGPRGPPASDRVPAPGGSVQRMRWTQSINANVMRAYYGATEGGNNLTAYRVRMLSLFQVLEPAVNVSAQRLSDQVRVIQRNRMLDDTVLDRLRTEIQSNHVIATPSQAVVPPQSSIIPNCDNDVSNDMVTNVSTQCNVEMRSALEGAIREYRFMQPDLRPRIPRLPMHNKNRALVAVLDSQLSNYFDNCEDLTDVHSILYCAAVATCRVAHVKFPSDRATRPKPAVPAWQYRIERRIGGARALIGKLVCFREGNTRPRVMRFVRQAFSGTDISPRDYMSRVTERIDFLKQKVYAWANRIRRYKRRVDRYTQNRTFQKDERWVYRAWERPDQGVADTHLPDDDAMCSFWRSIWSVPVSHAEGEWTRVIERACDPISEMGAITISPQDVARAVRPLPNWKSPGPDGLHNFWIKWFTRSHARLATLFQSALESGSLPEFLTTGITHLLHKSGSTAEPKNYRPITCLPTVYKVLTSILRTKISKHIDDNSVMSASQNGCRNGSRGTKELLLIDMAISHQVRRSRKDLSTCWIDYKKAYDSVPHTWLMRVLQLYKVDATLRTFLMSCMGQWRTVLHYPGCRQIQRNSEPIRIERGIFQGDSLSPLWFCLALNPLSTLLEDSGLGYRLRKDGQVISHLLYMDDLKLFAPNDLRLMELLKVTETFSNAIRMEFGVDKCAVMHVKRGEIVESVGTQLSDSITLRSLSATETYKYLGMSEALGVNVADMKQSLKERFFGRLKKVLNSLLSGGNKVRAFNGWVMLVLMYSFGILKWTQTELDALDTKVRKLLTAYRMHHPRSSVMRLYIPRKCGGRGFLNAKTLHNREICSLREYFLGTDVGMHRDVVTMDKGLTPLSLAKENWRKPPVLDTNDRREVWQSKELHGRFFRALHGPDVDLSASVAWLRSGDLFGETEGFVCAIMDEVMMTNNYRRFIVKDGTVDICRACHRPGESIRHIISGCSRLANGEYLHRHNLVARIIHQQLALKYNLVESEVPYYRYVPDPVLDNGCITLYWDQSIITDRTIVANKPDIVVVDRSERRAMIVDITVPHDENLVKAEKDKQIKYLDLAREVVDMWEVDSAIIVPIVVSAHGLIAKSLDQYLRRLSLGSWIKGLIQKAVLLDTARIVRRFLSLEP

SEQ ID NO: 13049 - protein, 1198 aa, Xestia xanthographa
MLTRSAAARRARLPPPDSSLSSASPPPEPSPIVSAVTPAVAVASSSSDEYFSPPTTPPPARRRGGRRPPDGLGPRGPPASDRVPAPGGSVQRMRWTQSINENVMRAYYGATEGGNNLTAYRVRMLSLFQVLEPAVNVSAQRLSDQVRVIQRNRMLDDTVLDRLRTEIQSNHVIATPSQAVVPPQSSIIPNCDNDVSNDMVTNVSTQCNVEMRSALEGAIREYRFMQPDLRPRIPRLPMHNKNRALVAVLDSQLSNYFDNCENLTDVHSILYCAAVAACRVAHVKFPSDRATRPKPAVPAWQYRIERRIGGARALIGKLVCFREGNTRPRVMRFVRQAFSGTDISPRDYMSRVTERIDFLKQKVYAWANRIRRYKRRVDRYTQNRTFQKDERWVYRAWERPDQGVADTHLPDDDAMCSFWRSIWSVPVSHAEGEWTRVIERACDPISEMGAITISPQDVARAVRPLPNWKSPGPDGLHNFWIKWFTRSHVRLATLFQSALESGSLPEFLTTGITHLLHKSGSTAEPKNYRPITCLPTVYKVLTSILRTKISKHIDDNSLMSASQNGCKNGSRGTKELLLIDMAISHQVRRSRKDLSTCWIDYKKAYDSVPHTWLMRVLELYKVDATLRTFLMSCMGQWRTVLRYPGCRQIQRNSEPIRIERGIFQGDSLSPLWFCLALNPLSTLLEDSGLGYRLRKDGQVISHLLYMDDLKLFAPNDLRLMELLKVTETFSNAIRMEFGVDKCAVMHVKRGEIVESVGTQLSDSITLRSLSATETYKYLGMSEALGVNVADMKQSLKERFFGRLKKVLNSLLSGGNKVRAFNGWVMPVLMYSFGILKWTQTELDALDTKVRKLLTAYRMHHPRSSVMRLYIPRKCGGRGFLNAKTLHNREICSLREYFLGTDVGMHRDVVTMDKGLTPLSLAKENWRKPPVLDTNDRREVWQSKELHGRFFRALHGPDVDLSASVAWLRSGDLFGETEGFVCAIMDEVMMTNNYRRFIVKDGTVDICRACHRPGESIRHIISGCSRLANGEYLHRHNLVARIIHQQLALKYNLVESEVPYYRYVPDPVLDNGCITLYWDQSIITDRTIVANKPDIVVVDRSERRAMIVDITVPHDENLVKAEKDKQIKYLDLAREVVDMWEVDSAIIVPIVVSAHGLIAKSLDQYLRRLSLGSWIKGLIQKAVLLDTARIVRRFLSLEP

SEQ ID NO: 13050 - protein, 1202 aa, Xestia xanthographa
MLTRSAAARRARLPPPDSSLSSASPPPEPSPIVSAVTPAVAVASSSSDEYFSPPTTPPPARRRGGRRPPDGLGPRGPPASDRVSDRVPAPGVSVQRMRWTQSINENVMRAYYGATEGGNNLTAYRVRMLSLFQVLEPAVNVSAQRLSDQVRVIQRNRMLDDTVFDRLRTEIQSNHVIATPSQAVVPPQSSIIPNCDNDVSNDMVTNVSTQCNVEMRSALEGAIREYRFMQPDLRPRIPRLPMHNKNRALVAVLDSQLSNYFDNCEDLTDVHSILYCAAVAACRVAHVKFPSDRTTRPKPAVPARQYRIERRISGARALIGKLVCFREGNTRPRVMRFVRQAFSGTDISPRDYMFRVTERIDFLKQKVYAWANRIRKYKRRVDRYTQNRTFQKDERWVYRAWERPDQGVADTHLPDDDAMCSFWRSIWSVPVSHAEGEWTRVIERACDPISEMGVITISPQDVARAVRPLPNWKSPGPDGLHNFWIKWFTRSHARLATLFQSALESGSLPEFLTTGITHLLHKSGSTAEPKNYRPITCLPTVYKVLTSILRTKISKHIDDNSVMSASQNGCRNGSRGTKELLLIDMAISHQVRRSRKDLSTCWIDYKKAYDSVPHTWLMRVLELYKVDATLRTFLMSCMGQWRTVLRYPGCSQIQRNSEPIRIERGIFQGDSLSPLWFCLALNPLSTLLEDSGLGYRLRKDGQVISHLLYMDDLKLFAPNDLRLMELLKVTETFSNAIRMEFGVDKCAVMHVKRGDIVESVGTQLSDSITLRSLSATETYKYLGMSEALGVNVADMKQSLKERFFGRLKKVLNSLLSGGNKVRAFNGWVMPVLMYSFGILKWTQTELDALDTKVRKLLTAYRMHHPRSSVMRLYIPRKCGGRGFLNAKTLHNREICSLREYFLGTDVGMHRDVVTMDKGLTPLSLAKENWRKPPVLDTNDRREVWQSKELHGRFFRALHGPDVDLSASVAWLRSGDLFGETEGFVCAIMDEVMVTNNYRRFIVKDGTVDICRACHRPGESIRHIISGCSRLANGEYLHRHNLVARIIHQQLALKYNLVESEVPYYRYVPDPVLDNGCITLYWDQSIITDRTIVAYKPDIVVVDRSERRAMIVDITVPHDENLVKAEKDKQIKYLDLAREVVDMWEVDSAIILPIVVSAHGLIAKSLDQYLRRLSLGSWIKGLIQKAVLLDTARIVRRFLSLEP

SEQ ID NO: 13051 - protein, 1216 aa, Xestia xanthographa
MSPVLTRHRAKLQKEAHPPSPGSSLSSASQPPGRATPVSIMSPVAAVASSSSDEFFSPPSTPPPPPPPPPPRGRRRGRGRPPAGLGPRGQQAPSRVPAAGGNVSRMRWTQSINENVMRAYYGATEGGSNLTAYRSRMLSLFQVLEPAVNVEAQRLSDQVRVIQRNHMLDDTVLDRLRSESRSNLVTPASPMIAVQQQNIPSAPPRSDYNGEEDRDEVISVSTQCNAQLRSALEGAFREYRSTPPELRPRLPRLPMHNKNKALMCALDSQLSNCFDSSKDLADTHSILYCGAVAACRVAHVKFPNNDRATRPKLAVPAWQCRIERRIGEARALIGKLICFREGNTRPRVMRFVRRAFSGTDISFRDYLARVTERIDSLKQKICAWASRIRRYKRRVERYTQNRTFQSDERWVYRAWERPDQGVTDTRLPDDSAMYSFWRNIWSVPVSHTEGDWTREVEQACDPIPEMGAIIISPQDVARAVRPLPNWKSPGPDGLHNFWIKWFQRSHARLASQFQSALESGSLPQFLTTGITHLLHKSGSVAEPKNYRPITCLPTVYKVLTSILRAKINQHIDSNSIMSASQNGCRNGSRGTKELLLIDMAISQQVRRSRKNLSTCWIDYKKAYDSVPHTWLMKVLDLYKIDATLRTFLMSCMGHWRMVLRYPGCRQIQGNSEPIRIERGIFQGDSLSPLWFCLALNPLSTLLERSGLGYLLRRDGQAISHLLYMDDLKLFAPNNLQLMKLLKVTETFSSAIRMEFGVDKCAVMHVKRGEIMESVGTQLSDSIYLRSLSSTETYKYLGMSEALGINTADMKQSLRERFFGRLNKVLGSLLSGGNKVRAFNGWVMPVLMYSFGILKWTQTELDALDRRVRTLLTANRMHHPRSSVMRLYIPRKCGGRGFLNAKTLHNREVCSLREYFLEADGEMHRDVVSVDKGLTPLSLANENWRKPKVLDTNDRKVEWQGKELHGRFYRALHGPDVDFLPSVSWLRFGDLFGETEGFICAIMDEVMMTNNYRKYIVIDGTVDICRACHRPGESIRHIISGCSSLANGEYLHRHNLVARIIHQQLALKYNLVESEVPYYKYAPDPVLDNGHITLYWDRPITTDRTVVANRPDIVVIDRLERRTMIVDITIPHDENLVKAEKDKQFKYLDLAREVVDMWDVGTAVIVPIVVSANGLIAKSLDQHLRRLSLGSWIKGLIQKAVLLDTARIVRRFLSQEP

SEQ ID NO: 13052 - protein, 1209 aa, Xestia xanthographa
MITRSRAKQHQEAHPPSPGSSLSSASQPPGRATPVSIVSPVAAVASSSSDEFFSPPSTPSPSPRRGRRRGRGRPPAGLGPRGQQAPSRVPAAGGNVSRIRWTQSMNENVMRAYYGATEGGINLTAYRGRMLSLFQVLEPGVSASAQRLSDQVRVIQRKHMLDDTVLDRLRSESRSNLVTPASPLIAVQVQNVSSAPPRSDRDGEEDDSEVISVSTQCNAQLRSALESAFREYRSTPPELRPRLPRLPMHNKNKALMCALDSSLSNCFDSSKDLTDTHSILYCGAVAACRVAHVKFPNNDGATRPKLAVPAWQCRIERRIGEARALIGKLICFREGNTRPRVMRFVRRAFSGTDISFRDYLARVTERIDSLKQKICAWASRIRRYKRRVERCTQNRTFQSDERWVYRAWERPDQGVTDTRLPDDSAMYSFWRNIWSVPVSHTEGDWTREVEQACDPIPEMGAIIISPQDVARAVRPLPNWKSPGPDGLHNFWIKWFQRSHARLASQFQSALESGSLPQFLTTGITHLLHKSGSAAEPKNYRPITCLPTVYKVLTSILRAKINQHIDSNSIMSASQNGCRNGSRGTKELLLIDMAISQQVRRSRKNLSTCWIDYKKAYDSVPHTWLMRVLELYKIDATLRTFLMSCMGHWRTVLRYPGCRQIQGNSEPIRIERGIFQGDSLSPLWFCLALNPLSTLLERSGLGYLLRRDGQVISHLLYMDDLKLFAPNNFQLMKLLKVTETFSSAIRMEFGVDKCAVMHVKRGEIMESEGTQLSDSIHLRSLSSTETYKYLGMSEALGINIADMKQSLRERFFGRLNKVLGSLLSGGNKVRAFNGWVMPVLMYSFGILKWTQTKLDALDRRVRTLLTANRMHHPRSSVMRLYIPRKCGGRGFLNAKTLHNREVCSLREYFLEADGEMHRDVVSVDKGLTPLSLANENWRKPKVLDTNDRKVEWQSKELHGRFYRALHGPDVDFLPSVSWLRFGDLFGETEGFICAIMDEVMMTNNYRKYIVKDGTVDICRACHRPGESIRHIISGCSSLANGEYLHRHNLVARIIHQQLALKYNLVESEVPYYKYAPDPVLDNGHITLYWDRPITTDRTVVANRPDIVVIDRLERRTMIVDITIPHDENLVKAEKDKQFKYLDLAREVVDMWDVGTAVIVPIVVSANGLIAKSLDQHLRRLSLGSWIKGLIQKAVLLDTARIVRRFLSQEP

SEQ ID NO: 13053 - protein, 1200 aa, Cosmia trapezina
MLTRSAARKARLPPPDSSLSSASPPPVPSLTVSAVSTPAAVVASSSSDEYFSPPTTPPPARRRGGRRPPDGLGPRGPPASDRVPAPGGSVQRMRWTRAINENVMRSYYGATEGGNNLTAYRVRMHSLFQVLEPALNVSAQRLSDQVRVIQRNHMLDDTVLDRLRNEIQSSRVIAPLSQTIVAPPPPQCNTTQADEGSDGTAANVSTQCNEELRSALEGAIQEYRFVSPELRPRLPRLPMHNKNRALVAALDSQLSNYFDDCEDLTDTHSILYCAAVAACRVAHVKFANDSRATRPKPAVPAWQCRIERRIGGARALIGKLICFREGNTRPRVMRFVKRAFSGTDVSPQDYMSRVTERIDFLRQKVYAWANRIRRYKRRVDRYTQNRTFQSDERWVYRGWERPDQGVTDTRLPDDDAMCSFWRSIWSVPVSHTEGDWAREVRRACDPIPEMGAITICPQDVARAVRPLPNWKSPGPDGLHNFWIKWFLGSHARLAAQYQSALQSGSLPQFLTTGITHLLHKSGSTTEPKNYRPITCLPTVYKVLTSILRAKINEHIDTNSIMSASQNGSRNGSRGTKELLLIDMAISQQVRRSRRDLSTCWIDYKKAYDSVPHTWLMRVLELYKVDATLRTFLMSCMGQWRTVLRYPGCRNIQRNSEPIRIERGIFQGDSLSPLWFCLALNPLSTLLEDSGLGYRLRRGGQVISHLLYMDDLKLFAPSNLQLMELLKVTETFSSAIRMEFGVDKCAVMHVKRGEIVESVGTQLPDSINLRTLSAAETYKYLGMSEALGINVADMKQSLKERFFGRLKKVFNSLLSGGNKVRAFNGWVMPVLMYSFGILKWTQTELDALDRRVRTLLTAYRMHHPRSSVMRLYIPRKCGGRGFLNAKTLHNREICSLREYFLETDVGMHRDVVAVDKGLTPLSLAKENWRKPVVLDANDRMEVWQSKELHGRFFRALHGPDVNLLASVAWLRSGDLFGETEGFVCAIMDEVIMTNNYRRFIVKDGTVDICRACHRPGESIRHIISGCSRLANEEYLHRHNLVARIIHQQLALKYSLVESEVPYYRYVPDPVLENGHITLYWDRSIITDRTIVANKPDIVVVDRTERRAMIVDITVPHDGNLVKAEKDKQIKYIDLAREVVDMWDVDSAVIVPIVVSANGLIAKSLDQHLRRLSLGSWIKGLIQKAVLLDTARIVRRFLSLEP

SEQ ID NO: 13054 - protein, 1205 aa, Cosmia trapezina
MLTRSRAQHLRNTHPTSSGSSLSSASQLPEPAPDVSQVIPAAAVASSSSDEYFSPPTTPPPVRRRGRGRPPASLGPRGPPASDRVPAPGGSVQRMRWTQTVNENVMRAYFGATEGGSNLTAYRGRMLSLFQVLEPAVNVSAQRLSDQVRVIQRNHMLDDVVLDRLRLESRNSRVTSDSPMVAVQLQNLPSASPRPDRVGEEDDSGAISVSSQCNVQLRSALEDAFREYRSTPPGLRPRLPRLPMHKKNKALVCALDSQLSNCFDGSKDLADTHSILYCAAVAACRVAHVKFHNNDRVTRPKPAVPTWQCRIERRIGEARALIGKLICFREGNTRPRVMRFVRRAFSGMDISPRDYLTCVTERIDFLKQKICAWANRIRRYRRRVERYTQNRTFQSDERWVYRAWERPDQGVADTQLPDDDAMCSFWRSIWSVPVSHTEGDWTREVERACDHIPQMGALTISPQDVARAVRPLPNWKSPGPDGLHNFWIKWFQRSHARLASQFQSALQSGSLPQFLTTGITHLLHKSGSTAEPRNYRPITCLPTVYKVLTSILRAKINKHIDTNSIMSASQNGCGNGSRGTKELLLIDMTISQQVRRSRRDLSTCWIDYKKAYDSVPHTWLMRVLELYKIDATLCTFLMSCMGQWRTVLRYPGCRNIQRNSEPIRIERGIFQGDSLSPLWFCLALNPLSTLLEDSGLGYRLRRGGQVISHLLYMDDLKLFAPNNLQLMELLKVTETFSSAIRMEFGVDKCAVMHVKRGEIVESVRTQLSDSIHLRSLSSLETYKYLGMSEALGINAADMKQSLRERFFGRLNKVLNSLLSGGNKVRAFNGWVMPVLMYSFGILKWTQTELDALDRRVRTLLTANRMHHPRSSVMRLYIPRKCGGRGFLNAKTLHNREVCSLREYFLEADVGMHREVVSVDKGLTPLSLANENWRKPIVLDTNDRREVWQSKELHGRFYRVLHGPDVDFLASVSWLRFGDLFGETEGFVFAIMDEVMMTNNYRKYIVKDGTVDICRACHRPGESIRHIISGCSRLANGDYLHRHNLVARIIHQQLALKYSLVESEVPYYRYVPDPVLENGNITLYWDRSIITDRTIVANKPDIVVIDRLERRTVIVDIAVPHDENLVKAEKDKQIKYLDLAREVVDMWDVDTAIIVPIVVTANGIIAKSLDQHLRRLSLGGWIKGLIQKAVLLDTARIVRRFLSQQP

SEQ ID NO: 13055 - protein, 1204 aa, Cosmia trapezina
MMQTRAKTRIQAHPPSPDSSLSSASQPVRASTVSAVSPVAAVASSSSDEFFSPPSSPTPPRRRGRGRPPAGLGPRGQPAPNRVPAAGGNVSRMRWTQSINENVMRAYYGATEGGINLTAYRGRMLSLFQVLEPAVNVSAQRLSDQVRVIQHNHRLDNATLDRLRSEMQSSSASNPPPSQNVMHVPAEIPLRANQRDEEENARAISADNLCNVEIRSALEDAIREYRFTSPDLRPRLPRLPMNKKNRALVCALDALLPNFIESSADLCDTHSILYCTAVAACRVACVKFPNTDRATRPKPAAPAWQCRIERRINEARVLIGKLICFREGNTRPRVMRFVRRAFSGTNVSPQEYVSRVTERIDFLKQKVYAWANRIRRYRRRVDRYSQNRMFQSDERWVYRAWERPIPTQGVTDVRPPDNETMSAFWRSIWSVPVSHTEGDWMRIVEQACDSIPNMDAVTISPLDVACAVRPLPNWKSPGPDGLHNFWIKWLQRSHACLASQFQSSLETGSLPLLFTTGVTHLLHKSGSTAEPKNYRPITCLPTVYKVLTSILRAKIAHHIYNNSIMSVSQNGCRNGSRGTKELLLIDMTISQQVRRSRKDLSTCWIDYKKAYDSVPHTWLIRVLELYKIDATLRTFLMSCMGQWKTVLLYPGCRRIPGIDEPIRIERGIFQGDSLSPLWFCLALNPLSTLLEDSGLGYRLRRGGQVISHLLYMDDLKLFAPNNLRLMELLKVTENFSSAIRMEFGVDKCAVMHVKRGEIMESVGTQLSDSIHLRSLSSTETYKYLGMSEALGINVADMKQSLKERFFGRLKKVFNSLLSGGNKVRAFNGWVMPVLMYSFGVLKWTQTELDALDRRVRTLLTAYRMHHPRSSVMRLYIPRKCGGRGFLNAKTLHNREICSLREYFLEADVGMHRDVVAVDKGLTPLSLAKENWRKPAVLDTNDRREVWQGKELHGRFFRALHGPDVDFLASVSWLRFGDLFGETEGFVCAIMDEVIMTNNYRKYIVKDGTVDICRACHHPGESIRHIVSGCSRLANGEYLHRHNLVARIIHQQLALQYNLVESEVPYYRYVPDPVLENGQATLYWDRSIITDRTIVANKPDIVVIDRRERRAIIVDIAVPHDENLVKAEKDKKIKYLDLAHEVVDMWDVDSAIIVPIIVTVNGLIAQSLDQHLRRLSLRGWIKGLIQKAVLLDTARIVRRFLSLEP

SEQ ID NO: 13056 - protein, 1204 aa, Cosmia trapezina
MMQTRAKTRIQAHPPSPDSSLSSASQPVRASTVSAVSPVAAVASSSSDEFFSPLSSPTPPRRRGRGRPPAGLGPRGQPAPNRVPAAGGNVSRMRWTQSINENVMRAYYGATEGGINLTAYRGRMLSLFQVLEPAVNVSAQRLSDQVRVIQHNHRLDNATLDRLRSEMQSSSASNPPPSQNVMHVPAEIPLRANQRDEEENARAISADNLYNVEIRSALEDAIREYRFTSPDLRPRLPRLPMNKKNRALVCALDALLPNFIESSADLCDTHSILYCTAVAACRVACVKFPNTDRATRPKPAAPAWQCRIERRINEARVLIGKLICFREGNTRPRVMRFVRRAFSGTNVSPQEYVSRVTERIDFLKQKVYAWANRIRRYRRRVDRYSQNRMFQSDERWVYRAWERPIPTQGVTDVRPPDNETMSAFWRSIWSVPVSHTEGDWMRIVEQACDSIPNMDAVTISPLDVACAVRPLPNWKSPGPDGLHNFWIKWLQRSHACLASQFQSSLETGSLPLLFTTGVTHLLHKSGSTAEPKNYRPITCLPTVYKVLTSILRAKIAHHIYNNSIMSVSQNGCRNGSRGTKELLLIDMTISQQVRRSRKDLSTCWIDYKKAYDSVPHTWLIRVLELYKIDATLRTFLMSCMGQWKTVLLYPGCRRIPGIDEPIRIERGIFQGDSLSPLWFCLALNPLSTMLEDSGLGYRLRRGGQVISHLLYMDDLKLFAPNNLRLMELLKVTENFSSAIRMEFGVDKCAVMHVKRGEIMESVGTQLSDSIHLRSLSSTETYKYLGMSEALGINVADMKQSLKERFFGRLKKVFNSLLSGGNKVRAFNGWVMPVLMYSFGVLKWTQTELDALDRRVRTLLTAYRMHHPRSSVMRLYIPRKCGGRGFLNAKTLHNREICSLREYFLEADVGMHRDVVAVDKGLTPLSLAKENWRKPAVLDTNDRREVWQGKELHGRFFRALHGPDVDFLASVSWLRFGDLFGETEGFVCAIMDEVIMTNNYRKYIVKDGTVDICRACHHPGESIRHIVSGCSRLSNGEYLHRHNLVARIIHQQLALQYNLVESEVPYYRYVPDPVLENGQATLYWDRSIITDRTIVANKPDIVVIDRRERRAIIVDIAVPHDENLVKAEKDKKIKYLDLAHEVVDMWDVDSAIIVPIIVTVNGLIAQSLDQHLRRLSLRGWIKGLIQKAVLLDTARIVRRFLSLEP

SEQ ID NO: 13057 - protein, 1197 aa, Mamestra brassicae
MLTRSRARHLATHPSPSASSLSSASPPPEPSPTVSAVTPAVAVASSSSDEYFSPPTTPPPARRRRGRRPPDGLGPRGPLASDRVPAPGGSVQRMRWTQSINENVMRSYFGATEGGTNLTAYRGRMLSLFQVLEPAVNVSAQRLSDQVRVIQRNRMLDDSVLDRLRMEMCGHVITPPSQTVAPPQSQISSHADEESNDRVTNVSTQCNEELRSALECAIREYRYIPPELTPRLPRLPMHNKNRALVAALDSQLSNYFDDCEDLTDTHSIMYCAAVAACRVAHVKMTNDRVTRPKPAVPAWQCRIERRIGGARALIGKLICFREGNNRPRVMRFVRRAFSGTDISPRDYMSRVTERIDFLKQKVYAWANRIRRYRRRVERYTQNRTFRSNERWVYRVWEQPDQGVTDTHLPDDDAMCSFWRNIWSVPVSHTEGDWIREVERACDPLPEMGAITISPQDVARAVRPLPNWKSPGPDGLHNFWIKWLQRSHGRLASQYQTALESGSLPEFLTTGVTHLLHKSGSTAEPKNYRPITCLPTVYKVLTSILRAKINNHINSSNIMSVSQNGCRNGSRGTKELLLIDMAISQQVRRSRKDLSTCWIDYKKAYDSVPHTWLRRVLELYKIDTMLRTFLMSCVGQWRTVLRYPGCRNIQRNSEPVRIERGIFQGDSLSPLWFCLALNPLSTLLENSGLGYRLKRGGQVISHLLYMDDLKLFAPSNLQLMELLKVTETFSSAIRMEFGVDKCAVMHVKRGEIMESVGIQLSDSINLRSLSSTETYKYLGMSEALGINVTDMKQSLKERFFGRLKKVFNSLLSGGNKVRAFNGWVMPVLMYSFGVLKWTQTELDALDRRVRTLLTAYRMHHPRSSVMRLYIPRKCGGRGFLNAKTLHNREICSLREYFLAVDVGMHRDVVAVDKGLTPLSLANENWRKPAVLDTDDRRAVWQSKELHGRYFRALHGPDVDQLASVAWLRFGDLFGETEGFVCAIMDEVIMTNNYRRFIVKDGTVDICRACHRPGESIRHIVSGCSRLANGEYLHRHNLVARIIHQQLALKYSLVESEVPYYRYAPDPVLDNGNITLYWDRSIITDRTIVANKPDIVVVDRIERRAMIVDITVPHDENLVKAEKDKQIKYIDLAREVVDMWDVDSAIIVPIVVSANGLIATSLDQHLRRLSLGSWIKGLIQKAVLLDTARIVRRFLSLEP

SEQ ID NO: 13058 - protein, 1201 aa, Mamestra brassicae
MLTRSRARHLATHPSPSASSLSSASPPPEPSPTVSAVTPAVAPAVAVASSSSDEYFSPPTTPPPAHRRRGRRPPDGLGPRGPPASDRVPAPGGSVQRMRWTQSINENVMRSYFGATEGGTNLTAYRGRMLSLFRVLEPAVNVSAQRLSDQVRVIQRNRMLDDSVLDRLRMEICGHVITPPSQTVAPPQSQMSSPADEESNDRVTNVSTQCNEELRSALECAIREYRYVPPELRPRLPRLPMHNKNRALVAALDSQLSNYFDDCEDLTDTHSIMYCAAVAACRVAHVKMSNDRVTRPKPAVPAWQCRIERRIGEARALIGKLICFREGNTRRRVMRFVRRAFSGTDISPRDYMSRVTERIDFLKQKVYAWANRIRRYRRRVERYTQNRTFRSNERWVYRVWEQPDQGVTDTRLPDDDAMCSFWRNIWSVPVSHTEGDWIREVERACDPLPEMGAITISPQDIARAVRPLPNWKSPGPDGLHNFWIKWLQRSHARLASQYQTVLESGSLPEFLTTGVTHLLHKSGSTAEPKNYRPITCLPTVYKVLTSILRAKINNHINSNNIMSVSQNGCRNGSRGTKELLLIDMAISQQVRRSRKDLSTCWIDYKKAYDSVPHTWLMRVLELYKIDTMLRTFLMSCMGQWRTVLRYPGCRNIQRNSEPVKIERGIFQGDSLSPLWFCLALNPLSTLLENLGLGYRLKRGGQVLSHLLYMDDLKLFAPSNLQLMELLKVTETFSSAIRMEFGVDKCAVMHVKRGEIMESVGTQHSDSINLRSLSSAETYKYLGMSEALGINVTDMKQSLKERFFSRLKKVFNSLLSGGNKVRAFNGWVMPVLMHSFGVLKWTQTELDALDRRVRTLLTAYRMHHPRSSVMRLYIPRKCGGRGFLNAKTLHNREICSLREYFLAVDVGMHRDVVAVDKGLTPLSLANENWRKPAVLDTNDRRAVWQSKELHGRYFRALHGPDVDQLASVAWLRFGDLFGETEGFVCAIMDEVIMTNNYRRFIVKDGTVDICRACHRPGESIRHIVSGCSHLANGEYLHRHNLVARIIHQQLALKYSLVESEVPYYRYAPDPVLDNGNITLYWDRSIITDRTIVANKPDIVVVDRIERRAMIVDITVPHDENLVKAEKDKQIKYIDLAREVVDMWDVDSAIIVPIVVSANGSIATSLDQHLRRLSLGSWIKGLIQKAVLLDTARIVRRFLSLEP

SEQ ID NO: 13059 - protein, 1198 aa, Noctua fimbriata
MLTRAAAKRARLSPPDPSLSSASPPPESSPVMSAVTPAVAVASSSSDEYFSPPTTPPPVRRRGGRRPPDGLGPRGPPASDRVPAPGGSVQRMRWTQSINENVMRSYYGTTEGGNNLTAYRVRMLSLFQVLEPAVNVSAQRLSDQVRVIQRNRMLDDTVLDRLRTEMQSSHVIATPPPQAVVPPQSTIIPNRYNDVSNDIVTNVSTQCNEEMRSALEGAIREYRFMQPDLRPRIPRLPMHNKNRALVAVLDSQLSNYFDNCEDLTDAHSILYCAAVAACRVAHVKFSNDRATRPKPAVPPWQYRIERRIGGARALIGKLICFREGNTRPRVMRFVRRAFSGTDISPRDYMSRITERIDFLKQKVYAWANRIRRYKRRVDRYTQNRTFQRDERWVYRAWERPDQGVADTRLPDDDAMCSFWRSIWSVPVSHTEGEWTQGVERACDLVPEMGAITISPQDVVRAVRPLPNWKSPGPDGLHNFWIKWFTRSHARLAILFQSALESGSLPEFLTTGITHLLHKSGSTAEPKNYRPITCLPTVYKVLTSILRAKINKHIDDNSIMSASQNGCRNGSRGTKELLLIDMAISQQVRRSRRDLSTCWIDYKKAYDSVPHTWLMRVLELYKVDATLRTFLMSCMGQWRTVLRYPGCRQIQRNSEPIRIERGIFQGDSLSPLWFCLALNPLSTLLEDSGLGYRLRRGGQVISHLLYMDDLKLFAPNDLQLMELLKVTETFSSAIRMEFGVDKCAVMHVKRGEIVESVGTQLSDSINLRSLSATESYKYLGMSEALGINVADMKQSLKERFFGRLKKVFNSLLSGGNKVRAFNGWVMPVLMYSFGILKWTQTELDALDRRVRTLLTAYRMHHPRSSLMRLYIPRKCGGRGFLNAKTLHNREICSLREYFLETDVGMHRDVVAVDKGLTPLSLAKENWRKPLVLDTNDRMEVWQSKELHGRFFRALHGPDVDLSASVAWLRSGDLFGETEGFVCAIMDEVMMTNNYRRFIVKDGTVDICRACHRPGESIRHIISGCSRLANGEYLHRHNLVARIIHQQLALKYNLVESEVPYYKYVPDPVLENGSITLYWDQSIITDRTIVANKPDIVVVDRSERRTMIVDITVPHDENLVKAEKDKKIKYLDLAREVVDMWDVDSAIIVPIVVSAHGLIAKSLDQYLRRLSLGSWIKGLIQKAVLLDTARIVRRFLSLEP

SEQ ID NO: 13060 - protein, 974 aa, Noctua fimbriata
MQPDLRPRIPRLPMHNKNRALVAVLDSQLSNYFDNCEDLTDAHSILYCAAVAACRIAHVKFSDDRATRPKPAVPPWQYRIERRIGGARALIGKLICFREGNTRPRVMRFVRRAFSGTDISPRDYMSRITERIDFLKQKVYAWASRIRRYKRRVDRYTQNRTFQRDERWVYRTWERPDQGVADTRIPDDDAMCSFWRSIWSVPVSHTEGEWTREVERACDLVPEMGAITISPQDVVRAVRPLPNWKSPGPDGLHNFWIKWFTRSHARLAILFQSALESGSLPEFLTTGITHLLHKSGSTAEPKNYRPITCLPTVYKVLTSILRAKINKHIDDNSIMSASQNGCRNGSRGTKELLLIDMAISQQVRRSRRDLSTCWIDYKKAYDSVPHTWLMRVLELYKVDATLRTFLMSCMGQWRTVLRYPRCWQIQRNSEPIRIERGIFQGDSLSPLWFCLALNPLSTLLEDSGLGYQLRRGGQVISHLLYMDDLKLFAPNDLQLMELLKVTETFSSAIRMEFGVDKCAVMHVKRGEIVESVGTQLSDSINLRSLSATETYKYLGMSEALGINVADMKQSLKERFFGRLKKVFNSLLSGGNKVRAFNGWVMPVLMYSFGILKWTQTELDALDRRVRTLLTAYRMHHPRSSVMRLYIPRKCGGRGFLNAKTLHNREICSLREYFLETDVGMHRDVVAMDKGLTPLSLAKENWRKPLVLDTNDRMEVWQSKELHGRFFRALHGPDVDLSASVAWLRSGDLFGETEGFVCAIMDEVMMTNNYRRFIVKDGTVDICRACHRPGESIRHIISGCSRLANGEYLHRHNLVARIIHQQLALKYNLVESEVPYYKYVPDPVLENGSITLYWDQSIITDRTIVANKPDIVVVDRSERRTMIVDITVPHDENLVKAEKDKKIKYLDLAREVVDMWDVDSAIIVPIVVSAHGLIAKSLDQYLRRLSLGSWIKGLIQKAVLLDTARIVRRFLSLEP

SEQ ID NO: 13061 - protein, 868 aa, Noctua fimbriata
MRFVRRAFSGTDISPRDYMSRITERIDFLKQKVYAWASRIRRYKRRVDRYTQNRTFQRDERWVYRAWERPDQGVADTRIPDDDAMCSFWRSIWSVPVSHTEGEWTREVERACDLVPEMGAITISPQDVVRAVRPLPNWKSPGPDGLHNFWIKWFTRSHARLAILFQSALESGSLPEFLTTGITHLLHKSGSTAEPKNYRPITCLPTVYKVLTSILRAKINKHIDDNSIMSASQNGCRNGSRGTKELLLIDMAISQQVRRSRSDLSTCWIDYKKAYDSVPHTWLMRVLELYKVDATLRTFLMSCMGQWRTVLRYPGYRQIQRNSEPIRIERGIFQGDSLSPLWFCLALNPLSTLLEDSGLGYRLRRGGQVISHLLYMDDLKLFAPNDLQLMELLKVTETFSSAIRMEFGVDKCAVMHVKRGEIVESVGTQLSDSINLRSLSATETYKYLGMSEALGINVADMKQSLKERFFGRLKKVFNSLISGGNKVRAFNGWVMPVLMYSFGILKWTQTELDALDRRVRTLLTAYRMHHPRSSVMRLYIPRKCGGRDFLNAKTLHNREICSLREYFLETDVGMHRDVVAVDKGLTPLSLAKENWRKPLVLDTNDRMEVWQSKELHGRFFRALHGPDVDLSASVAWLRCGDLFGETEGFVCAIMDEVMMTNNYRRFIVKDGTVDICRACHRPGESIRHIISGCSRLANGEYLHRHNLVARIIHQQLALKYNLVESEVPYYKYVPDPVLENGSITLYWDQSIITDRTIVANKPDIVVVDRSERRTMIVDITVPHDENLVKAEKDKKIKYLDLAREVVDMWDVDSAIIVPIVVSAHGLIAKSLDQYLRRLSLGSWIKGLIQKAVLLDTARIVRRFLSLEP

SEQ ID NO: 13062 - protein, 1198 aa, Noctua fimbriata
MLTRAAAKRARLSPPDPSLSSASPPPESSPVMSAVTPAVAVASSSSDEYFSPPTTPPPVRRRGGRRPPDGLGPRGPPASDRVPAPGGSVQRMRWTQSINENVMRSYYGATEGGNNLTAYRVRMLSLFQVLEPAVNVSAQRLSDQVRVIQRNRMLDDTVLDRLRTEMQSSHVIATPPPQAVVPPQSTIIPNRDNDVSNDIVTNVSTQCNEEMRSALEGAIREYRFMQPDLRPRIPRLPMHNKNRALVAVLDSQLSNYFDNCEDLTDAHSILYCAAVAACRVAHVKFSNDRATRPKPAVPPWQYRIERRIGGARALIGKLICFREGNTRPRVMRFVRRAFSGTDISPRAYMSRITERIDFLKQKVYAWANRIRRYKRRVDRYTQNRTFQRDERWVYRAWERPDQGVADTRLPDDDAMCSFWRSIWSVPVSHTEGEWTQGVERACDLVPEMGAITISPQDVVRAVRPLPNWKSPGPDGLHNFWIKWFTRSHARLAILFQSALESGSLPEFLTTGITHLLHKSGSTAEPKNYRPITCLPTVYKVLTSILRAKINKHIDDNSIMSASQNGCRNGSRGTKELLLIDMAISQQVRRSRRDLSTCWIDYKKAYDSVPHTWLMRVLELYKVDATLRTFLMSCMGQWRTVLRYPGCRQIQRNSEPIRIERGIFQGDSLSPLWFCLALNPLSTLLEDSGLGYRLRRGGQVISHLLYMDDLKLFAPNDLQLMELLKVTETFSSAIRMEFHVDKCAVMHVKRGEIVESVGTQLSDSINLRSLSATETYKYLGMSEALGINVADMKQSLKERFFGRLKKVFNSLLSGGNKVRAFNGWVMPVLMYSFGILKWTQTELDALDRRVRTLLTAYRMHHPRSSIMRLYIPRKCGGRGFLNAKTLHNREICSLREYFLETDVGMHRDVVAVDKGLTPLSLAKENWRKPLVLDTNDRMEVWQSKELHGRFFRALHGPDVDLSASVAWLRSGDLFGETEGFVCAIMDEVMMTNNYRRFIVKDGTVDICRACHRPGESIRHIISGCSRLANGEYLHRHNLVARIIHQQLALKYNLVESEVPYYKYVPDPVLENGSITLYWDQSIITDRTIVANKPDIVVVDRSERRTMIVDITVPHDENLVKAEKDKKIKYLDLAREVVDMWDVDSAIIVPIVVSAHGLIAKSLDQYLRRLSLGSWIKGLIQKAVLLDTARIVRRFLSLEP

SEQ ID NO: 13063 - protein, 1198 aa, Noctua fimbriata
MLTRAAAKRARLSPPDPSLSSASPPPESSPVMSAVTPAVAVASSSSDEYFSPPTTPPPVRQRGGRRPPDGLGPRGPPASDRVPAPGGSVQRMRWTQSINENVMRSYYGATEGGNNLTAYRVRMLSLFQVLEPAVNVSAQRLSDQVRVIQRNRMLDDTVLDRLRTEMQSSHVIATPPPQAVVPPQSTIIPNRDNDVSNDIVTNVSTQCNEEMRSALEGAIREYRFMQPDLRPRIPRLPMHNKNRALVAVLDSQLSNYFDNCEDLTDAHSILYCAAVAACRVAHVKFSNDRATRPKPAVPPWQYRIERRIGGARALIGKLICFREGNTRPRVMRFVRRAFSGTDISPRDYMSRITERIDFLKQKVYAWANRIRRYKRRVDRYTQNRTFQRDERWVYRAWERPDQGVADTRLPDDDAMCSFWRSIWSVPVSHTEGEWTQEVERACDLVPEMGAITISPQDVVRAVRPLPNWKSPGPDGLHNFWIKWFTRSHARLAILFQSALESGSLPVFLTTGITHLLHKSGSTAEPKNYRPITCLPTVYKVLTSILRAKINKHIDDNSIMSASQNGCRNGSRGTKELLLIDMAISQQVRRSRRDLSTCWIDYKKAYDSVPHTWLMRVLELYKVDATLRTFLMSCMGQWRTVLRYPGCRQIQRNSEPIRIERGIFQGDSLSQLWFCLALNPLSTLLEDSGLGYRLRRGGQVISHLLYMDDLKLFAPNDLQLMELLKVTETFSSAIRMEFGVDKCAVMHVKRGEIVESVGTQLSDSINLRSLSATETYKYLGMSEALGINVADMKQSLKERFFGRLKKVFNSLLSGGNKVRAFNGWVMPVLMYSFGILKWTQTELDALDRRVRTLLTAYRMHHPRSSIMRLYIPRKCGGRGFLNAKTLHNREICSLREYFLETDVGMHRDVVAVDKGLTPLSLAKENWRKPLVLDTNDRMEVWQSKELHGRFFRALHGPDVDLSASVAWLRSGDLFGETEGFVCAIMDEVMMTNNYRRFIVKDGTVDICRACHRPGESIRHIISGCSRLANGEYLHRHNLVARIIHQQLALKYNLVESEVPYYKYVPDPVLENGSITLYWDQSIITDRTIVANKPDIVVVDRSERRTMIVDITVPHDENLVKAEKDKKIKYLDLAREVVDMWDVDSAIIVPIVVSAHGLIAKSLDQYLRRLSLGSWIKGLIQKAVLLDTARIVRRFLSLEP

SEQ ID NO: 13064 - protein, 1198 aa, Atethmia centrago
MLTRSAAVRARLPPPDSSLSSASPPPVPSPTVCAVTTPTAAVASSSSDEYFSPPTTPPPVRRRGGRRPPDGLGSRGPPASDRVPAPGGSVKRMRWTQSVNENVMRSYYGATEGGNNLTAYRVRMLSLFQVLEPAVNVSAQRLSDQVRVIQRNHMLDDTVLDRLRSEMQRSHVIVPPSQTVVHSPQLSTNQADEGSDDRATNVSTQCNVELRSALEDAIREYRLMSPELRPRLPRLPMHKKNRALVAALDSQLSNYFDDCEDLTDTHSILYCAAVAVCRVAHVKFAKDSRTTRPKPTVPAWQCRIESRIGGARALIGKLICFREGNTRPRVMRFVRRAFSGTDIGPHDYMTRVTERIDFLKQKVYAWANRIRRYKRRVERYTQNRTFQSDERWVYRGWERPDQDVTDTRLPDDDVMCSFWRSIWSVPVSHTEGDWARKVERACDPIPEMGAITICPQDVARAVRPLPNWKSPGPDGLHNFWLKWFLRSHARLAAQYQTALESGSLPQFLTTGVTHLLHKSGSTAEPKNYRPITCLPTVYKLLTSILRAKINKHIDTNSIMSASQNGCRNGSRGTKELLLIDMTISQQVRRSRKDLSTCWIDYKKAYDSVPHTWLMRVLELYKVDATLRTFLISCMGQWRTVLRYPGCRNIQRNSEPIRIERGIFQGDSLSPLWFCLALNPLSTLLEDSGLGYRMRRGGQVISHLLYMDDLKLFASNNLQLMELLKITESFSSAIRMEFGVDKCAVMHVKRGKIVESVGTQLSDSINLRTLSASETYKYLGMSEALGINVTDMKQSLKERFFGRLKKVFNSLLSGGNKVRAFNGWVMPVLMYSFGILKWTQTELDALDRRVRTLLTAYRMHHPRSSVMRLYIPRKCGGRRFLNAKILHNREVCSLREYFLEADVGMHRDVVAVDKGLTPLSLAKENWRKLVVLDTNDRREVWQSKELHGRFFRALHEPDVDFQASVAWLRFGDLFGETEGFVCAIMDEVIMTKNYRRFIVKDGTVDVCRACHRPGESIRHIISGCSRLANEEYLHRHNLVARIIHQQLALKYSLVESEVPYYRYVPDPVLDNGNITLYWDRSIITDRTIVANKPDIVVVDRTERRAMIVDITVPHDGNLVKAEKDKQIKYLDLAREVVDMWDVDSAIIVPIVVSANGLIAKSLDQHLKRLTLDGWIKGLIQKAVLLDTARIVRRFLSLEP

SEQ ID NO: 13065 - protein, 1199 aa, Atethmia centrago
MLTRAAAARRARLPPPDSSLSSASPPPVPSPTVSAVTTPAAVVASSSSDEYFSPPTTPPPVRRRGGRRPPDGLGPRGPPASDRVPAPGGSVQRMRWTRSINENVMRSYYGATEGGNNLTAYRVRMLSLFQVLEPAVNVSAQRLSDQVRVIQRNHMLDDTVLERLRSEIQSSHVIAPPSQTVVVLPQLDTHQADEGSDDRATNVSTQCNVELRSALEDAIREYRFMSPEVRPRLPRLPMHKKNRALVAVLDSQLSNYFDDCEDLTDTHSILYCAAVAVCRVAHVIFPNDSRATRPKPTVPIWQCRIERRIGGARALIGKLICFREGNTRPRVMRFVRRAFSGTDISPQDYMSRVTERIDFLKQKVYAWANRIRRYKRRVDRYTQNRTFQSDERWVYRGWEQRDQGVTDTRLPDDDVMCSFWRSIWSVPVSHTEGDWARKVERACDPLPEMGAITICPQDVARAVRPLPNWKSPGPDGLHNFWLKWFLGSHARLAAQYQTALESGSLPQFLTIGVTHLLHKSGSTAEPKNYRPITCLPTVYKVLTSILRAKINKHIDTNSIMSASQNGCRNGSRGTKELLLIDMTISQQVRRFRKDLSTCWIDYKKAYDSVPHTWLMRVLELYKVDATLRTFLMSCMGQWRTVLRYPGCRNIQRNSEPIRIERGIFQGDSLSPLWFCLALNPLSTLLEDSGLGYRLRRGGQVISHLLYMDDLKLFASNNLQLMELLKITETFSSAIRMEFGVDKCAVMHVKRGEIVESVGTQLSDSINLRALSASETYKYLGMSEALGINVTDMKQSLKQRFFDRLKKVFNSLLSGGNKVRAFNGWVMPVLMYSFGILKWTQTELDALDRRVRTLLTAYRMHHPRSSVMRLYIPRKCGGRGFLNAKTLHNREVCSLREYFLEADVGMHRDVVAVDKGLTPLSLAKENWRKLVVLDTNDRREVWQSKELHGRFFRALHEPDVDFQASVAWLRFGDLFGETEGFVCAIMDEVIMTKNYRRFIVKDGTVDMCRACHRPGESIRHIISGCTRLANEEYLHRHNLVARIIHQQLALKYSLVESEVPYYRYVPDPVLDNGNITLYWDRSIITDRTIVANKPDIVVVDRTERRAMIVDITVPHDGNLVKAEKDKQIKYLDLAREVVDMWDVDSAIIVPIVVSANGLIAKSLDQHLRRLTLDGWIKGLIQKAVLLDTARIVRRFLSLEP

SEQ ID NO: 13066 - protein, 1198 aa, Atethmia centrago
MLTRSAAVRARLPPPDSSLSSASPPPVPSPTVCAVTTPTAAVASSSSDEYFSPPTTPPPVRRRGGRRPPDGLGSRGPPASDRVPAPGGNVKRMRWTQSVNENVMRSYYGATEGGNNLTAYRVRMLSLFQVLEPAVNVSAQRLSDQIRVIQRNHMLDDTVLDRLRSEMQRSHVIVPPSQTVVHSPQLSTNQADEGSDDRATNVSTQCNMELRSALEDAIREYRLMSPELRPRLPRLPMHKKNRALVAALDSQLSNYFDDCEDLTDTHSILYCAAVAVCRVAHVKFAKDSRTTRPKPTVPAWQCRIESRIGGARALIGKLICFREGNTRPRVMRFVRRAFSGTDIGPQDYMTRVTERIDFLKQKVYAWANRIRRYKRRVERYTQNRTFQSDERWVYRGWERPDQDVTDTRLPDDDVMCSFWRSIWSVPVSHTEGDWARKVERACDPIPEMGAITICPQDVARAVRPLPNWKSPGPDGLHNFWLKWFLRSHARLAAQYQTALESGSLPQFLTTGVTHLLHKSGSTAEPKNYRPITCLPTVYKLLTSILRAKINKHIDTNSIMSASQNGCRNGSRGTKELLLIDMTISQQVRRSRKDLSTCWIDYKKAYDSVPHTWLMRVLELYKVDATLRTFLISCMGQWRTVLRYPGCRNIQRNSEPIRIERGIFQGDSLSPLWFCLALNPLSTLLEDSGLGYRMRRGGQVISHLLYMDDLKLFASNNLQLMELLKITESFSSAIRMEFGVDKCAVMHVKRGKIVESVGTQLSDSINLRTLSASETYKYLGMSEALGINVTDMKQSLKERFFGRLKKVFNSLLSGGNKVRAFNGWVMPVLMYSFGILKWTQTELDALDRRVRTLLTAYRMHHPRSSVMRLYIPRKCGGRGFLNAKILHNREVCSLREYFLEADVGMHRDVVAVDKGLTPLSLAKENWRKLVVLDTNDRREVWQSKELHGRFFRALHEPDVDFQASVAWLRFGDLFGETEGFVCAIMDEVIMTKNYRRFIVKDGTVDVCQACHRPGESIRHIISGCSRLANEEYLHRHNLVARIIHQQLALKYSLVESEVPYYRYVPDPVLDNGNITLYWDRSIITDRTIVANKPDIVVVDRTERRAMIVDITVPHDGNLVKAEKDKQIKYLDLAREVVDMWDVDSAIIVPIVVSANGLIAKSLDQHLKRLTLDGWIKGLIQKAVLLDTARIVRRFLSLEP

SEQ ID NO: 13067 - protein, 1198 aa, Mesoligia furuncula
MLTRLAAKRARLLPPDSSLSSASPPPVPSPTVSAVMTPAAAVASSSSDEYFSPPTTPPPARRRRGRRPPDCLGLRGPPASDRVPAPGGSVQRMRWTQSINENVMRSYYGATEGGNILTAYRVRMLSLFQVLEPAVNVSAQRLSDQVRVIQRNHMLDDTVLDRLRSEMQSSHVIAPQSQTAVILPQPNISHADEGSNDRAIHVSTQCNEELRSALEDAIQEYRFMSPELRPRLPRLPMHNKNRALVAALDSQLSKYFDTCEDLIDTHSILYCAAVAACRVAHVKFANDSRATRPKQAVPAWQCRIERRIGGARTLIGKLICFREGNTRPRVMRFVRRAFSGTDISPQDYMSCVTERIDFLKQKVYAWANRIRRYRRRVERYTQNRTFQSDERWVYRGWERPDQGVAETCLPDDDAMCSFWRNIWSVPVSHTEGDWAREVERACDLIPEMGAITICPQDVARAVRPLPNWKSPGPDGLHNFWIKWFPGSHARLASQFQTALKSGSLPQFLTTGITHLLHKSGSTAEPKNYRPITCLPTVYKVLTSILRTKINKHIDTNSIMSASQNGCRNGSRGTKELLLIDMAISQQVRRFRKDLSTCWIDYKKAYDSVPHTWLMRVLELYKVDTTLRTFLMSCMGQWRTVLRYPGCRNIQRNSEPIRIERGIFQGDSLSPLWFCLALNPLSTLLEDSGLGYRLRRGGQVISHLLYMDDLKLFAPNNFQLMELLKITETFSSAIRMEFGGDKCAVMHVKRGEIVESVGTQLSDSTNLRALSASETYKYLGMSEALGINVTDMKQSVKERFFGRLKKVLNSLLSGGNKVRAFNGWVMPVLMYSFGILKWTQTELDALDRRVRTLLTANRMHHPRSSVMRLYIPRKCGGRGFLNAKTLHNREICSLREYFLETDVGMHRDVVIVDKGLTPLSLAKENWRKPVVLDTKDRMEVWQSKELHGRFLRALRGPDVDLQASVAWLRFGNLFGETEGFVCAIMDEVMMTNNYRRFIVKDGTVDICRACHRPGESIRHIISGCSRLANGEYLHRHNLVARIIHQQLALKYNLVESEVPYYRYVPDPVLENGNITLYWDRSIITDRTIVANKPDIVVVDRSERRAMIVDITVPHDENLVKAEKDKQIKYLDLAREVVDMWDVDTAIIVPIVVTANGLIAKSLDQHLRRLSLGSWIKRLIQRAVLLDTARIVRRFLSLEP

SEQ ID NO: 13068 - protein, 1198 aa, Mesoligia furuncula
MLTRSALRKARLPPPDSSLSSASPPPVPSLTVSAVTTPAVAVASSSSDEYFSPPTTPPPARRRGGRRPPDGLGPRGPPASDRVPAPGGSVQRMRWTRSINENVMRSYYGATEGGNNLTAYRVRMLSLFQVLEPAVNVSAQRLSDQVRVIQRNHMLDDTVLDRLRSEMQSSHVIAPQPQTAVLLPQCNTIHANEGSNDRATNVSTQCNEELRSALEDAIREYRCMSPEHRPHLPRLPMHNKNRALVAALDSQLSNYFDDCEDLTDTHSILYCAAVAACRVAHVKFANDSRATRPKPAIPAWQCRIERRIGGARALIGKLICFREGNTRPRVMRFVRRAFLGTDISPRDYMSCVTERIDFLKQKVYAWANRIRRYKRRVERYTQNRTFQSDERWVYRGWERPDQSVADTCLPDDEAMCSFWRSIWSVPVSHTEGDWAREVERACDPIPEMGAITICPQDVARAVRPLPNWKSPGPDGLHNFWIKWFLRSHARLASQFQTALESGTLPQFLTTGITHLLHKSGSTAEPKNYRPITCLPTVYKVLTSILRTKIDKHINTNSIMSVSQNGCKNGSRGTKELLLIDMAISQQVRRSRKDLSTCWIDYKKAYDSVPHTWLMRVLELYKVDATLRTFLMSCMGQWRTVLRYPGCRNIQRNSEPIRIERGIFQGDSLSPLWFCLALNPLSTLLEDSGLGYRLRRGGQVISHLLYMDDLKLFAPNNLQLMELLKVTQTFSSAIRMEFGVDRCAVMHVKRGEIVESVGTQLSDSTNLRALSASETYKYLGMSEALGINVTDMKQSLKERFFGRLKKVLNSQLSGGNKVRAFNGWVMPVLMYSFGILKWTQTELDALDRRVRTLLTANRMHHPRSSVMRLYIPRKCGGRGFLNAKTLHNREICSLREYFLETDVGMHRDVVAVDKGLTPLSLAKENWRKPVVLDTNDRMEVWQSKELHGRFFRALHGPDVDLLASVAWLRFGDLFGETEGFVCAIMDEVMMTNNYRRFIVKDGTVDICRACHRPGESIRHIISGCSRLANGEYLHRHNLVARIIHQQLALKYSLVESEVPYYRYVPDPVLENGNISLYWDRSIITDRTIVANKPDIVVVDRSERRAMIVDITVPHDENLVKAEKDKQIKYLDLAREVIDIRDVDSAIIVPIVVTANGLIAKSLDQHLRRLSLGSWIKGLIQRAVLLDTARIVRRFLSLEP

SEQ ID NO: 13069 - protein, 1207 aa, Mesoligia furuncula
MLTRSRARQLNKTTHPTSSGSSLSSASPLPEPAPDGGPETPAAAVASSSSDEYFSPPTTPPPPVCRRGRGRPPASLGLRGPPASDRVPAPGGSVQRMRWTQTVNENVMRAYFGATEGGSNLTAYRGRMLSLFQVLEPAINVSAQRLSDQVRVILRNHMLDNVVLDRLRLESRNSHVTSASSSVAVQLQNLPNVSQRPDRVDVEDGDEAISVSPQCNARLRSALEDAFCEYRSVPPGLRPRLPRLPMHKKNTALVCALDSQLSNYFNDSKDLTDTHSILYCAAVAACRVAHVNFPNSDRAPRPKPAVPAWQCRIECRIGEARALIGKLICFREGNTRPRVMRFVRRAFSGTDISSRDYLSRVTERIDFLKQKICAWANRIRRYRRRVERYTQNRTFQSDERWVYRTWERPDHGVTDTRLPDDDAMCSFWRNIWSVPVSHTEGDWTRKIERTCDLLPEMGVLTISPQDVARAVRPLPNWKSPGPDGLHNFWIKWFQGSHARLASQFQSALESGSLPKFLTTGITHLLHKSGSTADPKNYRPITCLPTVYKVLTSILRAKINKHIDTNSIMSVSQNGCGNGSRGTKELLLIDMTISQQVRRFRKDLSTCWIDYKKAYDSVPHTWLMRVLELYKVDTTLRTFLMSCMGQWRTVLRYPGCRNIQRNSEPIRIERGIFQGDSLSPLWFCLALNPLSTLLEDSGLGYRLRRGGQVISHLLYMDDLKLFAPNNLQLMELLKITETFSSAIRMEFGVDKCAVMHVKRGEIVESVGTQLSDSTNLRALSASETYKYLGMSEALGINVTDMKQSLKERFFGRLKKVFNSLLSGGNKVRAFNGWVMPVLMYSFGILKWTQTELDALDRKVRTLLTANRMHHPRSSVMRLYIPRKCGGRGFLNAKTLHNREICSLREYFLETDVGMHRDVVAVDKGLTPLSLGKENWRKPVVLDTNDRMEVWQSKELHGRFFRALHGPDVDLIASVAWLRFGDLFGETEGFVCAIMDEVMMTNNYRRFIVKDGTVDICRACHRPGESIRHIISGCSRLANGEYLHRHNLVARIIHQQLALKYSLVESEVPYYRYVPDPVLENGNISLYWDRSINTDRTIVANKPDIVVVDRSERRAMIVDITVPHDENLVKAEKDKQVKYLDLAREVVDMWDVDSAIIVPIVVTANGLIAKSLDQHLKRLSLGSWIKGLIQKAVLLDTARIVRRFLSLEP

SEQ ID NO: 13070 - protein, 1045 aa, Mesoligia furuncula
MLDDTVLDRLRNEMQSSHVIAPQPQTAVLLPQCNTNHADEGSNDRATNVSTQCNEELRSALEDAIREYRFMSPEHRPRLPRLPMHNKNRALVAALDSQLSNYFDDCEDLTDTHSILYCAAVAVCRVAHVKFANDSRATRPKPAIPAWQCRIERRIGGARALIGKLICFREGNTRPRVMRFVRRAFLGTDISPQDYMSCVTERIDFLKQKVYAWANRIRRYKRRVERYTQNRTFQSDERWVYRSWERPDQSVADTCLPDDEAMCSFWRNIWSVPVSHTEGDWAREVERACDPIPEMGAITICPQDVARAVRPLPNWKSPGPDGLHNFWIKWFLRSHARLASQFQTALESGSLPQFLTTGITHLLHKSGSTTEPKNYRPITCLPTIYKVLTSILRAKINKHINTNSIMSVSQNGCKNGSRGTKELLLIDMAISQQVRRSRKDLSTCWIDYKKAYDSVPHTWLMRVLELYKIDATLRTFLMSCMGQWRTVLRYPGCRNIQRNSEPIRIERGIFQGDSLSPLWFCLALNPLSTLLEDSGLGYRLRRGGQVISHLLYMDDLKLFAPNNLQLMELLKVTQTFSSAIRMEFGVDKCAVMHVKRGEIVESVGTQLSDSTNLRALSASETYKYLGMSEALGINVTDMKQSLKERFFGRLKKVLNSLLSGGNKVRAFNGWVMPVLMYSFGILKWTQTELDALDRRVRTLLTANRMHHPRSSVMRLYIPRKCGGRGFLNAKTLHNREICSLREYFLETDVGMHRDVVAVDKGLTPLSLAKENWRKPVVLDTNDRMEVWQSKELHGRFFRALHGPDVDLLASVAWLRFGDLFGETEGFVCAIMDEVMMTNNYRRFIVKDGTVDICRACHRPGESIRHIISGCSRLANGEYLHRHNLVARIIHQQLALKYSLVESEVPYYRYVPDPVLENGNISLYWDRSIITDRTIVANKPDIVVVDRSERRAMIVDITVPHDENLVKAEKDKQIKYLDLAREVVDMWDVDSAIIVPIVVTANGLIAKSLDQHLRRLSLGSWIKGLIQKAVLLDTARIVRRFLSLEP

SEQ ID NO: 13071 - protein, 1198 aa, Mesoligia furuncula
MLTRLAARRARLLPPDSSLSSASPPPVPSPTVSAVMTPAAAVASSSSDEYFSPPTTPPPARRRRGRRPPDGLGLRGPPASDRVPALGGSVQRMRWTQSINENVMRSYYGATEGGNILTAYRVRMLSLFQVLEPAVNVSAQRLSDQVRVIQRNHMLDDTVLDRLRSEMQSSHVIAPQSQTAAILPQPNISHTDEGSNDRAINVSTQCNEELRSALEDAIQEYRFMSPELRPRLPRLPMHNKNRALVAVLDSQLSKYFDTCEDLIDTHSILYCAAVAACRVAHVKFANDSRATRPKQAVPAWQCRIERRIGGARTLIGKLICFREGNTRPRVMRFVRRAFSGTDISPQDYMSCVTERIDFLKQKVYAWANRIRRYRRRVERYTQNRTFQSDERWIYRGWERPDQGVAETCLPDDDAMCSFWRSIWSVPVSHTEGDWAREVERACDPIPEMGAITICPQDVARAVRPLPNWKSPGPDGLQNFWIKWFPRSHARLASQFQTALESGSLPQFLTTGITHLLHKSGSTAEPKNYRPITCLPTVYKVLTSILRTKINKHIDTNSIMSASQNGCRNGSRGTKELLLIDMAISQQVRRFRKDLSTCWIDYKKAYDSVPHTWLMRVLELYKVDTTLRTFLMSCMGQWRTVLRYPGCRNIQRNSEPIRIERGIFQGDSLSPLWFCLALNPLSTLLEDSGLGYRLRRGGQVISHLLYMDDLKLFAPNTLQLMELLKITETFSSAIRMEFGVDKCAVMHVKRGEIVESVGTQLLDSTNLRALSASETYKYLGMSEALGINVTDMKQSVKERFFGRLKKVLNSLLSGGNKVRAFNGWVMPVLMYSFGILKWTQTELDALDRRVRTLLTANRMHHPRSSVMRLYIPRKCGGRGFLNAKTLHNREICSLREYFLETDVGMHRDVVIVDKGLTPLSLAKENWRKPVVLDTNDRMEVWQSKELHGRFLRALRGPDVDLQASVAWLRFGNLFGETEGFVCAIMDEVMMTNNYRRFIVKDGTVDICRACHRPGESIRHIISGCSRLANGEYLHRHNLVARIIHQQLALKYNLVESEVPYYRYVPDPVLENGNITLYWDRSIITDRTIVANKPDIVVVDRSERRAMIVDITVPHDENLVKAEKDKQIKYLDLAREVVDMWDVDTAIIVPIVVTANGLIAKSLDQHLRRLSLGSWIKGLIQRAVLLDTARIVRRFLSLEP

SEQ ID NO: 13072 - protein, 868 aa, Mesoligia furuncula
MRFVRRAFSGTDISPQDYMSCVTERIDFLKQKVYAWANRIRRYRRRVERYTQNCTFQSDERWVYRGWERPDQGVAETCLPDDDAMCSFWRNIWSVPVSHTEGDWAREVERACDPIPEMGAITICPQDVARAVRLLPNWKSPGPDGLHNFWIKWFPRSHALLASQFQTALKSGSLPQFLTTGITHLLHKSGSTAEPKNYRPITCLPTVYKVLTSILRTKINKHIDTNSIMSASQNGCRNGSRGTKELLLIDMAISQQVRRFRKDLSTCWIDYKKAYDSVPHTWLMRVLELYKVDTTLRTFLMSCMGQWRTVLRYPGCRNIQRNSEPIRIERGIFQGDSLSPLWFCLALNPLSTLLEDSGLGYRLRRGGQVISHLLYMDDLKLFAPNNLQLMELLKITETFSSAIRMEFGVDKCAVMHVKRGEIVESVGTQLSDSTNLRALSASETYKYLGMSEALGINVTDMKQSVKERFFGRLKKVLNSLLSGGNKVRAFNGWVMPVLMYSFGILKWTQTELDALDRRVRTLLTANRMHHPRSSVMRLYIPRKCGGRGFLNAKTLHNREICSLREYFLETDVGMHRDVVIVDKGLTPLSLAKENWRKPVVLDTNDRMEVWQSKELHGRFLRALRGPDVDLQASVAWLRFGNLFGETEGFVCAIMDEVMMTNNYRRFIVKDGTVDICRACHRPGESIRHIISGCSRLANGEYLHRHNLVARIIHQQLALKYNLVESEVPYYRYVPDPVLENGNITLYWDRFIITDRTIVANKPDIVVVDRSERRAMIVDITVPHDENLVKAEKDKQIKYLDLAREVVDMWDVDSAIIVPIVVTANGLIAKSLDQHLKRLSLGSWIKGLIQKAVLLDTARIVRRFLSLEP

SEQ ID NO: 13073 - protein, 868 aa, Spilarctia lutea
MRFVKRAFLGTNFSPQEYMSCVTERIDFLKQKVYAWANRIRRYRKRIDRYNQNRMFQSNEKWVYRKWENLSPCMSDGQVPDENATNSFWHSIWSVPVTHTEGDCYRDVERSCESLLPMEPIRIDEEDVSCAVRSLTNWKAPGPDGLHNFWLKWFRSSHACLASQFQTALDSGSLPQILTIGITHLLFKSGSTMDPKNFRPITCLPTLYKLLTSILRLKITTHINHNSILSISQNGCRSGTRGTKELLIIDMTISQQVRRNRKSLATCWIDYKKAFDSVPHTWLLKVLELYKIDTTLCTFLKLCMGQWRTVLRYPGCRQSAMNDVLIKIERGIFQGDSLSPLWFCLALNPLSTLLEGSRLGYRLQKDDRVISHLLYMDDLKLLAPTKLQLTALLKVTENFSNSIKMEFGVDKCAVMYVKKGEIVESEGIELSDSTKLRSLSATETYKYLGFSQSLGIPESDMKQTLRERFFSRLRKVFKSLLSGGNKVRACNGWVMPVLMYSFGVLRWTQTELDAIDRRVRTLLTAFRMHHPRSSVMRLYIPRRLGGRGLLNIKTLHNREVYNLREYFLQTDVGVHRSVVTVDTGLTPLALAKENWRKPVVLSTNDCREVWKGKVLHGRFYRALNGPDIDFKASTSWLRYGDLFGETEGFVCAIMDEVIMTNNYRKYILKDGTVDICRACHRPGESIRHIISGCSRLANGEYLHRHNQVARIIHQQLALKYNLVSSEVPYYRYVPNPVLENGRATLYWDRSIITDRTIVANKPDIVVIDRLERRVMIVDIAVPHDENLVKVEKEKQIKYLDLSHEIVDMWNVDSVIIVPIIVSVHGLIAKSLDQHLKKLTLEGWIKGLIQKAVLLDTARIVRRFLSLGP

SEQ ID NO: 13074 - protein, 1197 aa, Spilarctia lutea
MLTRARRRALITSPDSSLRSALPSPEEAIEVPAGAEASSSSSSDEFFSPPTSPIPVRRQGRDRPPTSLGSRGPLTSNRAPATGGDVRRMKWTHSINENVMRAYFRATELGTNLTAYRVRLVSLFQGLEPAVNVSAQRLSDQVRAIQRCHLLDDAVLERIRSDVRNTLTIPSSSHTVDVVVNTPQLPDNHDVDEQRESEIISVSTQCNDRIRSALEDAIQEYRYVNYNNRPRLPRLPIHKRNLALVGALNSLLPDYFGNSEDLGDTHSILYCAAIAVCRVVGVKFIERITTRTKNTVPAWQYRIERRIAETRTLIGKLISFKSGNTQPRVMRFVKQAFLGTTISPQQYMSSVTERIDFLKQKVCAWANRIRRYKKRGDRFNQNRMFQTNEKWVYRKWEAPNPCDRDGHLPDENATNTFWRNIWSVPVTHTDGDWMRDVKRSCESITNMEPVRINKEDVSCAVRSLPNWKAPGPDGLHNFWLKWFRSSHACLASQFQAALDSGSLPQFLTTGITHLLYKSGGTMDPKNFRPITCLPTLYKLLSSILRIKITTHINHNSILSISQNGCRSGTRGTKELLIIDMTISQQVRRNRRNLATCWIDYKKAYDSVPHTWLLKVLELYKIDKTLCTFLKSCMGQWRTVLRYPGCQQSPMTDVLIKIERGIFQGDSLSPLWFCLALNPLSTLLEGSELGYGLRKDDRVISHLLYMDDLKLLAPTKLQLTALLKITENFSNSIKMEFGVDKCAVMYVKKGLIVESEGVELSDSTKLRSLSVTEGYKYLGFTQSLGIPESDMKQALRERFFGRLKKVLKSLLSGGNKVRACNGWVMPVLMYSFGILRWTQTELDALDRGVRTLLTAFRMHHPRSSVMRLYIPRKLGGRGLLNIKTLHNREIYNLREYFLHTDVGMHRSVVAVDTGLTPLALAKENWRKPVVLSTDDRREVWKGKELHGRFYRALHGPDIDFKTSTSWLRYGDLFGETEGFVCAIMDEVIMTNNYRRYILKDGTVDICRACHRPGESIRHIISGCSRLANGEYLHRHNQVARIVHQQLALKYNLVISEVPYYRYVPDPVLENGRATLYWDRSIITDRTIVANKPDIVVIDRLERRAIIIDIAVPHDDNLVKVEKEKQIKYLDLSHEIVDMWNVDSVIIVPIVVSVHGLIARSLDQHLKRLTLDGWIKGLIQKAVLLDTARIVRRFLSLEP

SEQ ID NO: 13075 - protein, 1199 aa, Spilarctia lutea
MLTRARRRAQLSPPDSSLRSALPSPEEAIEVPAGAEASSSSSSDEFFSPPTSPIPVRRQGRGRPPTSLGSRGPLTSNRAPAAGGDVRRMKWTHSINENVMRAYFRATELGTNLTAYRVRLVSLFQELEPAVNVSAQRLSDQVRAIQRCHLLDDAALERIRSDIRNSLTVPSSSHVLNVVTNSTPQVPQNDDISELVDSEIISVSTQYNDRIRSTLEDAIREYRYVNLNNRPRLPRLPIHKRNLALVSALDSLLPKYFSNSEDLSDTHSILYCAAIAVCRVAGVKFAEYTTTTRQENTLPAWQYRIERRIAEARTLIGKLMSFRSGNTRPRVMRFVKRAFLGTTISPQEYMSCVTERIDFLKQKVYAWANRIRRYRKRVDRYNQNRMFLRNEKWVYRKWENLSPCMSDGQVPDENATNSFWRNMWSVPVTHTEGDWYRDVERSCESLLPMEPISIDEEDVSCAVRSLPNWKAPGPDGLHNFWLKWFRSSHACLASQFQTALDSGSLPQFLTTGITHLLYKSGDAMDPKNFRPITCLPTLYKLLTSILRLKITTHINHNSILSISQNGCRSGTRGTKELLIIDMTISQQVRRNRKSLATCWIDYKKAFDSVPHTWLLRVLKLYKIDTTLCTFLKVCMGQWRTALRYPGCRQSAMNDVLIKIERGIFQGDSLSPLWFCLALNPLSTLLEGSGLGYRLQKDDRVISHLFYMDDLKLLAPTKLQLTALLKVTENFSNSIKMGFGVDKCAVMYVKKGEIVESEGIELSDSTKLRSLSATETYKYLGFSQSLGMPESDMKQTLRERFFSRLKKVLKSLLSGGNKVRACNGWVMPVLMYSFGVLRWTQTELDAIDRRVRTLLTAFRMHHPRSSVMRLYIPRRLGGRGLLNIKTLHNREVYNLREYFLQTDVGVHRSVVTVDTGLTPLALAKENWRKPVVLSTNDRREVWKGKVLHGRFYRALNGPDIDFKASTSWLRYSDLFGETEGFVCAIMDEVIMTNNYRRYILKDGTVDICRACHRPGESIRHIISGCSRLANGEYLHRHNQVARIVHQQLALKYNLVISEVPYYRYVPDPVLENGRATLYWDRSIITDRTIVANKPDIVVIDRLERRAMIVDIAVPHDENLVKVEKEKQIKYLDLSHEIVDMWNVDSVIIVPIVVSAHGLIAKSLDQHLKRLTLGGWIKGLIQKAVLLDTARIVRRFLSLEP

SEQ ID NO: 13076 - protein, 1199 aa, Spilarctia lutea
MLTRARRRAQLSPPDSSLRSALPSPEEAIEVPAGAEASSSSSSDEFFSPPTSPIPVRRQGRGRPPTSLGSRGPLTSNRAPAAGGDVRRMKWTHSINENVMRAYFRATELGTNLTAYRVRLVSLFQELEPAVNVSAQRLSDQVRAIQRCHLLDDAALERIRSDIRNSLTVPSSSHVLNVVTNSTPQAPQNDDISELVDSEIISVSTQYNDRIRSTLEDAIREYRYVNLNNRPRLSRLPIHKRNLALVSALDSLLPKYFSNSEDLSDTHSILYCAAIAVCRVAGVKFSEYTTTTRQENTLPAWQCRIERRIAEARTLIGKLMSFRSGNTRPRVMRFVKQAFLGTTISPQEYMSCVTERIDFLKQKVYAWANRIRRYRKRVDRYNQNRMFQKNERWVYRKWENLSSCMSDGQVPDENATNSFWHSIWSVPVTHTEGDWYRDVERSCESLLPMEPISIDEEDVSCAVRSLPNWKAPGPDGLHNFWLKWFRSSHACLASQFQTALDSGSLPQFWTTGITHLLYKSGDAMDPKNFRPITCLPTLYKLLTSILRLKITTHINHNSILSISQNGCRSGTRGTKELLIIDMTISQQVRRNRKSLATCWIDYKKAFDSVPHTWLLKVLELYKIDTTLCTFLKVCMGQWRTALRYPGCRQSAMNDVLIKIERGIFQGDSLSPLWFCLALNPLSTLLEGSGLGYRLQKDDRVISHLLYMDDLKLLAPTKLQLTALLKVTENFSNSIKMEFGVDKCAVMYVKKGEIVESEGIELSDSTKLRSLSATEAYKYLGFSQSLGIPESDVKQTLRERFFSRLKKVLKSLLSGGNKVRACNGWVMPVLMYSFGVLRWTQTELNAIDRRVRTLLTAFRMHHPRSSVMRLYIPRRLGGRGLLNIKTLHNREVYNLREYFLQTDVGVHRSVVTVDTGLTPLALAKENWRKPVVLGTNDRREVWKGKVLHGRFYRALNGPDIDFKASTSWLRYSDLFGETEGFVCAIMDEVIMTNNYRKYILKDGTVDICRACHRPGESIRHIISGCSRLANGEYLHRHNQVARIVHQQLALKYNLVISEVPYYRYVPDPVLENGRATLYWDRSIITDRTIVANKPDIVVIDRLERRAMIVDIAVPHDENLMKVEKEKQIKYLDLSHEIVDMWNVDSVIIVPIVVSAHGLIAKSLDQHLKRLTLGGWIKGLIQKAVLLDTARIVRRFLSLEP

SEQ ID NO: 13077 - protein, 1172 aa, Xestia c-nigrum
MLTRAAARRARLPPPDPSLSSASPPPEPSPIVSAVTPAVAVASSSSDEYFSPPTTPPPARRRGGRRPPDGLGPRGPPASDRVPASGGSVQRMRWTQSNNENVMRAYYGATEGGNNLTAYRVRMLSLFQVLEPAVNVSAQRLSDQVRVIQRNRMLDDTVLDRLRTEMHSSHVIATPPLQAVVPPQSTTITYRDDDVSSDMITNVGTQYSEDMRSALEGAIREYRFMTPELRPRLPRLPMHNKNRMLVAVLDSQLSNYFDNCEDLTDVHSILYCAAVAACRVARVKFSDDRATRPKPAVPAWQYRIEQRIGGARALIGKLICFREGNTRPRVMRFVRRAFSGTDINPRDYMSRVTERIDFLKQKVYAWASRIRRYKRRVDRYTQNRTFQRDERWVYRAWERPDQGVADTRLPDDDAMCSFWRSIWSVPVSHAEGEWTRVIERACDPVPEMGAITISHQDVACAVRPLPNWKSPGPDGLHNFWIKWFTRSHARLATLFQSALESGSLPEFLTTGITHLLHKSGSTAEPKNYRPITCLPTVYKVLTSILRTKICKHVDDNSVMSASQNGCRNGSRGTKELLLIDMAISQQVRRSRKDLSTCWIDYKKAYDSVPHTWLMRVLELYKVDATLRTFLMSCMGQWRTVLRYPGCRQIQRNSEPIRIERGIFQGDSLSPLWFCLALNPLSTLLEDSGLGYQLRKDGRVISHLLYMDDLKLFAPNDLQLMELLKVTETFSSAIRMEFGVDKCAVMHVKRGEIVESVGTQLSDSINLRSLSATETYKYLGMSEALGINVADMKQSLKERFFGRLKKVFNSLLSGGNKVRAFNGWVMPVLMYSFGILKWTQTELDALDTKVRKLLTAFRMHHPRSSVMRLYIPRKCGGRGFLNAKTLHNREICSLRDYFLEADVGMHRDVVTMDKGLTPLSLAKENWRKPIILTTDDRRKEWQGKELHGRFYRALHGPDVDFLASVSWLRSGDLFGETEGFVCAIMDEVMMTNNYRRFIVKDGTVDICRACHRPGESIRHIISGCSRLANGEYLHRHNLVARIIHQQLALKYNLVESEVPYYRYVPDPVLVNGSITLYWDQSIITDRTVIANRPDIVVMDRSERRAMIVDITVPHDENLVKAEKDKQIKYLDLAREVVDMWEVDSAIIVPIVVSAHGLIAKSLDQHLRRLSLGS

SEQ ID NO: 13078 - protein, 1199 aa, Xestia c-nigrum
MLTRAAARRARLSPPDPSLSSASPPPEPSPIVSAVTPAVAVASISSDEYFSPPTTPPPARRRGGRRPPDGLGPRGPPASDRVPAPGGSVQRMRWTQSNNENVMRAYYGATEGGNNLTAYRVRMLSLFQVLEPAVNVSAQRLSDQVRVIQRNRMLDDTVLDRLRTEVQSSRVTATPPSQAVVPPQSTVTTPYCDGDVSSDMVTNVSTQCSEDMRSALEGAIREYRFMTPKLRPRLPRLPMHNKNKMLVAVLDSQLSNYFDSCEDLTDIHSILYCAAVAACRVAHVKFSDDRATRPKPAVPAWQYRIEQRIGGARALIGKLICFREGNTRPRVMRFVRRAFSGTDISPRDYISRVTERIDFLKQKVYAWASRIRRYKRRVDRYTQNRTFQRDERWVYRAWERPDRGVADTRLPDDDAMCSFWRSIWSVPVSHAEGEWTRVVERACDPVLEMGASTISPQDVACAVRPLPNWKSPGPDGLHNFWIKWFTRSHARLATLFQSALESGSLPEFLTTGITHLLHKSGSTTEPKNYRPITCLPTVYKVLTSILRTKISKHIHENSIMSASQNGCRNGSRGTKELLLIDMAISQQVRRSRKDLSTCWIDYKKAYDSVPHTWLMRVLELYKVDATLRTFLMSCMGQWRTVLRYPGCRQIQRNSEPIRIERDIFQGDSLSPLWFCLALNPLSTLLEDSGLGYRLRKDGRVISHLLYMDDLKLFAPNDLQLMELLKVTETFSSAIRMEFGVDKCAVMHVKRGEIVESVGTQLSDSTNLRSLSATETYKYLGMSEALGVNVADMKQSLKERFFGRLKKVFNSLLSGGNKVRAFNGWVMPVLMYSFGILKWTQTELDALDTKVRKLLTAYRMHHPRSSVMRLYIPRKCGGRGFLNAKTLHNREICSLREYFLPADVGMHRDVVAMDKSLTPLSLAKENWRKPVVFTTDDRRKEWQSKKLHGRFYRALHGPDVDFQASVSWLRSGDLFGETEGFVCAIMDEVMMTNNYRKFIVKDGTVDICRACHRPGESIRHIISGCSRLANGEYLHRHNLVARIIHQQLALKYNLVESEVPYYRYVPDPVLVNGSITLYWDQSIITDRTVIANRPDIVVMDRSERRAMIVDITVPHDENLVKAEKDKQIKYLDLAREVVDMWEVDSAIIVPIVVSAHGLIAKSLDQYLRRLSLGSWIKGLIQKAVLLDTARIVRRFLSLEP

SEQ ID NO: 13079 - protein, 1194 aa, Xestia c-nigrum
MLTRAAARRARLPPPDPSLSSASPPPEPSPIVSAVTPAVAVASSSSDEYFSPPTTPPPARRRGGRRPPDGLGPRGPPASDRVPAPGGSVQRMRWTQSNNENVMRAYYGATEGGINLTAYRVRMLSLFQVLEPAVNVSAQRLSDQVRVIQRNRMLDDTVLDRLRTEVQSSRVTATPPSQAVVPPQSTVTTPYCDGDVSSDMVTNVSTQCSEDMRSALEGAIREYRFMTPELRPRLPRLPMHNKNKMLMAVLDSQLSNYFDSCEDLTDIHSILYCAAVAACRVAHVKFSDDRATRPKQQYRIEQRIGGARALIGKLICFREGNTRPRVMRFVRRAFSGTDISPRDYMFRVTERIDFLKQKVYAWASRIRRYKRRVDRYTQNRTFQRDERWVYRAWERPDQGVADTRLPDDDAMCSFWRSIWSVPVSHAEGEWTRVVERACDPVPEMGAITISPQDVACAVRPLPNWKSPGPDGLHNFWIKWFTRSHARLATLFQSALESGSLPEFLTTGITHLLHKSGSTAEPKNYRPITCLPTVYKVLTSILRAKITKHIDENSFMSASQNGCRNGSRGTKELLLIDMAISQQVRRSRKDLSTCWIDYKKAYDSVPHTWLRRVLELYKVDATLRTFLMSCMGQWRTVLRYPGCRQIQRNSEPIRIERGIFQGDSLSPLWFCLALNPLSTLLEDSGLGYRLRKDGRVISHLLYVDDLKLFAPNDFQLMELLKVTETFSSAIRMEFGVDKCAVMHVKRGGIVESVGTQLSDSINLRSLSATETYKYLGMSEALGISVADMKQSLKERFFGRLKKVFNSLLSGGNKVRAFNGWVMPVLMYSFGILKWTQTELDALDTKVRKLLTAYRMHHPRSSVMRLYIPRKCGGRGFLNAKTLHNREICSLREYFLAADVGMHRDVVAMDKGLTPLSLAKENWRIPVVFTTDDRRKEWQSKELHGRFYRALHGPDVDFQASVSWLRSGDLFGETEGFVCAIMDEVMMTNNYRRFIVKDGTVDICRACHRPGESIRHIISGCSRLANGEYLHRHNLVARIIHQQLALKYNLVESEVPYYRYVPDPVLVNGSITLYWDQSIITDRTVIANRPDIVVMDRSERRAMIVDITVPHDENLVKAEKDKQIKYLDLAREVVDMWEVDSAIIVPIVVSAHGLIAKSLDQHLRRLSLGSWIKGLIQKAVLLDTARIVRRFLSLEP

SEQ ID NO: 13080 - protein, 1199 aa, Xestia c-nigrum
MLTRAAARRARLSPPDPSLSSASPPPEPSPIVSAVTPAVAVASSSSDEYFSPPTTPPPARRRGGRRPPDGLGPRGPPASDRVPAPGGSVQRMRWTQSNNENVMRAYYGATEGGINLTAYRVRMLSLFQVLEPAVNVSAQRLSDQVRVIQRNRMLDDTVLDRLRTEVQSSRVTATPPSQAVVPPQSTVTTPYCDGDVSSDMVTNVSTQCSEDMRSALEGAIREYRFMTPELRPRLPRLPMHNKNKMLMAVLDSQLSNYFDSCEDLTDIHSILYCAAVAACRVAHVKFSDDRATRPKPAIPAWQYRIEQRIGGARALIGKLICFREGNTRPRVMRFVRRAFSGTDISPRDYMFRVTERIDFLKQKVYAWASRIRRYKRRVDRYTQNRTFQRDERWVYRAWERPDQGVADTRLPDDDAMCSFWRSIWSVPVSHAEGEWTRVVERACDPVPEMGAITISPQDVACAVRPLPNWKSPGPDGLHNFWIKWFTRSHARLATLFQSALESGSLPEFLTTGITHLLHKSGSTAEPKNYRPITCLPTVYKVLTSILRAKITKHIDENSVLSASQNGCRNGSRGTKELLLIDMAISQQVRRSRKDLSTCWIDYKKAYDSVPHTWLRRVLELYKVDATLRTFLMSCMGQWRTVLRYPGCRQIQRNSEPIRIERGIFQGDSLSPLWFCLALNPLSTLLEDSGLGYQLRKDGRVISHLLYMDDLKLFAPNDLQLMELLKVTETFSSAIRMEFGVDKCAVMHVKRGGIVESVGTQLSDSINLRSLSATETYKYLGMSEALGISVADMKQSLKERFFGRLKKVFNSLLSGGNKVRAFNGWVMPVLMYSFGILKWTQTERDALDTKVRKLLTAYRMHHPRSSVMRLYIPRKCGGRGFLNAKTLHNREICSLREYFLAADVGMHRDVVAMDKGLTPLSLAKENWRIPVVFTTDDRRKEWQSKELHGRFYRALHGPDVDFQASVSWLRSGDLFGETEGFVCAIMDEVMMTNNYRRFIVKDGTVDICRACHRPGESIRHIISGCSRLANGEYLHRHNLVARIIHQQLALKYNLVESEVPYYRYVPDPVLNSGSITLYWDQSIITDRTVIANRPDIVVMDRSERRAMIVDITVPHDENLVKAEKDKQIKYLDLAREVVDMWEVDSAIIVPIVVSAHGLIAKSLDQHLRRLSLGSRIKGLIQKAVLLDTARIVRRFLSLEP

SEQ ID NO: 13081 - protein, 981 aa, Griposia aprilina
MYLTTLTHKHHLLFNICNNNNNNNKLPQPITSQADEGRDDRATNVSTQCNEELRSALEDAIREYRFMSPELRPRLPRLPMHNKNRALVATLDSQLSNYIDDCEDLTDTHSILYCAAVAACRVAHVKFANDSRATRPKPAVPAWQCRIERRIGGARALIGKLTCFREGNTRPRVMRFVRRAFAGTNISPQDYMSCVTERIDFLKQKVYAWANRIRRCKRRVERYTQNRTFQRDERWVYRDWERPDQGVTDTYLPDDDAMCSFWRNIWSVPVSHTEGDWTREVERACEPIPEMGAITICPQDVARAVRPLPNWKSPGPDGLHNFWIKSFLRSHARLAAQFQVALESGSLPQFLTTGVTHLLHKSGSTAEPKNYRPITCLPTVYKVLTSILRAKINNHIDTNSIMSPSQNGCRNGSRGTKELLLIDMTISQQVRRSRKDLSTCWIDYKKAYDSVPHPWLMRVLELYKVDSTLRTFLKSCMGQWRTVLHYPGCRNVQRNSEPIRIERGIFQGDSLSPLWFCLALNPLSTLLENSGLGYRLRRGGQVISHLLYMDDLKLFAPNNLQLMELLKVTETFSSAIRMEFGVDKCAVMHVKRGEIVESVGTQLSDSINLRALSASETYKYLGISEALGINGTDMKQSLKERFFGRLKKVFNSLLSGGNKVRAFNGWVMPVLMYSFGILKWTQTELDALDKKVRSLLTANRMHHPRSSVMRLYIPRKCGGRGFLNAKTLHNREICSLREYFLEADVGMHRDVVTVDKGLTPLSLAKENWRKPVVLNTNDRMEVWQSKELHGRFFRALHGPDVDQLASVAWLRYGDLFGETKGFVCAIMDEVMMTKNYRRFIVKDGTVDICRACHRPGESIRHIISGCSRLANEEYLHRHNLVAKIIHQQLALKYSLVESEVPYYRYVPDPVLDNGHITLYWDRSIITDRTIVANKPDIVVVDRIERRAVIVDITIPHDGNLVKAEKDKQIKYLDLAREVVDM

SEQ ID NO: 13082 - protein, 1199 aa, Griposia aprilina
MMLTRSAKRRAHPPPPDSSLSSASPPPVSSPTVSAVTTPAAVVASSSSDEYFSPPTTPPPVRRRGGHRPPDGLGPQGPPASDRVPAPGGSVQRMRWTRSINENVMRSYYGATEGGNNLTAYRVRMLSLFQVLEPAVNVSAQRLSDQVRVIQRNHMLDDTVLDRLRNEMQSSHVIAPPSQTVVVLPQSNTSQADEESDDRATNVSTQCNDELRSALEDAIREYRFISPELRPRLPRLPMHNKNRVLVAALDAQLSNYFDDCVDLTDTHSILYCAAVAACRVAHIKFANDSRPTRPKPAVPAWQCRIERRIGGARALIGKLICFREGNTRPRVMRFVRRAFAGTNISPQDYMSCVTERIDFLKQKVYAWANRIRRYKRRVERYTQNRTFQRDERWVYRGWERPDQGVADTCLPDDDAMCSFWRNIWSVPVSHTEGDWGREVERACDPIPEMGAISICPQDVTRAVRPLPNWKSPGPDGLQNFWIKWFGRSHARLAAQYQVAIESGSLPHFLTTGVTHLLHKSGSTAEPKNYRPITCLPTVYKVLTSILRAKINKHIDTNSIMSPSQNGCRNGSHGTKELLLIDMAISQQVRRSRKDLSTCWIDYKKAYDSVPHTWLVRVLELYKVDATLRTFLKSCMGQWRTILHYPGCRNIQRDNEPIRIERGIFQGDSLSPLWFCLALNPLSTLLEDSGLGYRLRRGGQVISHLLYMDDLKLFAPNNLQLMELLKVTETFSSAIRMEFGVDKCAVMHVKRGEIVESVGTQLSYSINLRALSASDTYKYLGMSEALGINGTDMKQSLKERFFGRLKKVFNSLLSSGNKVRAFNGWVMPVLMYSFGILKWTQTELDALDRKVRTLLTANRMHHPRSSVMRLYIPRKCGGRGFLNAKTLHNREICSLREYFLEADVGMHTDVVKVDKGLTPLSLAKENWRKPVVLDTNDRMEVWQSKELHGRFFRALHGPDVDQLASVAWLRFGDLFGETEGFVCAIMDEVILTNNYRRHIMKDGTVDVCRACHRPGESIRHIISGCSRLANEEYLHRHNLVARIIHQQLALKYSLVESEVPYYRYVPDPVLENGHITLYWDRSIITDRTIVANKPHIVVVDRLERRAMIVDITVPHDGNLVKAEKDKQIKYLDLAREVVDMWDVDSAIIVPIVVTANGLIAKSLDQHLRRLSLGSWIKGLIQKAVLLDTARIVRRFLSLEP

SEQ ID NO: 13083 - protein, 1198 aa, Griposia aprilina
MLTRSAVRQARPPPPDSSLSSAALPPVSSPIVSAVTTPAAVVASSSSDEYFSPPTTPPPARRRGGHRPPDGLGPRGPPASDRVPAPGGSVQRMRWTGSINENVMRSYYGATEGGNNLTAYRVRMLSLYQVLEPAVNVSAQRLSDQVRIIQRNHMLDDTVLDRLRNEMQSSHVIASPSQTVVVLPQSNTSQADEESDDRATNVSTQCNDELRSALEDAIREYRFISPELRPRLPRLPMHNKNRVLVAALDAQLSNYFDDCVDLTDTHSILYCAAVAACRVAHVKFANDSRATRPKPAVPAWQCRIERRIGGARALIGKLICFREGNTRPRVMRFVRRAFAETNISPQDYMSCVTERIDFLKQKVYAWANRIHRYKRRVERYTQNRTFQRDERWVYRGWERPDQGVADTCLPDDDTICSFWRNIWSVPVSHTEGDWAREVERACDPIPEMGAISICPQDVTRAVRPLPNWKSPGPDGLHNFWIKWFGRSHARLAAQYQVALESGSLPQFLTTGVTQLFHKSGSTAEPKNYRPITCLPTVYKVLTSILRAKINKHIDTNSIMSPSQNGWRNGSRGTKELLLIDMAINQQVRRSRKDLSTCWIDYKKAYDSGPHTWLVRVLELYKVDATLRTFLKSCMGQWRTVLHYPGCRNIQSNNEPISIERGIFKGDSLSPLWFCLALNPLSTLLEDSGLGYRLRRGGQVISHLLYMDDLKLFAPNNLQLMELLKVTETFSSAIRMEFGVDKCAVMHVKRGEIVESVGTQLSNSINLRALSAFETYKYLGMSEALGINGTDMKQSLKERFFGRLKKVFNCLLSGGNKVRAFNGWVMPVLMYSFGILKWTQTELDALDRKVRTLLTANRMHHPRSSVMRLYIPRKCGGRGFLNAKILHNREICSLREYFLEADVGMHRDVVTVDKGLTSLSLAKENWRKPVVLDTNDRMEVWQSKELHGRFFRALHGPDVNQLASVAWLRFGDLFGETEGFVCAIMDEFILTNNYRRHIMKDGTVDVCRACHRPGESIRHIISGCSRLANEEYLHRHNLVARIIHQPLALKYSLVESEVPYYRYVPDPVLENGHITLYWDRFIITDRTIVANKPDIVVVDRLERRSMIVDITVPHDGNLVKAEKDKQIKYLDLAREVVDMWEVDSAIIVPIVMTANCLIAKSLDQHLRRLSLGSWIKGLIHKAVLLDTARIVRRFLSLEP

SEQ ID NO: 13084 - protein, 1199 aa, Griposia aprilina
MMLTRSAKRRAHPPPPDSSLSSASPPPVSSPTVSAVTTPAAVVASSSSDEYFSPPTTPPPVRRRGGHRPPDGLGPRGPPASDRVPAPGGSVQRMRWTRSINENVMRSYYGATEGGNNLTAYRVRMLSLFQVLEPAVNVSAQRLSDQVRVIQRNHMLDDTVLDRLRNEMQSSHVIAPPSQTVVVLPQSNTSQADEESDDRATNVSTQCNDELRSALEDAIREYRFISPELRPRLPRLPMHNKNRVLVAALDAQLSNYFDDCVDLTDTHSILYCAAVAACRVAHIKFANDSRPTRPKPAVPAWQCRIERRIGGARALIGKLICFREGNTRPRVMRFVRRAFAGTNISPQDYMSCVTERIDFLKQKVYAWANRIRRYKRRVERYTQNRTFQRDERWVYRGWERPDQGVADTCLPDDDAMCSFWRNIWSVPVSHTEGDWGREVERACDPIPEMGAISICPQDVTRAVRPLPNWKSPGPDGLQNFWIKWFGRSHARLAAQYQVAIESGSLPQFLTTGVTHLLHKSGSTAEPKNYRPITCLPTVYKVLTSILRAKINKHIDTNYIMSPSQNGCRNGSRGTKELLLIDMAISQQVRRSRKDLSTCWIDYKKAYDSVPHTWLVRVLELYKVDATLRTFLKSCMGQWRTILHYPGCRNIQRDNEPIRIERGIFQGDSLSPLWFCLALNPLSTLLEDSGLGYRLRRGGQVISHLLYMDDLKLFAPNNLQLMELLKVTETFSSAIRMEFGVDKCAVMHVKRGEIVESVGTQLSYSINLRALSASDTYKYLGMSEALGINGTDMKQSLKERFFGRLKKVFNSLLSGGNKVRAFNGWVMPVLMYSFGILKWTQTELDALDRKVRTLLTANRMHHPRSSVMRLYIPRKCGGRGFLNAKTLHNREICSLREYFLEADVGMHTDVVKVDKGLTPLSLAKQNWRKPVVLDTNDRMEVWQSKELHGRFFRALHGPDVDQLASVAWLRFGDLFGETEGFVCAIMDEVILTNNYRRHIMKDGTVDVCRACHRPGESIRHIISGCSRLANEEYLHRHNLVARIIHQQLALKYSLVESEVPYYRYVPDPVLENGHITLYWDRSIITDRTIVANKPDIVVVDRLERRAMIVDITVPHDGNLVKAEKDKQIKYLDLAREVVDMWDVDSAIIVPIVVTANGLIAKSLDQHLRRLSLGSWIKGLIQKAVLLDTARIVRRFLSLEP

SEQ ID NO: 13085 - protein, 1205 aa, Griposia aprilina
MQTRARSRQETHPPSPDLSLSSASQPPGRASTISAVSPVAAVASSSSDEFFSPPSSPTPPRQRGRGRPPAGLGSRGQQASNGVPAAGGNVSRMRWTQSINENVMRAYYGATEGGINLTAYRSRMLSLFQVLEPAVNVSAQRLSDQVRVIRHNHRLDDATLDRLRLEMQSSSASNPSPPPQNFVHASTVVPLRTNQQDEEEDTRVISADNLCNVELRSILEDAIREYRFTSSDLRPRLPRLPMNKKNRALVCALDALLPNLIENSADLCDTHSILYCTAVAACRIARVKFPNTDRTAQLKPAAPAWQCRIERRINEARVLIGKLTCFREGNTRPRVMRFVRQAFSGTNISPREYISCVTERIDFLKQKVYAWANRIRRYRRRVDRYTQNRMFQKDERWVYRAWERPIPTQGVTDVLPPDNDTVSAFWRSIWSVPVSHTEGDWMRVVEQACDSIPEMEAISISPLDVARAVRPLPNWKSPGPDGLHNFWIKWLQRSHACLASQFQSSLETGSLPLFFTTGVTHLLHKSGSTAEPKNYRPITCLPTVYKVLTSILRAKIAEHIKNNSIMSVSQNGCKNGSRGTKELLLIDMAISQQVRRSRKDLSTCWIDYKKAYDSVPHTWLIRVLELYKIDATLRTFLISCMGQWRTILLYPGCQQIQRTDEPIRIERGIFQGDSLSPLWFCLALNPLSTLLEDSGLGYRLRRGGQVISHLLYMDDLKLFAPNNLRLMELLKVTETFSSAIRMEFGVDKCAVMHVKRGGIMESVGTQLSDSIHLRSLSSTETYKYLGMSEALGINAADMKQSLRERFFGRLNKVLNSLLSGGNKVRAFNGWVMPVLMYTFGILKWTQTELDALDRKVRTLLTAYRMHHPRSSVMRLYIPRKCGGRGFLNAKTLHNREICSLREYFLQTDVGMHRDVVAVDKGLTPLSLAKENWRKPAVLDTNDRKEVWQGKELHGRFFRALHGPDVDFLASVSWLRFGDLFGETEGFVCAIMDEVIMTNNYRKHIVKDGTVDMCRACHRPGESIRHIVSGCSRLANGEYLHRHNLVARIIHQQLALQYNLVESEVPYYRYVPDPVLENGHTTLYWDRSIITDRTIVANKPDIVVIDRRERRAMIVDIAVPHDENLVKAEKDKKIKYLDLAHEVVDMWGVDSAIIVPIIVSVNGLIAESLDQHLRRLSLRSWVKSLIQRAVLLDTARIVRRFLSLDP

SEQ ID NO: 13086 - protein, 1199 aa, Griposia aprilina
MMLTRSAKRRAHPPPPDSSLSSASPPPVSSPTVSAVTTPAAVVASSSSDEYFSPPTTPPPVRRRGGHRPPDGLGPRGPPASDRVPAPGGSVQRMRWTRSINENVMRSYYGATEGGNNLTAYRVRMLSLFQVLEPAVNVSAQRLSDQVRVIQRNHMLDDTVLDRLRNEMQSSHVIAPPSQTVVVLPQSNTSQADEESDDRATNVSTQCNDELRSALEDAIREYRFISPELRPRLPRLPMHNKNRVLVAALDAQLSNYFDDCVDLTDTHSILYCAAVAACRVAHIKFANDSRPTRPKPAVPAWQCRIERRIGGARALIGKLICFREGNTRPRVMRFVRRAFAGTNISPQDYMSCVTERIDFLKQKVYAWANRIRRYKRRVERYTQNRTFQRDERWVYRGWERPDQGVADTCLPDDDAMCSFWRNIWSVPVSHTEGDWGREVERACDPIPEMGAISIYPQDVTRAVRPLPNWKSPGPDGLQNFWIKWFVRSHARLAAQYQVAIESGSLPQFLTTGVTHLLHKSGSTAEPKNYRPITCLPTVYKVLTSILRAKINKHIDTNSIMSPSQNGCRNGSRGTKELLLIDMAISQQVRRSRKDLSTCWIDYKKAYDSVPHTWLVRVLELYKVDATLRTFLKSCMGQWRTILHYPGCRNIQRDNEPIRIERGIFQGDSLSPLWFCLALNPLSTLLEDSGLGYRLRRGGQVISHLLYMDDLKLFAPNNLQLMELLKVTETFSSAIRMEFGVDKCAVMHVKRGEIVESVGTQLSYSINLRALSASDTYKYLGMSEALGINGTDMKQSLKERFFGRLKKVFNSLLSGGNKVRAFNGWVMPVLMYSFGILKWTQTELDALDRKVRTLLTANRMHHPRSSVMRLYIPRKCGGRGFLNTKTLHNREICSLREYFLEADVGMHTDVVKVDKGLTPLSLAKENWRKPVVLDTNDRMEVWQSKELHGRFFRALHEPDVDQLASVAWLRFGDLFGETEGFVCAIMDEVILTNNYRRHIMKDGTVDVCRACHRPGESIRHIISGCSRLANEEYLHRHILVARIIHQQLALKYSLVESEVPYYRYVPDPVLENGHITLYWDRSIITDRTIVANKPDIVVVDRLERRAMIVDITVPHDGNLVKAEKDKQIKYLDLAREVVDMWDVDSAIIVPIVVTANGLIAKSLDQHLRRLSLGSWIKGLIQKAVLLDTARIVRRFLSLEP

SEQ ID NO: 13087 - protein, 962 aa, Omphaloscelis lunosa
MHKKNKALMCTLDSLLSNYFDGSKDLADTHSILYCAAVAACRVAHVKFPNSDRAPRPKPAVPAWQCRIERRIGEARVLIGKLICFREGNTRPRVMRFVKRAFSGTDISSQDYLTRVPERIDFLKQKIYAWANRIRRYRRRVERYTQNRTFQSDERWVYRAWERPDQGVIDTRLPDDDAMCSFWRSIWSAPVSHTEGDWTREIERACEHIPEMEALTISPQDIARAVRPLPNWKSPGPDGLHNFWIKWFQRSHARLASQFQSALDSGSLPQFLTTGITHLLHKSGSTAEPKNYRPITCLPTVYKVLTSILRTKINKHIDTNSIMSASQNGCKNGSRGTKELLLIDMAINQQVRRSRRDLSTCWIDYKKAYDSVPHTWLMRVLELYKVDATLRTFLMSCMRQWRTVLRYPGCRQILRNSEPIRIERGIFQGDSLSPLWFCLALNPLSTLLEDSGLGYRLRRGGQVISHLLYMDDLKLFAPNNLQLLELLKVTETFSSAIRMEFGVDKCAVMHVKRGEIVESVGTHLSDSIQLRSLSSIETYKYLGMSEALGVNAADMKQSLKERFFNRLNKVLNSLLSGGNKVRAFNGWVMPVLMYSFGILKWTQTELDALDRRVRTLLTANRMHHPRSSVMRLYIPRKCGGRGFLNAKTLHNREVCSLREYFLEADVGMHRDVVTVDKGLTPLSLANENWRKPIVLDTNDRREVWQSKELHGRFYRALHGPDVDLLASVSWLRFGDLFGETEGFVFAIMDEVMMTNNYRKYIVKDGTVDICRACHRPGESIRHIISGCSRLANGDYLHRHNLVARIIHQQLALKYSLVESEVPYYRYVPDPVLENGNITLYWDRSIITDRTIVANKPDIVVIDRLERRTMIIDIAVPHDENLVKAEKDKQIKYLDLAREVVDMWDVDTAIIVPIVVTANGIIAKSLDQHLKRLSLGSWIKGFIQKAVLLDTARIVRRFLSQEP

SEQ ID NO: 13088 - protein, 1205 aa, Omphaloscelis lunosa
MLTRSRARKLTDTHPTSSGSSLSSASQLPDPAPDVSPVIPVAAVASSSSDEYFSPPTTPPPTRQRGRGRPPASLGLRGPPASDRVPAPGGSVQRMRWTQTVNENVMRAYFGATEGGSNLTAYRGRMLSLFQVLEPAVNVSAQRLSDQVRVIQRNHMLDDVVLDRLRLESRNNHVTPASPLVTVQLQNLPSSSPRSDRVGEEDDDGVISVSSQCNVRLRSALEDAFREYRSIPPGLRPKLPRLPMHKKNKALMCTLDSLLSNCLDGSKDLADTHSILYCAAVAACRVAHVKFPNSDRAPRPKPAVPAWQCRIERRIGEARVLIGKLICFREGNTRPRVMRFVKRAFSGTDISFQDYLTRVTERIDFLKQKIYAWANRIRRYRRRVERYTQNRTFQSDERWVYRAWERPDQGVIDTRLPDDDAMCSFWRSIWSAPVSHTEGDWTREIERACDPIPEMGAITICPQDVARAVRPLPNWKSPGPDGLHNFWIKWFQRSHARLASQFQSALESGSLPQFLTTGITHLLHKSGSTAEPKNYRPITCLPTVYKVFTSILRTKINKHIDTNSIMSASQNGCRNGSRGTKELLLIDMAINQQVRRSRRDLSTCWIDYKKAYDSVPHTWLMRVLELYKVNATLRTFLMSCMGQWRTVLRYPGCRQILRNSEPIRIERGIFQGDSLSPLWFCLALNPLSTLLEDSGLGYRLRRGGQVISHLLYMDDLKLFAPNNLQLLELLKVTETFSSAIRMEFGVDKCAVMHVKRGEIVESVGTQLSDSIQLRSLSSIETYKYLGMSEALGVNAADMKQSLKERFFNRLNKVLNSLLSGGNKVRAFNGWVMPVLMYSFGILKWTQTELDALDRRVRTLLTANRMHHPRSSVMRLYIPRKCGGRGFLNAKTLHNREVCSLREYFLEADVGMHRDVVTVDKGLTPLSLANENWRKPIVLDTNDRREVWQSKELHGRFYRALHGPDVDLLASVSWLRFGDLFGETEGFVFAIMDEVMMTNNYRKYIVKDGTVDICRACHRPGESIRHIISGCSRLANGDYLHRHNLVARIIHQQLALKYSLVESEVPYYRYVPDPVLENGNITLYWDRSIITDRTIVANKPDIVVIDRLERRTMIIDIAVPHDENLVKAEKDKQIKYLDLAREVVDMWDVDTAIIVPIVVTANGIIAKSLDQHLKRLSLGSWIKGLIQKAVLLDTVRIVRRFLSQEP

SEQ ID NO: 13089 - protein, 1205 aa, Omphaloscelis lunosa
MLTRSRARKLIDTHPTSSGSSLSSASQLPDPAPDVSPVIPVAAVASSSSDEYFSPPTTPPPTRQRGRGRPPASLGLRGPPASDRVPAPGGSVQRMRWTQTVNENVMRAYFGATEGGSNLTAYRGRMLSLFQVLEPAVNVSAQRLSDQVRVIQRNHMLDDVVLDRLRLESRNNHVTPASPLVTVQLQNLPSSSPRSDRVGEEDDDGVISVSSQCNVRLRSALEDAFREYRSIPPGLRPQLPRLPMHKKNKALMCTLDSLLSNCFDGSKDLADTHSILYCAAVAACRVAHVKFPNSDRAPRPKPAVPAWQCRIERRIGEARVLIGKLICFREGNTRPRVMRFVKRAFSGTDISFQDYLTRVTERIDFLKQKIYAWANRIRRYRRRVERYTQNRTFQSDERWVYRAWEPPDQGVADTHLPDDDAMCSFWRSIWSVPVSHTEGDWTREVERACDPIPEMGAITICPQDVARAVRPLPNWKSPGPDGLHNFWIKWFQRSHARLASQFQSALESGSLPQFLTTGITHLLHKSGSTAEPKNYRPITCLPTVYKVFTSILRTKINKHIDTNSIMSASQNGCRNGSRGTKELLLIDMAINQQVRRSRRDLSTCWIDYKKAYDSVPHTWLMRVLELYKVNATLRTFLMSCMGQWRTVLRYPGCRQILRNSEPIRIERGIFQGDSLSPLWFCLALNPLSTLLEDSGLGYRLRRGGQVISHLLYMDDLKLFAPNNLQLLELLKVTETFSSAIRMEFGVDKCAVMHVKRGEIVESVGTQLSDSIQLRSLSSIETYKYLGMSEALGVNAADMKQSLKERFFNRLNKVLNSLLSGGNKVRAFNGWVMPVLMYSFGILKWTQTELDALDRRVRTLLTANRMHHPRSSVMRLYIPRKCGGRGFLNAKTLHNREVCSLREYFLEADVGMHRDVVTVDKGLTPLSLANENWRKPIVLDTNDRREVWQSKELHGRFYRALHGPDVDLLASVSWLRFGDLFGETEGFVFAIMDEVMMTNNYRKYIVKDGTVDICRACHRPGESIRHIISGCSRLANGDYLHRHNLVARIIHQQLALKYSLVESEVPYYRYVPDPVLENGNITLYWDRSIITDGTIVANKPDIVVIDRLERRTMIIDIAVPHDENLVKAEKDKQIKYLDLAREVVDMWDVDTAIIVPIVVTANGIIAKSLDQHLKRLSLGSWIKGLIQKAVLLDTARIVRRFLSQEP

SEQ ID NO: 13090 - protein, 1202 aa, Omphaloscelis lunosa
MLTRSAARRARLPPPDSPLSSASSPPVLSPTVNAVMTPAAAVASSSSDEYFSPPTTPPPARRRGRRRPPDGLGPRGPPASDRVPAPGGSVQRMRWTRSINENVMRSYYEATEGGNNLTAYRVRMLSLFQVLEPAVNVSAQRLSDQVRVNQRNHLLDATVLDRLRSEMQSSHVIAPPLRSVIVPSQMSSVITSQADGRIDDRATNVSTQCNEDLRSALEGAIREYRFMSPELRPRLPRLPMHNKNKALVAVLDSQLSNYFDDCEDLTDTHSILYCAAVAVCRVAHVKFSNDSRATRPKPAAPAWQCRIERRIGGARTLIGKLICFREGNTRPRVMRFVRRAFLGTDISPQDYMTRVTERIDFLKQKVYAWANRIRRYKRRVERYTQDRTFQSDERWVYRAWERPDQGVADTHLPDDDAMCSFWRSIWSVPVSQTEGDWTREVERACDPIPEMGAITICPQDVARAVRPLPYWKSPGPDGLHNFWIKWFVRSHARLAAQYQTALESGSLPQFLTTGVTHLLHKSGSTAEPKNYRPITCLPTVYKVLTSILRAKINKHIDTNSIMSASQNGCGNGSRGTKELLLIDMAISQQVRRSRKDLSTCWIDYKKAYDSVPHTWLMRVLELYKVHTTLRTFLMSCMGQWRTVLRYPGCRNIQRNSEPIRIERGIFQGDSLSPLWFCLALNLLSTLLEDSGLGYRLRRGGQVISHLLYMDDLKLFAPNNLQLMELLKVTETFSSAIRMEFGVDKCAVMHVKRGEIMESVGTQLSDSINLRALSASETYKYLGMSEALGINVTDMKQSLKERFFGRLKKVLNSLLSGGNKVRAFNGWVMPVLMYSFGILKWTQTELDALDRRVRTLLTAYRMHHPRSSVMRLYIPRKCGGRGFLNAKTLHNREICSLREYFLGVDVGMHRDVVVVDKGLTPLSLAKENWRKPVVLDTKDRMEIWQSKELHGRYFRALHGPDVDLPASVTWLRFGDLFGETEGFVCAIMDEVMMTNNYRRFIVKDGTVDICRACHRPGESIRHNIISGCSRLANEEYLHRHNLVARIIHQQLALKYSLVESEVPYYRYVPDPVLENGNITLYWDRSIITDRTIAANKPDIVVVDRGERCTMIIDITVPHDENLVKAEKEKQIKYLDLAREVVDMWDVDSAIIVPIVVTANGLIAKSLDQHLRRLSLGSWIKGLIQRAVLLDTARIVRRFLSLEP

SEQ ID NO: 13091 - protein, 1225 aa, Sesamia nonagrioides
MQRKTGTYDSCHVKSRENIGEMKKNTLNMLTRSAALRARPPPPDSLLSSASPPPVSSASVSAVTTPAAAVALSSSDEYFSPPTTPPPARRRGGRRPPDRLGPRGPSASDRVPAPGGSVQRMRWTQSINENVMRSYYGATEGGNNLTAYRVRMLSLFQVLEPAVNVSAQRLSDQVRVIQRNHMLDDTVLDRLRNEMQSSRVIAHQSQTAEIPPQSTNYADEGSNDRATNVSTQCNEELINALEAAIREYRYTSAELRPRLPRLPMHNRNRALMAALDAQLSNYFDTCEDLTDTHSILYCAAVAACRVAHVKFPSDSRATRPKPVVPAWQHRIERRIGGARALIGKLICFREGNTRPRVMRFVRRAFAGTNISPQNYMARVTERIDFLKQKVYAWANRIRRYKRRVERYTQNRTFRSNERWVYRDWERPEQGVTDTCLPDDDAMCSFWRSIWSVPVSHTEGDWARDVERACDPIPEMGAITICPQDVACAVRPLPNWKSPGPDGLHNFWIKWFPRSHARLASQFQTALVSGSLPQFLTTGITHLLHKSGSTAEPKNYRPITCLPTVYKVLTSILKTKINKHIDSNSIMSASQNGCKSGSRGTKELLLIDMAISQQVRRSRKDLSTCWIDYRKAYDSVPHTWLMRVLELYKVDATLRTFLMSCMRTWRTVLRYPGCRNIQRNSEPIRIERGIFQGDSLSSLWFCLALNPLSTLLEDSGLGYRLRRGGQVISHLLYMDDLKLFAPNNSQLRELLKITETFSSSIRMEFGVDKCAVMHVKRGEIMESVGTQLTDSINLRALSASETYKYLGMSEALGINVTDMKQSLKERFFGRLKKVLNSLLSGGNKVRAFNGWVMPVLMYSFGILKWTQTELDALDQRVRTLLTANRLHHPRSSVMRLYIPRKCGGRGFLNAKTLHNREVCSLREYFLETDVGMHRDVVAADKGLTPLSLAKENWRKPVVLDTNDRLEVWKSKELHGRFFRALHGPDVDFQASVAWLRFGDLFGETEGFVFAIMDEVMMTNNYRRFIVKDGTVDICRACHRPGESIRHIISGCSRLANGEYLHRHNLVARIIHQQLALKYNLVESEVPYYRYMPDPVLENGHITLYWDRSIITDRTIVANKPDIVLVDRSERRAMIVDITIPHDENLVKAEKDKQIKYLDLAHEVVDMWEVDSAIIVPIVVTANGLIAKSLDQHLRRLSLGSWIKGLIQKAVLLDTARIVRKFLSLEP

SEQ ID NO: 13092 - protein, 962 aa, Sesamia nonagrioides
MHKKNKALVCALDSQLSNYLKDSKDLADTHSILYCGAVAICRVAHVKFPDSDRATRPKPAVPAWQCRIERRIGETRALIGKLISFREGNTRPRVMRFVRRAFSGTDVSTRDYLLRVTERIDFLKQKIYAWANRIRRYRRRVERYSQNRNFQSDERWVYRAWERSDQGVTDTCLPDDDATRSFWRNIWSVPVSHTEGGWTRDVERACDPVPEMGAITICPQDVARAVRPLPNWKSPGPDGLHNFWIKWFSGSHACLASQFQTALESGSLPQFLTTGITHLLHKSGSTAEPKNYRPITCLPTVYKVLTSILKAKINTHIDSNSIMSASQNGCRNGSRGTKELLLIDMAISQQVRRSRKDLSTCWIDYKKAYDSVPHTWLMRVLELYKVDATLRTFLMTCMSQWRTVLRYPGCRNIQRNSEPIRIERGIFQGDSLSPLWFCLALNPLSTLLEDSGLGYRLRRGGQVISHLLYMDDLKLFAHTNSQLKELLKITETFSSAIRMEFGVDKCAVMHVQRGEIVESVGTQLTGSINLRALSASETYKYLGMSEALGINVTDMKQSLKERFFGRLKKVLNSLLSGGNKVRAFNGWVMPVLMYSFGILKWTQTELDALDRRVRTLLTANRLHHPRSSVMRLYIPRKCGGRGFLNAKTLHNREICSLREYFLTTDVGMHRDVVAVDKGLTPLSLAKENWRKPVVLDTNDRMEVWKSKELHGRFFKALHGPDVDLQASVAWLRLGDLFGETEGFVCAITDEVMMTNNYRRFIVKDGTVDICRACHRPGESIRHIISGCSRLANGEYLHRHNLVARIIHQQLALKYNLVESEVPYYRYTPDPVLENDHITLYWDRSIITDRTIIANKPDIVLVDRSERRAMIVDITIPHDENLVKAEKDKQIKYLDLAHEVVDMWEVDSAIIVPIVVTANGLIAKSLDQHLRRLSLGSWIKGLIQKAVLLDTARIVRKFLSLEP

SEQ ID NO: 13093 - protein, 1195 aa, Sesamia nonagrioides
MLTRSAARRARPPSPDSLLSSALPPPVSSATVSAVTTPAAAVASSSSDEYFSPPTTPPPVRRRGGRRPCLGPRGPPASDRVPASGGSVQPMRWTQSINENVMRSYYGATEGGTNLTAYRVRMLSLFQVLEPAVNVSAQRLSDQVRVIQRNHMLDDTVLDRRRNEMQSSRIIAHQSQSAEIPPQPTNYADEGSNDRATNVSTQCNEELRNALEAAIREYLSFSAELRPRLPRLPMHNRNRALMGALDAQLSNYFDTCEDLTDTHSILYCAAVAACRVAHVKFPSDSRATRPKPVVPAWQHRIERRIGVARALIGKLICFREGNTRSRVMRFVRRAFSGTNTSPQNYMARVTKRIDFLKQKVYAWANSIRRYKRRVERYTQNRTFQSNERRVYRDWERPEQGVTDTCLPDDDAMCSFWRSIWSVPGSHTEGDWAQDVERACDPIPEMVPITICPQDVPHAVRPLPNWKSPGPDGLHNFWIKWFPRSHARLASQFQTALVSGSLPQFLTTGITHLLHKSGSTAEPKNYRPITCLPTVYKVLTSILKTKINKHIDSNSILSASQNGCRSGSRGTKELLLIDMAISQQVRRSRKDLSTCWIDYKKAYDSVPHTWLMRVLELYKVDATLRTFLMTCMRTWRTVLRYPGCRNIQRNSEPIRIERGIFQGDSLSPLWFCLALNPLSTLLEDSGLGYRLRRGGQVISHLLYMDDLKLFAPNNSQLNELLKITEIFSSSIRMEFGVDKCAVMHVKRGEIMEPVGTQLTSSINLRALSASETYKYLGMSEALGINVTDMKQSLKERFFGRLKKVLNSLLSGGNKVRAFNGWVMPVLMYSFGILKWTQTDLDPLDQRVRTLLTANRLHHPRSSVMRLYIPRKCGGRGFLNAKTLHNREICSLRDYFLETDVGMHRDVVAADKGLTPLSLAKENWRKPVVLDTNDRMEVWKSKDLHGRFFRALHGPDVDFQASVAWLRFGDLFGETEGFVFAIMDEVMMTNNYRRFIMKDGTVDICRACHRPGESIRHIISGCSRLANGEYLHRHNLVARIIHQQLALKYKLVESEVPYYRYMPDPVLENGHITLYWDRSIITDRTIIANKPDIVLVDRSERRAMIVDITIPHDENLVKAEKDKQTKYLDLAHEVVDMWEVDSAIIVPIVVTANGLIAKSLDQHLRRLSLGSWIKGLIQKAVLLDTARIVRKFLSLEP

SEQ ID NO: 13094 - protein, 962 aa, Sesamia nonagrioides
MHNRNRALMAALDAQLSNYFDTCEDLTDTHSILYCAAVAACRVAHVKFPSDSRATRPKPVVPAWQHRIERRIGGARALIGKLICFREGNTRPRVMRFVRRAFSGTNTSPQNYMARVTERIDFLKQKVYAWANRIRRYKRRVERYTQNRTFQSNERRVYRDWERPEQGVTDTCLPDDDAMCSFWRSIWSVPVSHTEGDWARDVERACDPIPEMGAITICPQDVAHAVRPLPNWKSPGPDGLHNFWIKWFPRSHARLASQFQTALVSGSLPQFLTTGITHLLHKSGSTAEPKNYRPITCLPTVYKVLTSILKTKINKHIDSNSILSASQNGCRSGSRGTKELLLIDMAISQQVRRSRKDLSTCWIDYKKAYDSVPHTWLMRVLELYKVDATLRTFLMTCMRTWRTVLRYPGCRNIQRNSEPIRIERGIFQGDSLSPLWFCLALNPLSTLLEDSGLGYRLRRGGQVISHLLYMDDLKLFAPNNSQLNELLKITEIFSSSIRMEFGVDKCAVMHVKRGEIMEPVGTQLTSSINLRALSASETYKYLGMSEALGINVTDMKQSLKERFFGRLKKVLNSLLSGGNKVRAFNGWVMPVLMYSFGILKWTQTELDALDQRVRTLLTANRLHHPRSSVMRLYIPRKCGGRGFLNAKTLHNREICSLRDYFLETDVGMHRDVVAADKGLTPLSLAKENWRKPVVLDTNDRMEVWKSKELHGRFFRALHGPDVDFQASVAWLRFGDLFGETEGFVFAIMDEVMMTNNYRRFIVKDGTVDICRACHRPGESIRHIISGCSRLANGEYLHRHNLVARIIHQQLALKYKLVESEVPYYRYMPDPVLENGHITLYWDRSIITDRTIIANKPDIVLVDRSERRAMIVDITIPHDENLVKAEKDKQTKYLDLAHEVVDMWEVDSAIIVPIVVTANGLIAKSLDQHLRRLSLGSWIKGLIQKAVLLDTARIVRKFLSLEP

SEQ ID NO: 13095 - protein, 1200 aa, Sesamia nonagrioides
MLTRSAARRARSPPPDSSPSSASPPPVSSPTVNTVMTPAAAVALSSSDEYFSPPTTPPLVRRRGGRRPPDCLGPRGPPASDRAPATGGNVQRMKWTQSINENVMRAYFGATEGGSNLTAYRGRMLSLFQVLEPAVNVSAQRLSDQVRVIQRNHMLDDVVLDRLRLESRNSHVTPASSLVAVQLNSVPSRPNLVDEEDDDEAISVTPQCNEKVRSALEDAFREYRSTPPELRPRLPRLPMHKKNKALVCALDSQLSNYLKDSKDLADTHSILYCGAVAICRVAHVKFPDSDRATRPKPAVPAWQCRIERRIGETRALIGKLISFREGNTRPRVMRFVRRAFSGTDVSTRDYLFRVTERIDFLKQKIYAWANRIRRYRRRVERYSQNRNFQSDERWVYRAWERSDQGVTDTCLPDDDATRSFWRNIWSVPVSHTEGGWTRDVERACDPVPEMGAITICPQDVARAVRPLPNWKSPGPDGLHNFWIKWFSGSHACLASQFQTALESGSLPQFLTTGITHLLHKSGSTAEPKNYRPITCLLTVYKVLTSILKAKIKTHIDSNSIMSASQNGCRNGSRGTKELLLIDMAISQQVRRSRKDLSTCWIDYKKAYDSVPHTWLMRVLELYKVDATLRTFLMTCMSQWRTVLRYPGCRNIQRNSEPIRIERGIFQGDSLSPLWFCLALNPLSTLLEDSGLGYRLRRGGQVISHLLYMDDLKLFAHTNSQLKELLKITETFSSAIRMEFGVDKCAVMHVQRGEIVESVGTQLTGSINLRSLSASETYKYLGMSEALGINVTDMKQSLKERFFGRLKKVLNSLLSGGNKVRAFNGWVMPVLMYSFGILKWTQTELDALDQRVRTLLTANRLHHPRSSVMRLYIPRKCGGRGFLNAKTLHNREVCSLREYFLKTDVGMHRDVVAVDKGLTPLSLAKENWRKPVVLETNDRMEVWQSKELHGRFFRALRGPDVDFQASVAWLRYGDLFGETEGFVCAIMNEVMMTNNYRKFIVKDGTVDICRACHRPGESIRHIISGCSRLANGEYLHRHNLVARIIHQQLALKYNLVESEVPYYRYMPDPVLENGHITLYWDRSIITDRTIVANKPDIVMVDRSERRAMIVDITIPHDENLVKAEKDKQIKYLDLAHEVVDMWEVDSAIIVPIVVTANALIAKSLDQHLRRLSLGGWIKGLIQKAVLLDTARIVRKFLSLEP

SEQ ID NO: 13096 - protein, 1044 aa, Sesamia nonagrioides
MLDDTVLDRLRNEMQSSRIIAHQSQSAEIPPQPTNYADEGSNDRATNVSTQCNEELRNALEAAIREYRSISAELRPRLPRLPMHNRNRALMAALDAQLSNYFDTCEDLTDTHSILYCAAVAACRVAHVKFPSDSRATRPKPVVPAWQHRIERRIGGARVLIAKLICFREGNTRPRVMRFVRRAFSGTNTSPQNYMARVTERIDFLKQKVYAWANRIRRYKRRVERYTQNRTFQSNERRVYRDWERPEQGVTDTCLPDDDAMCSFWRSIWSVPVSHTEGDWARDVERACDPIPEMGAITICPQDVAHAVRPLPNWKSPGPDGLHNFWIKWFPRSHARLASQFQTALVSGSLPQFLTTGITHLLHKSGSTAEPKNYRPITCLPTVYKVLTSILKTKINKHIDSNSILSASQNGCRSGSRGTKELLLIDMAISQQVRRSRKDLSTCWIDYKKAYDSVPHTWLMRVLELYKVDATLRTFLMTCMRTWRTVLRYPGCRNIQRNSEPIRIERGIFQGDSLSPLWFCLALNPLSTLLEDSGLGYRLRRGGQVISHLLYMDDLKLFAPNNSQLNELLKITEIFSSSIRMEFGVDKCAVMHVKRGEIMDPVGTQLTSSINLRALSASETYKYLGMSEALGINVTDMKQSLKERFFGRLKKVLNSLLSGGNKVRAFNGWVMPVLMYSFGILKWTQTELDALDQRVRTLLTANRLHHPRSSVMRLYIPRKCGGRGFLNAKTLHNREICSLRDYFLETDVGMHRDVVAADKGLTPLSLAKENWRKPVVLDTNDRMEVWKSKELHGRFFRALHGPDVDFQASVAWLRFGDLFGETEGFVFAIMDEVMMTNNYRRFIVKDGTVDICRACHRPGESIRHIISGCSRLANGEYLHRHNLVARIIHQQLALKYKLVESEVPYYRYMPDPVLENGHITLYWDRSIITDRTIIANKPDIVLVDRSERRAMIVDITIPHDENLVKAEKDKQTKYLDLAHEVVDMWEVDSVIIVPIVVTANGLIAKSLDQHLRRLSLGSWIKGLIQKAVLLDTARIVRKFLSLEP

SEQ ID NO: 13097 - protein, 868 aa, Sesamia nonagrioides
MRFVRRAFSGTDTSTRDYLFRVTERIDFFKQKIYAWANRIRRYKRRVERYSQNRNFQSDERRVYRAWERSDQGVTDTCLPDDDATCSFWRNIWSVPVSHTEGSWTRVVERACDPVPEMGAITICPQDVAHAVRPLPNWKSPGPDGLHNFWIKWFTRSHACLASQFQTALESGSLPQFLTTGVTHLLHKSGSTAEPKNYRPITCLPTVYKVLTSILKSKINTHIDSNSIMSASQNGCRSGSRGTKELLLIDMAISQQVRRSRKDLSTCWIDYKKAYDSVPHTWLMRVLELYKVDATLRTFLMTCMRTWRTVLRYPGCRNIQRNSEPIRIERGIFQGDSLSPLWFCLALNPLSTLLEDSGLGYRLRRGGQVISHLLYMDDLKLFAHTDSQLKELLKITETFSSSIRMEFGVDKCAVMHVKRGEIMESVGTQLTSSINLRALSASETYKYLGMSEALGINVTDMKQSLKERFFGRLKKVLNSLLSGGNKVRAFNGWVMPVLMYSFGILKWTQTELDALDRRVRTLLTANRLHHPRSSVMRLYIPRKCGGRGFLNAKTLHNREICSLREYFLTTDVGMHRDVVAVDKGLTPLSLAKENWRKPVVLDTNDRMEVWKSKELHGRFFTALHGPDVDLQASVAWLRFGDLFGETEGFVCAIMDEVMMTNNYRRFIVKDGTVDICRACHRPGESIRHIISGCSRLANGEYLHRHNLVARIIHQQLALKYNLVESEVSYYRYTPDPVLENDLITLYWDRSIITDRTIVANKPDIVLVDRSERRAMIVDITIPHDENLVKAEKDKQIKYLDLAHEVIDMWEVDSAIIVPIVVTANGLIAKSLDQHLRRLSLGSWIKGLIQKAVLLDTARIVRKFLSLEP

SEQ ID NO: 13098 - protein, 1180 aa, Trichoplusia ni
MLTRRRAARLPSPGSSPSSASQLPPGRGPAPAVAVASSSSDEYYSPPTSPTPVRRPGRRRPPSSLAPSGQPASNRAPAPGGVVQRMKWTRPMNENVMRAYYGATGGGTNLTAYRARMLSLFRALEPDVDVSAQRLSDQVRVIQRNHRLDDATLDRLRSEVQTSPVVVTPSIAEAPAASALPANPADGGDDDGAITVSTQCSDHIRSTLEQAVLEYRSTPRDQRPRLPRLPMHNRNKALMGVLDSLLSSYFGNSEDLGDTHSLLYCAAVDNTAARPKQAAPAWQCRIEKRVAEARTLIAKLDAFRGGNTRPRVMRFVKRAFAGTNISPSEYTARVTERIDFFKQKVCAWASRIRRYKTRVDRFHQNRMFQRDQRWVYRSWEQPASEEGAGRLPDDVATNLFWRSIWSAPVTHSEGDWIRDVEQSCERIEEMGAIDISPQDVANAVRPLANWKAPGPDGLHNFWLKWLPSSHGCLASQFQSAVDSGVLPQFFTTGSTHLLHKTGSTTDPKNYRPITCLPTIYKLLTSILREKINDHIERFSIMSASQNGCRNGSRGTKELLLIDMTICQQVRRSKKGVSTCWIDYKKAYDSVPHAWLMRVLELYKINTTLRTFLKSCMGQWTTVLHYPGCRDIQKSGQLIRIERGIFQGDSLSPLWFCLALNPLSTLLENSRLGYSLRRGSQVISHLLYMDDLKLFASNKLQLMKLLKITESFSNSIRMEFGVDKCAVMHVKRGGIVESQGIQLSDSINLRSLSSTETYKYLGMSEALGINVADMKQSLQTRFFGRLNKVLKSSISGGNKVRAFNGWVMPVIMYSFGILKWTQTELDALDRRVRTLLTANRMHHPRSSVMRLYIPRKCGGRGFLNAKTLHNREVCNLREYFLRVDVGMHRDVVAVDKGFTPLSLGKENWHKPIVLSVKDRKDVWQSKELHGRYYRTLHGADVDFLASVAWLRFGDLFGETEGFVCAIMDEVIMTNNYRKYIIKDGTVDICRACHCPGESLRHIVSGCSRLANGEYLHRHNQVARIIHQQLALKYKLVESEVPYYKYVPDPVLESGHITLYWDRSIITDRTIVANKPDIVVIDRSERRTMIVDITIPHDENLVKAEKEKQFKYLDLAHEVVDLWEVDSAIIVPIVVSANGLIAKSLDQHLRRLSLGVWVKGLIQKAVLLDTARIVRRFLSLEP

SEQ ID NO: 13099 - protein, 1206 aa, Drepana arcuata
MFTRSQARRHNARPPPSASPPSSVSQTPADSDPATLDLRVVATAASSSSDEYFSPPTSPRPVRRQGRVQPPPNGLGPRGQSAPDRVLAVGGNVQRMRWTHTINENVMRAYYGATEGGTSLTAYRSRMLLLFQELEPTVNVSAQRLSDQVRVIQRNHRLDDNVLDRLRSEMQGSHVTSAPAQSAAQSLVSSITLPQPSYTDMEGGDRPLNAGTQYNELVRSTLKDAVQQYKFVSPGLRPRLPRLPMHKKNLALVATLDSLLPEYLDCCEDLTETHQILYCAAIAACRLAHVNFPTHERTGQPKPAVPIWQRRIQRRIDDARVLIGKLSCFREGNTRPRVMRYVRKAFSGSDINPRDYVACVTERIDYLKQKVYAWANRIRRYKQRVDRYTQNRMFQNDEKWVYRGWERSEQGVSDEQLPDNDAVCTFWSNIWSVPVTHTEGDWIEEIKRVCESIQEMGEVTISPKDVADAVQSLSNWKSPGPDGLHNFWLKWLRTSHARLASQFQSSLESGSLPSFLMTGITHLLHKSGSTMDPKNYRPITCLPTMYKLLTSILRAKISKHINNNVIMSASQNGCKNGSRGTKELLLIDMTISQQVRRSRKNLSTCWIDYKKAYDSVPHTWLMRVLELYKVNSTLRIFLKSIMGQWKTVLHYPRGRQIPGNDEPIRIERGIFQGDSLSPLWFCLALNPLSTLLESSGLGYRLRRGGQVISHLLYMDDLKLFAPNELQLTELLNVTQNFSNSIRMEFGIDKCAVMHVKRGNIVESVGIQLSDSINIRSLTPTENYKYLGMSEALGIHEADMKKSLLDRFYGRLTKVLKSLLTGGNKVRAYNGWVMPVLMYSFGILKWTQRELEITDRKVRTLLTSYRMHHPRSSIMRLYIPRKCGGRGFLNAKTLHNREVYKLREYFRSTEVGMHRDVVAVDKGLTALSLAKENWRKPVVLTTNDRREIWQSKELHGRFYRALHDPDVDHEASLAWLRFGDLFGETEGFVCAIMDEVMMTNNYRKYILRDGTVDICRACHRPGESLRHIISGCSHLANGEYLHRHNQVAKIIHQQLALKYNLVDSEVPYYKYSPDPVLENGHVTLYWDRSIITDRCITANKPDIVLIDRLERRTMIVDITVPHDGNLVKAEKDKQIKYLDLAHEIVSMWDVDSAIIVPIVITANGLMAKSLDQHLKRLSLDGWIKCLIQKAVLLETARIVRRFLSLGP

SEQ ID NO: 13100 - protein, 975 aa, Apamea monoglypha
MSPELRPRLPRLPMHNKNRALVAVLDAQLSSYFDVCEDLTDTHSILYCAAVAACRVAHVKFVSDSRATRPKPAIPPWQCRIERRIGGARTLIGKLICFREGNTRPRVMRFVRRAFSGTDISSQDYLSRVTERIDFLKQKVYAWANRIRRYKRRVDRYTQNRTFQNDERWVYRGWERPDQGVADTCLPDDDAMYSFWRSIWSVPVSHTEGDWAREVERACDPIPEMEAITICAQDVARAVRPLPNWKSPGPDGLHNFWVKWLTRSHARLASQFQIALESGSLPQFLTTGVTHLLHKSASTAEPKNYRPITCLPTVYKVLTSILRAKINKHIDTNSIMSASQNGCKNGSRGTKELLLIDMAISQQVRRSRKDLSTCWIDYKKAYDSVPHTWLMRVLELYKVDTTLRTFLMTCMGQWRTVLRYPGCRNIQRNSEPIRIERGIFQGDSLSPLWFCLALNPLSTLLEDSGLGYRLRRGGQVISHLLYMDDLKLFAPNNLQLMELLKITETFSSAIRMEFGVDKCAVMHVKRGEIVESVGTQLSDSTNLRALSASETYKYLGMSEALGINVTDMKQSLKERFFGRLKKVLNSLLSGGNKVRAFNSWVMPVLMYSFGILKWTQTELDALDRRVRTLLTANRLHHPRSSVMRLYIPRKCGGRGFLNAKTLHNREICSLREYFLETDVGMHRDVVAVDKGLTPLSLAKENWRKPVVLDTNDRMEVWQSKELHGRFYRALHGPDVDLLASVAWLRFGDLFGETEGFVCAIMDEVMMTNNYRRFIVKDGTVDICRACHRPGESIRHIISGCSRLANGEYLHRHNLVARIIHQQLALKYNLVESEVPYYRYVPDPVLENGNITLYWDRSIITDRTIVANKPDIVVVDRSERRAMIVDITVPHDENLVKAEKDKQIKYLDLAREVVDMWHVDSAIIVPIVVTANGLIAKSLDQHLRRLSLGSWIKGLIQKAVLLDTARIVRRFLSLEP

SEQ ID NO: 13101 - protein, 1200 aa, Apamea monoglypha
MMMLTRSAARRARPPPPDSSLSSASPPPVPSLTVSAVTTPAAVVASSSSDEYFSPPTTPPPARRRGGRRPPDGLGPRGPPASDRVPALGGSVQRMRWTQSINENVMRSYYGATEGGNNLTAYRVRMLSLFQVLEPAVNVTAQRLSDQVRVIQRNHMLDDTVLDRLRNEMQSSHVIAPQSQTAAVLPQSNTSHADEGSNDRATNVSIQCNEELRNALEGAIREYRFMSPELRPRLPRLPMHNKNRALVAVLDAQLSSYFDVCEDLTDTHSILYCAAVAACRVAHVKFASDSRATRPKPAIPPWQCRIERRIGGARALIGKLICFREGNTRPRVMRFVRRAFSGTDISSQDYLSHVTKRIDFLKQKVYAWANRIRRYKRRVDRYTQNRTFQSDERWVYRGWERPDQGVADTCLPDDDAMYSFWRSIWSVPVSHTEGDWAREVERACDPIPEMEAITICAQDVARAVRPLPNWKSPGPDGLHNFWIKWFTRSHARLASQFQIALESGSLPQFLTTGVTHLLHKSASTAEPKNYRPITCLPTVYKVLTSILRAKINKHIDTNSIMSASQNGCKNGSRGTKELLLIDMAISQQVRRSRKDLSTCWIDYKKAYDSVPHTWLMRVLELYKVDTTLRTFLMTCMGQWRTVLRYPGCRNIQRNSEPIRIERGIFQGDSLSPLWFCLALNPLSTLLEDSGLGYRLRRGGQVISHLLYMDDLKLFAPNNLQLMELLKITETFSSAIRMEFGVDKCAVMHVKRGEIVESVGTQLSDSTNLRALSASETYKYLGMSEALGINVTDMKQSLKERFFGRLKKVLNSLLSGGNKVRAFNSWVMPVLMYSFGILKWTQTELDALDRRVRTLLTANRMHHPRSSVMRLYIPRKCGGRGFLNAKTLHNREICSLREYFLETDVGMHRDVVAVDKGLTPLSLAKENWRKPVVLDTNDRLEVWQSKELHGRFYRALHGPDVDLLASVAWLRFGDLFGETEGFVCAIMDEVMMTNNYRRFIVKDGTVDICRACHRPGESIRHIISGCSRLANGEYLHRHNLVARIIHQQLALKYSLVESEVPYYRYVPDPVLENGHITLYWDRSIITDRTIVANKPDIVVVDRSERRAMIVDITVPHDENLVKAEKDKQIKYLDLAREVVDMWDVNSAIIVPIVVTANGLIAKSLDQHLRRLSLGSWIKGLIQKAVLLDTARIVRRFLSLEP

SEQ ID NO: 13102 - protein, 962 aa, Apamea monoglypha
MHNKNRALVAVLDAQLSSHFDACEDLTDTHSILYCAAVAACRVAHVKFDSDSRATRPKPAIPAWQCRIERRIGGARALIGKLICFREGNTRPRVMRFVRRAFLGTDISSQDYLSRVTERIDFLKQKVYAWANRIRRYKRRVERYTQNRTFQSDERWVYRGWERPDQDVADTCLPDDDAMCSFWRSIWSAPVSHTEGDWAREVERACDPIPEMEAITICPQDVARAVRPLPNWKSPGPDGLHNFWVKWFTRSHARLASQFQTALESGSLPQFLTTGVTHLLHKSGSTAEPKNYRPITCLPTVYKVLTSILRAKINKHIDTNSIMSASQNGCKNGSRGTKELLLIDMAISQQVRRSRKDLSTCWIDYKKAYDSVPHTWLMRVLDLYKVDATLRTFLMSCMGQWRTVLRYPGCRNIQRNSEPIRIERGIFQGDSLSPLWFCLALNPLSTLLEDSGLGYRLRRGGQVISHLLYMDDLKLFAPNNLQLMELLKVTETFSSDIRMEFGVDKCAVMHVKRGEIVESVGTQLSDSTNLRALSVSETYKYLGMSEALGINVTDMKQSLKERFFGRLKKVLNSLLSGGNKVRAFNSWVMPVLMYSFGILKWTQTELDALDRRVRTLLTANRMHHPRSSVMRLYIPRKCGGRGFLNAKTLHNREICSLREYFLETDVGMHRDVVAVDKGLTPLSLAKENWRKPVVLDTNDRMEVWQSKELHGRFYRALHGPDVDLLASVAWLRFGDLFGETEGFVCAIMDEVMMTNNYRRFIVKDGTVDICRACHRPGESIRHIISGCSRLANGEYLHRHNLVARIIHQQLALKYNLVESEVPYYRYVPDPVLENGNITLYWDRSIITDRTIVANKPDIVVVDRSERRAMIVDITVPHDENLVKAEKDKQIKYLDLAREVVDMWHVDSAIIVPIVVTANGLIAKSLDQHLRRLSLGSWIKGLIQKAVLLDTARIVRRFLSLEP

SEQ ID NO: 13103 - protein, 1200 aa, Apamea monoglypha
MMMLTRSAARRARPPPPDSSLSSASPPPVPSLTVSAVTTPAAVVASSSSDEYFSPPTTPPPARRRGGRRPPDGLGPRGPPASDRVPALGGSVQRMRWTQSINENVMRSYYGATEGRNNLTAYRVRMLSLFQVLEPAVNVTAQRLSDQVRVIQRNHMLDDTVLDRLRNEMQSSHVIAPQSQTAAVLPQSNTSHADEGSNDRATNVSIQCNEELRNALEGAIREYRFMSPELRPRLPRLPMHNKNRALVAVLDAQLSSYFDVCEDLTDTHSILYCAAVAACRVAHVKFASDSRATRPKPAIPPWQCRIERRIGGARALIGKLICFREGNTRPRVMRFVRRAFSGTDISSQDYLSHVTERIDFLKQKVYAWANRIRRYKRRVDRYTQNRTFQSDERWVYRGWERPDQGVADTCLPDDDAMYSFWRSIWSVPVSHTEGDWAREVERACDPIPEMEAITICAQDVARAVRPLPNWKSPGPDGLHNFWIKWFTRSHARLASQFQIALESGSLPQFLTTGVTHLLHKSASTAEPKNYRPITCLPTVYKVLTSILRAKINKHIDTNSIMSASQNGCKNGSRGTKELLLIDMAISQQVRRSRKDLSTCWIDYKKAYDSVPHTWLMRVLELYKVDTTLRTFLMTCMGQWRTVLRYPGCRNIQRNSEPIRIERGIFQGDSLSPLWFCLALNPLSTLLEDSGLGYRLRRGGQVISHLLYMDDLKLFAPNNLQLMELLKITETFSSAIRMEFGVDKCAVMHVKRGEIVESVGTQLSDSTNLRALSASETYKYLGMSEALGINVTDMKQSLKERFFGRLKKVLNSLLSGGNKVRAFNSWVMPVLMYSFGILKWTQTELDALDRRVRTLLTANRMHHPRSSVMRLYIPRKCGGRGFLNAKTLHNREICSLREYFLETDVGMHRDVVAVDKGLTPLSLAKENWRKPVVLDTNDRLEVWQSKELHGRFYRALHGPDVDLLASVAWLRFGDLFGETEGFVCAIMDEVMMTNNYRRFIVKDGTVDICRACHRPGESIRHIISGCSRLANGEYLHRHNLVARIIHQQLALKYSLVESEVPYYRYVPDPVLENGHITLYWDRSIITDRTIVANKPDIVVVDRSERRAMIVDITVPHDENLVKAEKDKQIKYLDLAREVVDMWDVDSAIIVPIVVTANGLIAKSLDQHLRRLSLGSWIKGLIQKAVLLDTARIVRRFLSLEP

SEQ ID NO: 13104 - protein, 1200 aa, Furcula furcula
MLTRSRNKARLRPPDSSPRSASQSPQLNQEANGTPAPVASSESDEYFSPPTSPPPVRRRRGRPPRELGLLEQPAPNRVLAPGGVVRRMRWTSSINENVMRAYYEATEGGTSLTAYRNRMLSLFQALEPAVNVSAQRLSDQVRAIQRSHMLDGAVLDRLRSEVQGSRVAPCTSSSQAVAPAVNTAPAPRLVAISDDDRDDITTNVSTNISTQLRSTLEDVVREYRTMPCGLRPRLPRLPMHKRNRALVCALDSLLSCYFDSSEDLADAHSLLYCAAMTACRVARVKLQNTDAATRPRPAVPAWQCRIERRIGEARVLIGKLTCFREGNTRPRVMRFVRRAFSGTGIDPREYLSRVTERIDFLKQKVCAWASRIRRYRARADRYFQNNMFQRDQRWVYRSWERPSHTEGDVRRPDDDAMATFWRNIWSVPVTHSEGDWIGDVEQVCEPLPEMGAITIWPQDVADAVRLLPNWKAPGPDGLHNFWLKSIRSSHICLASLFQSALESGSLPEFMTTGITHLLHKTNSTTDPKNYRPITCLPTVYKTLTSILRTKIYRHVEDNSIMSASQNGCRSGARGTKELLLIDMAICQQARRNRKDLSTCWIDYKKAYDSVPHTWLMRVLELYKVNATLRTFLASCMRQWRTVLRYPGSRQTLGDGEPIRIERGIFQGDSLSPLWFCLALNPLSTLLKSSGLGYRLRRGGQVISHLLYMDDLKLFAPTELQLMGLLRVTETFSNSIRMEFGVDKCAVMHVKRGRIVESRSVQLSDSTDLKTLSATETYKYLGMSQALGINETDMKQSLRDRFLGRLRKVLKSLLSGGNRVRAYNGWVMPVLMYSFGILKWTQTELDTLDRTVRTLLTTYRMHHPRSSVMRLYIPRKCGGRGFLNAKTQHNREIYNLREYFLHCGGEMHTDVVAVDNGLTPLSLAKGNWRKPVVLTTGDREAVWQSKELHGRFYRALHGPDVDFSASVAWLRFGDLFGETEGFVCAIMDEVVMTNNYRKYILRDGTIDICRACHRPGESLRHIISGCSRLANGEYLHRHNQVARIIHQQLALRYRLVTSEVPYYRYVPEPVLEDGHITLYWDRSIITDRTIVANRPDIVLIDRTERRAMIVDVTVPHDENLVKAEKDKECKYLDLAHEVVDMWDIDKAIIVPIVVSAHGLMAKSLDKHLKRLTLDGWIKGQIQKAVLLETARIVRRFLSLEP

SEQ ID NO: 13105 - protein, 1132 aa, Furcula furcula
MGRLGQPAPNRVLAPGGVVRRMKWTSSINESVMRAYYEATEGGTNLTAYRNRMLSLFQALEPAVNVSAQRLSDQVRAIQRGHMLDGPVLDRLRSEVQGSRVAPCIPSSQAVAPVVNTALVPRLAANSDDDRDDMTTDVSTNVSTQLRSALEDAVREYRTMPQSLRPRLPRLPMHRRNRAPVCALDSLLSSYFVSSEDLADAHALLYCAAITACRVARVKFPDAATRPKPAVPAWQYRIERRIGEARVLIGKLTCFREGNTRPRVMRFVRRAFSGTGIDPQEYLSRVTERIDFLKQKVCAWANRIRRYRARVDRYSQNNMFQRDQRWVYRSWERPSQTVGEVQRPDDDAMIRFWRNIWSVPVAHSEGDWIGDVEEVCEPLPEMGPITIGPQDVADAVRPLPNWKAPGPDGLHNFWLKWLRSSHVCLASLFQSALESGSLPEFMTTGITHLLHKTDSTTNPKNYRPITCLPTVYKTLTSILRAKIYRHVEDNSIMSSSQNGCKSGARGTKELLLIDMAICQQARRNRKDLSTCWIDYKKAFDSVPHTWLMRVLELYKVNTTLRTFLASCMRQWRTVLLYPGSRQTLGNGDPIRIERGIFQGDSLSPLWFCLALNPLSTLLKSSGLGCRLRRGGQVISHLLYMDDLKLFAPTELQLTGLLKVTETFSNSIRMEFGVDKCAVMHVKRGRMVESRSVQLSDSTDLRTLSATETYKYLGMSQALNINETDMKQSLRERFLGRLRKVLKSLLSGGNKVRAYNGWVMPVLMYSFGILKWTQTELDALDRTVRTLLTTYRMHHPRSSVMRLYIPRKCGGRGFLNAKTLHNREIYNLREYFLHCGGEMHTDVVAVDNGLTPLSLAKGNWRKPVVLTTGDREAVWQSKELHGRFYRALHGPDVDFSASVAWLRFGDLFGETEGFVCAIMDEVVMTNNYRKYILRDGTIDICRACHRPGESLRHIISGCSRLANGEYLHRHNQVARIIHQQLALKYRLVTSEVPYYRYVPEPVLEDGHITLYWDRSIITDRTIVANKPDIVLIDRTERRAMIVDVTVPHDENLVKAEKDKQCKYLDLAHEVVDMWDIDNAIIVPIVVSAHGLMAKSLDKHLKRLTLDGWIKGQMQKAVLLETARIVRKFLSLEP

SEQ ID NO: 13106 - protein, 1194 aa, Furcula furcula
MLTRHKARLRPPDSSPRSASQPPAPSTGGAPAAVASSESDEYFSPPSSPPPVCRQRGRPPRNLGLLGQPAPNRVPVPGGVVRRMKWTPSINENVMRAYYKATEGGTNLTAYRDRMPSLFQTLEPAVNVSAQRLSDQVRAIQRGHMLDDAVLDRLRSEVQGGRVVPCIPSSQAVAPAVNTAPAPRLAANSGDDRDDMSTNISTNVSTQLRSTLEDVVREYRTMPQGLRPRLPRLPMHKRNRALVCALDSLLSSYFDSSEDLADAHSLLYCAAMTACRVARVKFPNSDAATRPRPAVPAWQCRIERREARVLIGKLTCFREGNTRPRVMRFVRCAFSGTGIDPREYLSRVTERIDFLKQKVCAWANRILRYRARVDRYSQNNMFQRDQRWVYRSWERPSQIGGEVLRPDDDAMIRFWRNIWSVPVTHSEGDWIGDVRQVCEPIPEMGAITIRPQDVADAVRPLPNWKAPGPDGLHNFWLKWLRSSHACLASLFQSAVESGSLPEFLTTGITHLLHKTNSTADPKNYRPITCLPTVYKTLTSILRAKIYRHVESNSIMSASQNGCRSGARGTKELLLIDMAICQQARRNRKDLSTCWIDYKKAYDSVPHTWLMRVLELYKVNTTLCTFLASCMRQWRTVLLYPGSRQTLGDGEPIRIERGIFQGDSLSPLWFCLALNPLSTLLKSSGLGYRLRRGGQVISHLLYMDDLKLFAPTEVQLMGLLKVTETFSSSIRMEFGVDKCAVMHVKRGRLVESRSVQLSDSTDLRTLSATETYKYLGMSQALGINETDMKQSLRERFLGRLRKVLKSLLSGGNRVRAYNGWVMPVLMYSFGILKWTQTELDTLDRTVRTLLTAYRMHHPRSSVMRLYIPRKCGGRGFLNAKTLHNREIYNLREYFLHCGGEMHTDVVAVDIGLTPLSLAKGNWRKPVVLTTGDREAVWQSKELHGRFYRALHGPDVDFSASVAWLRFGDLFGETEGSVCAIMDEVVMTNNYRKYILRDGTIDICRACHRPGESLRHIISGCSRLANGEYLHRHNQVARIIHQQLALKYRLVTSEVPYYRYVPEPVLEDGHITLYWDRSIITDRTIVANRPDIVLIDRTERRAMIVDVTVPHDENLVKAEKDKECKYLDLAHEVVDLWDIDKAIIVPIVVSAHGLMAKSLDKHLKRLTLDGWIKGQMQKAVLLETARIVRKFLSLEP

SEQ ID NO: 13107 - protein, 1069 aa, Arctia plantaginis
MKWTNSINENVMRAYYRATEMGTNLTAYRVRLISLFQELEPAVNVSAQRLSDQVRAIQRCHLLDDAVLERIRSDIRNSLIIPSSSHTVDLVANSTPQLVSHTNDVDELVEGEVISVSTQYNDRIRSALEDAILEYRYVNWNNRPRLSRLPILKRNLALVGALDSLLPDYLDNSEDLGDTHSILYCAAVAVCRVAGVNIVENVTTTRPKSTVPAWQCRIERRIAETRVLIGKLISFRSGNTRPRVMRFVKQAFLGTTIGPQQYMSCVTERIDFLKQKIYAWANRIRRYKKRIDRYNQNRMFQRNEKWVYRKWEEPDPCVSHGHLPDENVTHTFWRNIWSVPVTHIEGDWLRDVRRSCESITPMEPVIIDKDDVSCAVRSLPNWKSPGLDGLHNFWLKWFRSSHACLASQFQAALDSGSLPQFLTTGITHLLYKSGSVMDPKNFRPITCLPTMYKLLTSILRLKITLHINNNSIMSVSQNGCRSGSRGTKDLLIIDRAISQQVRRNRKSLATCWIDYKKAYDSVPHTWLLRVLELYKIDTTLCTFLKSCMGQWRTVLRYPGCRQTTVIDALIKIERGIFQGDSLSPFWFCLALYPLSTLLEGSGLGYRLQKDDQVISHLLYIDDLKLLAPTKLQLSALLKVTENFSNSIKMEFGVDKCAVMYVKKGEIVESEGIELSDSTKLRSLSATETYKYLGISQSLGIPESDMKQTLQERFFGRLKKVLKSLISGGNKVRACNGWVMPILMYSFGILKWTQTELDALDRRVRTLLTAFRMHHPHSSVMRLYIPRKLGGRGLLNIKTLHNREICNLREYFLHTDVGMHRNVVAVDIGLTPLALAKENWRKPVVFSTNDRREVWKGKELHGRFYRALNGSDIDFKASTTWLRYGDLFGETEGFVCAIMDEVIMTNNHRKYILKDGTVDICRACHRPGESIRHIISGCSRLANGEYLHRHNQVARIVHQQLALKYHLVNLEVPYYRYVPDPVLENGRATLYWDRSIITDRTIVANKPDIVVIDRLERRAMIVDIAVPHDENLVKVEKEKQIKYLDLSHEIVDMWNVDSVIIVPIVVSAHD

SEQ ID NO: 13108 - protein, 868 aa, Mamestra configurata
MRFVRRAFSGTDTSPRDYLTRVTERIDFLKQKIYAWANRIRRYKRRVERYTQNRTFQSNERWVYRAWERPDQGVTDTRLPDDDVMCSFWRNIWSVPVSHTEGDWTREVERACDPIPEMGAITISPQDVARAVRPLPNWKSPGPDGLHNFWIKWFKRSHARLASQFQSALESGSLPQFLTTGITHLLHKSGSTAEPKNYRPITCLPTVYKVLTSILRAKINQHIETNSIMSASQNGCRNRSRGTKELLLIDVAISQQVRRSRRDLSTCWIDYKKAYDSVPHTWLMRVLELYKVDAVLRTFLMSCMGQWRTVLRYPGCRQIQANSDPIRIERGIFQGDSLSPLWFCLALNPLSTLLEGSGQGYRLRRGGQVISHLLYMDDLKLFAPNNLQLMKLLKVTETFSSAISMEFGVDKCAVMHVKRGEIMESVGTQLSDSIHLRSLSSTETYKYLGMSEALGINANDVKQSLKERFFGRLNKVLNSLLSGGNKVRAFNGWVMPVLMYSFGILKWTQTELDALDRRVRSLLTANRMHHPRSSVMRLYIPRKCGGRGFLNAKTLHNREICSLREFFLEADVGMHRDVVAVDKGLTALSLANENWRKPVVLDTNDRREVWQSKELHGRFYRVLHGPDVDFLASVAWLRFGDLFGETEGFVCAIMDEVMMTNNYRKYIVKDGTVDICRACHRPGESIRHIISGCSSLANGDYLHRHNLVARIIHQQLALKYNLVESEVPYYRYVPDPVLENGNCTLYWDRSIITDRTIVANKPDIVVIDRLERRAMIVDIAVPHDANLVKTEKDKQTKYLDLAREVVDMWDVNTAVIVPIVVTANGIIAKSLDQHLKRLSLGSWIKGLIQKAVLLDTARIVRRFLSQGP

SEQ ID NO: 13109 - protein, 1208 aa, Amphipyra berbera
MLTRSRTKTQDTRTRPRPSASSLSSASQPPDSSIVSDVTPAAAVASSSSDEFYSPPTSPPPPPRRGRRGRGRPPACMGPRGPPASDRVPAPGGSVQRMRWTLTMNENCMRAYFGATEGGTNLTAYRGRMLSLFQVLEPSVNVSAQRLSDQVRVIQRDHRLTDAALDRLRSEVQSNRIISLQSQTAAQPQTPTVVPPLPIHADEESDDRVTNVSTQCNEQLRSALELAIREYRFTPPNIRPRIPRLPMHRKNRALMCALDSLLSSYFDNSENLEDTHSILYCAAVAACRVAHAKFDNNDRATRPKPAVPAWQCRIERRINEARALIGKLICFREGNTRPRVMRFVRRAFSGTDINPRDYLSRVTERVDFLKQKVYAWANRIRRYKRRVERYTQNRMFHSDERWVYRTWERPDHDVSDTHLPDNDVMNTFWRNIWSMPVTHAEGDWMQEVQRACEPIEEMGDITIVPQDVTSAVRPMANWKSPGPDGLHNFWLKWLRSSHARLASQFQSSLESGSLPEFLTTGVTHLLHKSGSTAEPKNYRPITCLPTVYKLLTSILRAKINSHIINNSIMSVSQNGCKNGSRGTKELLLIDMAISQQVRRSRKDLSTCWIDYKKAYDSVPHTWLMRVLELYKVNTTLCAFLTSCMGQWRTVLHYPGCRQIQGRGEPIRIERGIFQGDSLSPLWFCLALNPLSTLLEGSGLGYRLRRGGQVISHLLYMDDLKLFAPNNLQLVKLLKVTETFSNSIRMEFGVDKCAVMHVKRGGIMESVGTQLSDSIHLRSLSSTETYKYLGMSEALGINETDMKQSLRERFYGRLKKVLKSLLSGGNKVRAFNGWVMPVLMYSFGILKWTQTELDALDRRVRTLLTAYRMHHPRSSVMRLYIPRKCGGRGFLNAKTLHNREVCSLREYFLHADVGMHRDVVAVDKGFTPLSLAKENWRKPVVLDTNGRREVWQSKELHGRFYRALHGPDVDFLASVAWLRFGDLFGETEGFVCAIMDEVILTNNYRKYIVKDGTVDICRACHCPGESIRHIISGCSRLANGEYLHRHNLVARIIHQQLALKYNLVDAEVPYYKYVPDPVLENGHITLYWDRSIITDRTIVANKPDIVVIDRSERLAMIVDITVPHDENLVKAEKDKEIKYQDLAHEVVDMWEVDSAVIVPIVVTANGLIAKSLDQHLTRLALGSWIKGLIQKAVLLDTARIVRKFLSLRP

SEQ ID NO: 13110 - protein, 1020 aa, Amphipyra berbera
MQPIAVPPRPIHVDGEGDGEAINVSNQCSEELRSALDDAILEFRTTPPEIRPRLPRLPMHGKNRALMCALDSLLSNYFDGSEDLADTHSILYCAAIAACRVAHVKFTENERATRPKPAVPAWQSRIERRIGGARVLIGKLICFREGNNRPRVMRFVRRAFSGTDISPRDYMSRVTERIDFLKQKVYAWANRIRRYKRRVERYTQNRIFQSDQRRVYRAWERPDPGGGDVRLPDDDALSSFWRSIWSVPIAHTEDGWMRDIEQVCEPIAEMEPITITPQDVADAARPLPNWKSPGPDGLHNFWLKWLRSSHARLASQFQSSLESGSLPQFLTTGVTHLLYKSGSTAEPKNYRPITCLPTVYKLLTSILRVKITTHIDNNCIMSASQNGCRKGSRGTKELLLIDMAISQQVRRSQKDLSTCWIDYKKAYDSVPHSWLMRVLELYKINTTLRTFLMSCMRHWRTVLRYPGCRRIRGSGEQIRIERGIFQGDSLSPLWFCLALNPLSTLLEGTGLGYQLRRGGQVISHLLYMDDLKLFAPTDLQLMELLKVTENFSNSIRMEFGVDKCAVMHVKRGRIAESEGIQLPNSVQLRSLSPTETYKYLGMSEALGISETDMRQSLRERFFGRLNKLLKSLLSGGNKVRAFNGWVMPVLMYSFGTLKWTQADLDALDRRVRALLTAHRMHHPRSSVMRLYIPRKCGGRGFLNAKTLHNREVYSLREYFLQAEGVMHRDVVAVDKGFTPLALARENWRKPAVLSTNDREVVWQSKELHGRYYRALHGPDVDFSASVSWLRSGNLFGETEGFVCAIMDEVMMTNNYRKYIVKDGMVDICRACHRPGESIRHIVSGCSRLANGEYLHRHNLVARIIHQQLALKYNLVESEVPYYRYVPDPVLENGHATLYWDRSIITDRTIVANKPDIVVIDRSERRTMIVDITVPHDENLVKAEKDKQIKYLDLAHEVVGMWDVDSAVIVPIVVTANGIIAKSLDIHLMRLSLGGWIKGLIQRAVLLDTARIVRRFLSLEP

SEQ ID NO: 13111 - protein, 868 aa, Amphipyra berbera
MRFVRRAFSGTDINPREYMSRVTERIDFLKQKVYAWANRIRRYKRRVERYTQNRMFHSDERWVYRTWERPEHDVSDTHLPDNDVMNTFWRNIWSMPVTHTEGDWMQEVQRACEPIEEMGDIIIVPQDVTSAVRPMANWKSPGPDGLHNFWLKWLRSSHARLASQFQSSLESGSLPPFLTTGITHLLHKSGSTAEPKNYRPITCLPTIYKLLTSILRAKINTHIINNSIMSASQNGCKNGSRGTKELLLIDMAISQQVRRSRKDLSTCWIDYKKAYDSVPHTWLMRVLELYKVNTTLCAFLTSCMGQWRTVLHYPGCRQIQGRGEPIRIERGIFQGDSLSPLWFCLALNPLSTLLEGSGLGYRLRRGGQVISHLLYMDDLKLFAPNNLQLMKLLKVTETFSNSIRMEFGVDKCAVMHVKRGGIMESVGTQLSDSIHLRSLSSTETYKYLGMSEALGINETDMKQSLRERFYGRLKKVLKSLLSGGNKVRAFNGWVMPVLMYSFGILKWTQTELDALDRRVRTLLTAYRMHHPRSSVMRLYIPRKCGGRGFLNAKTLHNREVCSLREYFLQADVGMHRDVVAVDKGFTPLSLAKENWRKPVVLDTNGRREVWQSKELHGRFYRALHGPDVDFLASVAWLRFGDLFGETEGFVCAIMDEVMMTNNYRKYIVKDGTVDICRACHCPGESIRHIISGCSRLANGEYLHRHNLVARIIHQQLALKYNLVDAEVPYYKYVPDPVLENGHITLYWDRSIITDRTIVANKPDIVVIDRTERLTMIVDITVPHDENLVKAEKDKEIKYQDLAHEVVDMWEVDSAVIVPIVVTANGLIAKSLDHHLTRLSLGSWVKGLIQKAVLLDTARIVRKFLSLRP

SEQ ID NO: 13112 - protein, 1202 aa, Amphipyra berbera
MLTRSRTRTTEQRSARPPPPDSPFSSASQPPELGLPVTPAAAASSSSSDEYFSPPTSPRPVRRQGRGRPPNSLGPRGPPAPSRVLAAGGYVQRMKWTQSINENVMRAYYGSTEGGTNLTAYRVRMLTLFQELEPAINVSAQRLSDQVRVIQRNHRLDDAALDRLRLEVQNSRAIPVPSQTAVHQLINVAPPRSDRVDGDEDDGAVTVSSQYNDRLRSALEDAIRECRANPESRPRLPRLPMHNKNRALVCALDSLLASYFESSEDLGDTHSILYCAAVAACRVANVKFNNSERATRPKLAVPAWQCRIERRIDETRALIGKLICFREGNTRPRVMRFVRRAFSGTGISPREYTSRATERIDFLKQKVCAWASRIRRYKRRVERYTQNRMFQCDQRWVYRAWERPDQSVSGGRLPDDDAMSSFWRSIWSVPVIHTEGDWMRDIERTCDSIEEMGEIVISPQDVAGAVRPLPNWKSPGPDGLHNFWIKWLRSSHARLASQFQSSLESGSLPQFLTTGVTHLLHKSGSTAEPKNYRPITCLPTVYKLLTSILRSKINTHIGNNSVLSSSQNGCRNGSRGTKELLLIDTAISQQVRRSQKSLSTCWIDYKKAYDSVPHTWLMRVLELYKINTTLRTFLRSCMGQWRTVLRYPGCQPIRGSGEPIRIERGIFQGDSLSPLWFCLALNPLSTLLEGSGLGYPLRRGGQVVSHLLYMDDLKLFAPTKLQLVDLLKVTETFSNSIRMEFGVDKCAVMHVRRGRIMESEGLQLSDSIHLSPLSANDTYKYLGMSEGLGISEADMKQSLRERFFGRLKKVLKSLLSGGNKVRAFNGWVMPVLMYSFGILKWTQTELDALDRRVRTLLTANRMHHPRSSVMRLYIPRKCGGRGLLNAKTLHNREVCSLREFFLHADAGMHRDVVAVDKGLTPLSLARENWRKPVVLSTNDRREIWQSKELHGRFYRALHGPDVDFLASVSWLRFGDLFGETEGFVCAIMDEVIMTNNYRKYIVKDGTVDICRACHCPGESLRHIISGCSRLANGEYLHRHNQVARIIHQQLALKYNLVESEVPYYRYVPDPVLENGRITLYWDRSIITDRTIVANKPDIVVIDRSERRTMIVDVTIPHDGNLVKAEKDKQIKYLDLAHEVVNMWDVESATIVPIVVTANGLMAKSLDKHLMRLSLGGWIKGLIQKAVLLDTARIVRRFLSLEP

SEQ ID NO: 13113 - protein, 954 aa, Amphipyra berbera
MCALDSLLSSYFDNSESLEDTHSILYCAAVAACRVAHAKFDNNDRATRPKPAVPAWQCRIERRINEARALIGKLICFREGNTRPRVMRFVRRAFSGTDINPRDYLSRVTERIDFLKQKVYAWANRIRRYKRRVERYTQNRMFHSDERWVYRTWERPDHDVSDTHLPDNDVMNTFWRNIWSMPVTHIEGDWMQEVQRACEPIEEMGDITIVPQDVTSAVRPMANWKSPGPDGLHNFWLKWLRSSHARLASQFQSSLESGSFPEFLTTGVTHLLHKSGSTAEPKNYRPITCLPTVYKLLTSILRAKINSHIINNSIMSVSQNGCKNGSRGTKELLLIDMAISQQVRRSRKDLSTCWIDYKKAYDSVPHTWLMRVLELYKVNTTLCAFLTSCMGQWRTVLHYPGCRQIQGRGEPIRIERGIFQGDSLSPLWFCLALNPLSTLLEGSGLGYRLRRGGQVISHLLYMDDLKLFAPNNLQLVKLLKVTETFSNSIRMEFGVDKCAVMHVKRGGIMESVGTQLSDSIHLRSLSSTETYKYLGMSEALGINETDMKQSLRERFYGRLKKVLKSLLSGGNKVRAFNGWVMPVLMYSFGILKWTQTELDALDRRVRTLLTAYRMHHPRSSVMRLYIPRKCGGRGFLNAKTLHNREVCSLREYFLQADVGMHRDVVAVDKGFTPLSLAKENWRKPVVLDTNGRREVWQSKELHGRFYRALHGPDVDFLASVAWLRFGDLFGETEGFVCAIMDEVMMTNNYRKYIVKDGTVDICRACHCPGESIRHIISGCSRLANGEYLHRHNLVARIIHQQLALKYNLVDAEVPYYKYVPDPVLENGHITLYWDRSIITDRTIVANKPDIVVIDRSERLAMIVDITVPHDENLVKAEKDKEIKYQDLAHEVVDMWEVDSAVIVPIVVTANGLIAKSLDQHLTRLALGSWIKGLIQKAVLLDTARIVRKFLSLRP

SEQ ID NO: 13114 - protein, 1207 aa, Amphipyra berbera
MLTRSRAKATAQNTRPRPSASSLSSASQPPDSSIVSNVTPAAAVASSSSDEYFSPPSTPPPPPPRQRGRGRPPASLGPRGPPASDRVPAPGGSVQRMRWTPTMNENCMRAYFGATEGGTNLTAYRGRMLSLFQVLEPAVNVSAQRLSDQVRVIQRDHRLTDDALDRLRSEVQSNCIISLQSQTAAQPQVPPMVPPQPIRADEESDDRVTIVSAQCNEQLRSALELAIREYRFTPPNLRPRIPRLPMNRQNRALMCALDSLLSNYFDNSEGLEDTHSILYCAAVAACRVAHVKFDNNDRATRPKPAVPAWQCRIERRINEARALIGKLICFREGNTRPRVMRFVRRAFSGTDINPREYMSRVTERIDFLKQKVYAWANRIRRYKRRVERYTQNRMFHSDERWVYRTWERPEHDVSDTHLPDNDVMNTFWRNIWSMPVTHTEGDWMQEVQRACEPIEEMGDIIIVPQDVTSAVRPMANWKSPGPDGLHNFWLKWLRSSHARLASQFQSSLESGSLPPFLTTGITHLLHKSGSTAEPKNYRPITCLPTIYKLLTSILRAKINTHIINNSIMSASQNGCKNGSRGTKELLLIDMAISQQVRRSRKDLSTCWIDYKKAYDSVPHTWLMRVLELYKVNTTLCAFLTSCMGQWRTVLHYPGCRQIQGRGEPIRIERGIFQGDSLSPLWFCLALNPLSTLLEGSGLGYRLRRGGQVISHLLYMDDLKLFAPNNLQLMKLLKVTETFSNSIRMEFGVDKCAVMHVKRGGIMESVGIQLSDSIHLRSLSSTETYKYLGMSEALGINETDMKQSLRERFYGRLKKVLKSLLSGGNKVRAFNGWVMPVLMYSFGILKWTQTELDALDRRVRTLLTAYRMHHPRSSVMRLYIPRKCGGRGFLNAKTLHNREVCSLREYFLQADVGMHRDVVAVDKGFTPLSLAKENWRKPVVLDTNGRREVWQSKELHGRFYRALHGPDVDFLASVAWLRFGDLFGETEGFVCAIMDEVMMTNNYRKYIVKDGTVDICRACHCPGESIRHIISGCSRLANGEYLHRHNLVARIIHQQLALKYNLVNAEVPYYKYVPDPVLENGHITLYWDRSIITDRTIVANKPDIVVIDRTERLTMIVDITVPHDENLVKAEKDKEIKYQDLAHEVVDMWEVDSAVIVPIVVTANGLIAKSLDHHLTRLSLGSWVKGLIQKAVLLDTARIVRKFLSLRP

SEQ ID NO: 13115 - protein, 1197 aa, Noctua janthe
MLTRSATRRARLSPPDPSLSSASPPPESSPIVSAVTPAVAVASSSSDEYFSPPTTPPPVRRRGGRRPPDGLGPRGPPASDRVPAPGGSVPRMRWTQSINANVMRAYYGATEGGNNLTAYRVRMLSLFQVLEPAVNVSAQRLSDQVRVIQRNGMLDDTVLDRLRTEMQSSHVIATPPQTVVPPQSTIIPTHDNNVSNDMVTNVSTQCNEEMRCALEGAIREYRFMQPDLRPRVPRLPMHNKNKVLVAVLDSQLSNYFDNCENLTDAHSVLYCAAVAACRVAHVKFSDDRATRPKPAVPSWQYRIERRIGEARALIGKLICFREGNTRPRVMRFVRRAFSGTDISARDYMSRVTERIDFLKQKVYAWANRIRRYKRRVDRYTQNRTFQRDERWVYRAWERPDQGVSDTHLPDDDAMCSFWRSIWSVPVSHTEGEWTREVERACDLVPEMGAITISPQDVVRAVRPLPNWKSPGPDGLHNFWIKWFTRSHARLAILFQSALESGSLPEFLTTGITHLLHKSGSTAEPKNYRPIACLPTVYKVLTSILRAKINKHIDDNSVMSASQNGCRNGSRGTKELLLIDMAISQQVRRSRRDLSTCWIDYKKAYDSVPHTWLMRVLELYKVDSTLRIFLMSCMGQWRTVLRYPGCRQIQRNSEPIRIERGIFQGDSLSPLWFCLALNPLSTLLEDSGLGYRLRRGGQVISHLLYMDDLKLFAPNDLQLMELLKVTETFSSAIRMEFGVDKCAVMHVKRGEIVESVGTQLSDSINLRSLSATETYKYLGMSEALGINVADMKQSLKERFFGRLKKVFNSLLSGGNKVRAFNGWVMPVLMYSFGILKWTQTELDALDRRVRTLLTTYRMHHPRSSVMRLYIPRRCGGRGFLNAKTLHNREIYSLREYFLETDVGMHRDVVAVDKGLTPLSLAKENWRKPVVLDTNDRMEVWQSKELHGRFFRALHGPDVDLPASVAWLRSGDLFGETEGFVCAIMDEVMMTNNYRRFIVKDGTVDICRACHRPGESIRHIISGCSRLANGEYLHRHNLVARIIHQQLALKYNLVESEVPYYKYVPDPVLENGSITLYWDRSIVTDRTIVANKPDIVVVDRSERRAMIVDITVPHDGNLVKAEKDKQIKYLDLAHEVVDMWDVDSAIIVPIVVSAHGLIAKSLDQYLRRLSLGSWIKGLIQKAVLLDTARIVRRFLSLEP

SEQ ID NO: 13116 - protein, 1197 aa, Noctua janthe
MLTRSAARRARLSPPDPSLSSASPPPESSPVVSAVTPAVAVASSSSDEYFSPPTTPPPVRRRGGRRPPDGLGPRGPPASDRVPAPGGSVPRMRWTQSINANVMRAYYGATEGGNKLTAYRVRMLSLFQVLEPAVNVSAQRLSDQVRVIQRNGMLDDTVLDRLRTEMQSSHVIATPQQTVVPPQSTIIPTHDNNVSNDMVTNVSTQCNEEMRCALEGAIREYRFMQPDLRPRVPRLPMHNKNRVLVAVLDSQLSNYFDNCEDLTDAHSVLYCAAVAACRVAHVKFSDDRATRPKPAVPSWQYRIERRIGEARALIGKLICFREGNTRPRVMRFVRRAFSGTDISARDYMSRVTERIDFLKQKVYAWANRIRRYKRRVDRYTQNRTFQRDERWVYRAWERPDQGVADTRLPDDDAMCSFWRSIWSVPVSHTEGEWTREVERACDLVPEMGAITISPQDVVRAVRPLPNWKSPGPDGLHNFWIKWFTRSHARLAILFQSALESGSLPEFLTTGITHLLHKSGSTAEPKNYRPITCLPTVYKVLTSILRAKINKHIDDNSVMSASQNGCRNGSRGTKELLLIDMAISQQVRRSRKDLSTCWIDYKKAYDSVPHTWLMRVLELYKIDATLRTFLMSCMGQWRTVLRYPGCRQIQRNSEPIRIERGIFQGDSLSPLWFCLALNPLSTLLEDSGLGYRLRRGGQVISHLLYMDDLKLFAPNDLQLMELLKVTETFSSAIRMEFGVDKCAVMHVKRGEIVESVGTQLSDSINLRSLSATETYKYLGMSEALGINVADMKQSLKERFFGRLKKVFNSLLSGGNKVRAFNGWVMPVLMYSFGILKWTQTELDALDRRVRTLLTAYRMHHPRSSVMRLYIPRRCGGRGFLNAKTLHNREICSLREYFHETDVGMHRDVVAVDKGLTPLSLAKENWRKPVVLDTNDRMEVWQSKELHGRFFRALHGPDVDLSASVAWLRSGDLFGETEGFVCAIMDEVMMTNNYRRFIVKDGTVDICRACHRPGESIRHIISGCSRLANGEYLHRHNLVARIIHQQLALKYNLVESEVPYYKYVPDPVLENGSITLYWDRSIITDRTIVANKPDIVVVDRSERRAMIVDITVPHDENLVKAEKDKQIKYLDLAREVVDMWDVDSAIIVPIVVSAHGLIAKSLDQYLRRLSLGSWIKGLIQKAVLLDTARIVRRFLSLEP

SEQ ID NO: 13117 - protein, 868 aa, Noctua janthe
MRFVKRAFSGTDVSFRDYLARVTERIDFLKQKICAWASRIRRYKRRVERYTQNRTFRSDERWVYRAWERPDQGVTDTRLPDDDAMCSFWRNIWSVPVSHTEGDWTREVERACDPIPEMGAIIISPQDVARAVRPLPNWKSPGPDGLHNFWIKWFQRSHVRLASQFQSALESGSLPQFLTTGITHLLHKSGSTAEPKNYRPITCLPTVYKVLTSILRAKINHRIDSNSIMSASQNGCRNGSRGTKELLLIDMAISQQVRRSRRDLSTCWIDYKKAYDSVPHTWLMKVLELYKVDATLRSFLMSCMGHWRTVLRYPGCRQIQGNSEPTKIERGIFQGDSLSPLWFCLALNPLSTLLEGSGLGYRLRRGGQVISHLLYMDDLKLFAPNNLQLMKLLKVTETFSSAIRMEFGVDKCAVMHVKRGEIMESVGTQLSDSIHLRSLSSTETYKYLGMSEALGINTADMKQSLRDRFFGRLNKVLSSLLSGGNKVRAFNGWVMPVLMYSFGILKWTQTELDALDRRVRALLTANRMHHPRSSVMRLYTPRKCGGRGFLNAKTLHNREICSLREYFLEVDEGMHRDVVSVDKSLTPLSLANENWRKPRVLDTNDRKEVWQGKELHGRFYRALHGPDVDFLASVSWLRFGDLFGETEGFVCAIMDEVMMTNNYRKYIVKDGTVDICRACHRPGESIRHIISGCSRLANGEYLHRHNLVVRIIHQQLALKYNLVESEVPHYKYAPDPVLDNGSITLYWDRSIITDRTIVANKPDIVVVDRSERRAMIVDITVPHDENLVKAEKDKQFKYLDLAREVVDMWDVDSAIIEPIVVSAHGLIAKSLDQYLRRLSLGSWIKGLIQKAVLLDTARIVRRFLSLEP

SEQ ID NO: 13118 - protein, 1045 aa, Noctua janthe
MLDDTVLDRLRTEMQSSHVIATPPQTVVPPQSTIIPTHDNNVSNDMVTNVSTQCNEEMRCALEGAIREYRFMQPDLRPRVPRLPMHNKNKVLVAVLDSQLSNYFDNCENLTDAHSVLYCAAVAACRVAHVKFSDDRATRPKPAVPSWQYRIERRIGEARALIGKLICFREGNTRPRVMRFVRRAFSGTDISARDYMSRVTERIDFLKQKVYAWANRIRRYKRRVDRYTQNRTFQRDERWVYRAWERPDQGVADTHLPDDDAMCSFWRSIWSVPVSHTEGEWTREVERACDLVPEMGAITISPQDVVRAVRPLPNWKSPGPDGLHNFWIKWFTRSHARLAILFQSALESGSLPEFLTTGITHLLHKSGSTAEPKNYRPIACLPTVYKVLTSILRAKINKHIDDNSVMSASQNGCRNGSRGTKELLLIDMAISQQVRRSRRDLSTCWIDYKKAYDSVPHTWLMRVLELYKVDSTLRIFLMSCMGQWRTVLRYPGCRQIQRNSEPIRIERGIFQGDSLSPLWFCLALNPLSTLLEDSGLGYRLRRGGQVISHLLYMDDLKLFAPNDLQLMELLKVTETFSSAIRMEFGVDKCAVMHVKRGEIVESMGTQLSDSINLRSLSATETYKYLGMSEALGINVADMKQSLKERFFGRLKKIFNSLLSGGNKVRAFNGWVMPVLMYSFGILKWTQTELDALDRRVRTLLTTYRMHHPRSSVMRLYIPRRCGGRGFLNAKTLHNREIYSLREYFLETDVGMHRDVVAVDKGLTPLSLAKENWRKPVVLDTNDRMEVWQSKELHGRFFRALHGPDVDLPASVAWLRSGDLFGETEGFVCAIMDEVMMTNNYRRFIVKDGTVDICRACHRPGESIRHIISGCSRLANGEYLHRHNLVARIIHQQLALKYNLVESEVPYYKYVPDPVLENGNITLYWDRSIVTDRTIVANKPDIVVVDRSERRAMIVDITVPHDGNLVKAEKDKQIKYLDLAHEVVDMWDVDSAIIVPIVVSAHGLIAKSLDQYLRRLSLGSWIKGLIQKAVLLDTARIVRRFLSLEP

SEQ ID NO: 13119 - protein, 1199 aa, Noctua janthe
MLTRSAARRTRLSPPDPSLSSASPPPESRPVLSAVTPAVAVASSSSDEYFSPPTTPPPVHRRGGRRPPDGLGPRGPPASDRVPAPGGSVPRMRWTQSINANVMRAYYGATEGGNNLTAYRVRMLSLFQVLEPAVNVSAQRLSDQVRVIQRNGMLDDTVLDRLRTEIQNSHVIATPPQTVVPPQSAAATVVPPQSTIIPNHDNNVSNDMVTNVSTQCNEEMRCALEGVIREYRFMQPDLRPLVPRLPMHNKNRVLMAALDSQLSNYFDNCEDLTDAHSILYCAAVAACRVAHVKFSDDRATRPKPAVPSWQYRIERRIGEARALIGKLICFREGNTRPRVMRFVRRAFSGTDISARDYMSRVTERIDFLKQKVYAWANRIRRYKRRVDRYTQNRTFQRDERWVYRAWERPDQGVADMRLPDDDAMCSFWRSIWSVPVSHTEGEWTREVERACDLVPEMGAITISPQDVVRAVRPLPNWKSPGPDGLHNFWIKWFTRSHARLAILFQSALESGSLPEFLTTGITHLLHNKNYRPITCLPTVYKVLTSILRAKINKHIDDNSVMSASQNGCRNGSRGTKELLLIDMAISQQVRRSRRDLSTCWIDYKKAYDSVPHTWLMRVLELYKVDSTLRIFLMSCMGQWRRVLRYPGCRQIQRNSEPIRIERGIFQGDSLSPLWFCLALNPLSTLLEDSGLGYRLRRGGQIISHLLYMDDLKLFAPNDLQLMELLKVTETFSSAIRMEFGVDKCAVMHVKRGEIVESVGTQLSDSINLRSLSATETYKYLGMSEALGINVADMKQSLKERFFGRLKKVFNSLLSCGNKVRAFNDWVMPVLMYSFGILKWTQTELDALDRRVRTLLTAYRMLHPRSSVMRLYIPRRCGGRGFLNGKTLHNREICSLREYFLETDVGMHRDVVAVDKGLTPLSLAKENWRKPVVLDTNDRMEVWQSKELHGRFFRALHGPDVDLSASVAWLCSGDLFGETKGFVCAIMDEVMMTNNYRRFIVKDGTVDICRACHRPGESIRHIISGCSRLANGEYLHRHNLVARIIHQQLALKYNLVESEVPYYKYVPDPVLQNGSITLYWDRSIVTDRTIVANKPDIVVVDRSERRAMIVDITVPHDGHLVKAEKDKQIKYLDLAHEVVDMWDVDSAIIVPIVVSAHGLIAKSLDQYLRRLSLGSWIKGLIQKAVLLDTARIVRFLSLEP

SEQ ID NO: 13120 - protein, 1197 aa, Noctua janthe
MLTRSAARRARLSPPDPSLSSASPPPESRPVVSAVTPAVAVASSSSDEYFSPPTTPPPVRRQGGRRPPDGLGPRGPPASDRVPAPGGSVPRMRWTQSINANVMRAYYGATEGGNNLTAYRVRMLSLFQVLEPAVNVSAQRLSDQVRVIQRNGMLDDTVLDRLRTEMQSSHVIATPPQTVVPPQSTIIPTHDNNVSNDMVTNVSPQCNEEMRCALEGAIREYRFMQPDLRPRVPRLPMHNKNRVLVAVLDSQLSNYFDNCEDLTDAHSVLYCAAVAACRVAHVKFSDDRATRPKPAVPSWQYRIERRIGEARALIGKLICFREGNTRPRVMRFVRRAFSGTDISARDYMSRVTERIDFLKQKVYAWANRIRRYKRRVDRYTQNRTFQRDERWVYRAWERPDQGVADTRLPDDDAMCSFWRSIWSVPVSHTEGEWTREVERACDLVPEMGAITISPQDVVRAVRPLPNWKSPGPDGLQNFWIKWFTRSHARLAILFQSALESGSLPEFLTTGITHLLHKSGSTAEPKNYRPITCLPTVYKVLTSILRAKINKHIDDNSVMSASQNGCRNGSRGTKELLLIDMAISQQVRRSRRDLSTCWIDYKKAYDSVPHTWLMRVLELYKVDSTLRIFLMSCMGQWRTVLRYPGCRQIQRNSEPIRIERGIFQGDSLSPLWFCLALNPLSTLLEDSGLGYRLRRGGQVISHLLYMDDLKLFAPNDFQLMELLKVTETFSSAIRMEFGVDKCAVMHVKRGEIVESVGTQLSDSINLRSLSATETYKYLGMSEALGINVADMKQSLKERFFGRLKKVFNSLLSGGNKVRAFNGWVMPVLMYSFGILKWTQTELDALDRRVRTLLTAYRMHHPRSSVMRLYIPRRCGGRGFLNAKTLHNREICSLREYFLETDVGMHRDVVAVDKGLTPLSLAKENWRKPVVLDTNDRMEVWQSKELHGCFFRALHGPDVDLPASVAWLRSGDLFGETEGFVCAIMDEVMMTNNYRRFIVKDGTVDICRACHRPGESIRHIISGCSRLANGEYLHRHNLVARIIHQQLALKYNLVESEVPYYKYVPDPVLENGSITLYWDRSIVTDRTIVANKPDIVVVDRSERRAMIVDITVPHDGNLVKAEKDKQIKYLDLAHEVVDMWDVDSAIIVPIVVSAHGLIAKSLDQYLRRLSLGSWIKGLIQKAVLLDTARIVRRFLSLEP

SEQ ID NO: 13121 - protein, 1200 aa, Mythimna ferrago
MLTRAAARRARPPPPASSLSSASLPPEPSLTVSAVTPAAAAASSSSDEYYSPPTTPPPARRRGGRRPPACLGPRGPPVSDRVPAAGGSVPRMRWTQSTNENVMRAYYGATEGGNNLTAYRVRMLSLFQVLEPAVNVSAQRLSDQVRVIQRNHMLDDTVLDRLRTEMSNRVITPPSQPVVPVVVPQSSHISLHTDEVSTDTVTNVSTQCNNELRSALECAIREYRNMPLELRPRLRRLPMHNKNKALVAALDSQLSNYFDDCEDLTDTHSIMYCAAVAACRVAHVKFPNSDVATRPKPAVPAWQCRIERRIGGARALIGKLICFREGNTRPRVMRFVRRAFSGTDISPRDYMSRVTERIDFLKQKVYAWANRIRRYKRRVERYIQNSTFRSNERWVYRAWERPDQGVTDTRPPDDDAMYSFWRNIWSVPVSHTEGGWTREVERACESITEMGAFTISPQDVARAVRPLPNWKSPGPDGLHNFWIKWLQRSHARLASQYQAALESGSLPEFLTTGVTHLLHKSGSTAEPKNYRPITCLPTVYKILTSILRAKINHHVDNNAIMSASQNGCRNGSRGTKELLLIDMAISQQVRRSRKDLSTCWIDYKKAYDSVPHTWLMRVLELYKVDATLRTFLMSCMRQWKTVLRYPGCRNIQRNSEPVRIERGIFQGDSLSPLWFCLALNPLSTLLENSGLGYRLKRGGQVISHLLYMDDLKLFAPNNLQLMELLKVTETFSSAIRMEFGVDKCAVMHIKRGEIVESVGIQLSDSIHLRSLSPTETYKYLGMSEALGINATDMKQSLRERFFGRLKKVLNSLLSGGNRVRAFNGWVMPVLMYAFGVLKWTQTELDALDRRVRTLLTAYRMHHPRSSVMRLYIPRKCGGRGFLNAKSLHNREVCSLREYFLAADGGMHRDVVAVDKGLTPLSLANENWRKPVVLDTNVRREVWQSKELHGRFFRALHGPDVDQLASVAWLRIGDLFGETEGFVCAIMDEVIMTNNYRRFIVKDGTVDICRACHRPGESIRHIISGCSRLANGEYLHRHNLVARIIHQQLALKYSLVESEVPYYRYVPDPVLDSGDITLYWDRSIITDRTIVANKPDIVVVDRSERRAMIVDISVPHDENLAKAEKDKQIKYIDLAREVVDMWEVDSAIIVPIVVSANGLIAKSLDQHLRRLSLGDWIKGLIQKAVLLDTARIVRRFLSLEP

SEQ ID NO: 13122 - protein, 1200 aa, Mythimna ferrago
MLTRAAARRARPPPPASSLSSASPPPEPSLNASAVTPAATVASSSSDEFYSPPTSPPPARRRRGRRPPSSLGPRGPPASDRVPAPGGSVQRMRWTQSINENVMRSYYGATEGGNNLTAYRVRMLSLFQVLEPAVNVSAQRLSDQVRVILRNHMLDDSVLDRLRTEMSDRVITPPSQPVVPVVVPPSSHISFHTDEVSTDMVTNVSTQCNNELRSTLECAIREYRNIPPELRPRIPRLPMCNKNRALVAALDSQLSNYFDDCEDLTETHSIMYCAAVAACRVAHVKFPDSDEATRPKSAVPAWQCRIERRIGGARALIGKLICFREGNTRPRVMRFVRRAFSGTNISPRDYMSRVTERIDFLKQKVYAWANRIRRYKRRVERYTQNRTFRSNERWVYRAWERPDQGVTDARLPDDDAMCSFWRSIWSVPVSHTEGDWTREVERACDPIPQMGAIDISPQDVARAVRPLPNWKSPGPDGLHNFWIKWFTRSHARLAYQFQSALESGSLPQFLTTGITHLLHKSGSTAEPKNYRPITCLPTVYKVLTSILRSKINSHIDENSIMSPSQNGCRNGSRGTKELLLIDMTISQQVRRSRKDLSTCWIDYKKAYDSVPHTWLMRVLELYKIDTTLRTFLMSCMRQWSTVLRYPGCRNIQRNSEPVRIERGIFQGDSLSPLWFCLALNPLSTLLENSGLGYRLKRGGQVISHLLYMDDLKLFAPNNLQLMELLKVTETFSSAIRMEFGVDKCAVMHVKRGEVVESVGVQLTDSINLRSLSPTETYKYLGMSEALGISTIDMKQSLKERFFGRLKKVFNSLLSGGNKVRAFNGWVMPVLMYSFGVLKWTQTELDALDRRVRTLLTAYRMHHPRSSVMRLYIPRKCGGRGFLNAKTLHNREVCSLREYFLAADVGMHRDVVALDKGLTPLSLANENWRKPIVLDTDDRREVWQSKELHGRFFRALHGPDVDQLASVAWLRFGDLFGETEGFVCAIMDEVIMTNNYRRFIVKDGTVDICRACHRPGESIRHIISGCSRLANGEYLHRHNLVARIIHQQLALKYSLVELEVPYYRYEPDPVLDNGHITLYWDRPIITDRTIVANKPDIVVVDRSERRAMIVDISVPHDENLVKAEKDKQIKYIDLAREVVDMWEVDSAIIVPIVVSANGLIAKSLDQHLRRLSLGDWIKGLIQKAVLQDTARIVRRFLSLEP

SEQ ID NO: 13123 - protein, 1209 aa, Acronicta aceris
MLTRARARYIERHTRLTTPDSSPSSALQQPQHGRTSPDAAATASSSSDEYYSPPTSPPPVRRRGGRRPPDRLGPRGPLASGGIPASGGSVQRMRWTQSLNKNVMRAYYGATEGGTNLTAYRGRMLSLFQALEPTIDVSTQRLSDQVRVIQRNHMLDDSVLDQLRSEVQSSRAIAHPSQSVAASLMVPQIAEEICPLLQTNLAEVGSDDRVTNVSTQYNEKLRSALEGAFREYRSSPPELRPRLPRLPMNNKNLALVCALDSLLSDYFDSSEDLADTHSILYCAAVAACRVAHVKFPESDRATRPKPMIPAWQSRIEQRIGEARALIGKLICFREGNTRPRVMRFVRQAFSGTNIDPRDYASCVTERIDFLKQKVYAWANRIRRYKRRAERYSLNRTFQGDQRWVYRTWDRPDNGVSDVCRPNDDAMSSFWRNIWSVPVNHTEDDWICDVERACESLTAMEEINISPQDVACAVHSVPNWKAPGPDGLHNFWIKWLRSSHARLASQFQSSLESGTLPKFLTTGITHLLHKSGDTADPKNYRPITCLPTVYKLLTSILRAKICYHIDESSIMSASQNGCRNGSRGTKELLLIDMTISQQVRRLRKNLSTCWIDYKKAYDSVPHTWLMRVLELYKVDVSLRTFLRSCMGQWRTVLHYPGCRQIQRISEPIRIERGIFQGDSLSPLWFCLALNPLSTLLEESRLGYRLRRGGQVISHLLYMDDLKLFASSDLHLMELLKITENFSNSIRMEFGVEKCAVMHVKRGGIVESVGIQLSDSTQLRSLASTETYKYLGMAEALGINVADMKQSLQVRFFGRLTKVLKSLLSGGNKVRAFNGWVMPVLMYSFGVLKWTQTELETLDRKVRTLLTAYRMHHPRSSVMRLYIPRKCGGRGFLNAKNLHNREVCSLREHFLKTEMGMHRDVVAVDNGLTPLSMAKENWRKPVVLSTNDRRNVWQGKELHGRYYRALHEPGVDTLASVSWLRFGDLFGETEGFVCAIMDEVMMTNNYRKFIVKDGTVDICRACHRPGESIRHIISGCSRLANGEYLHRHNLVARIIHQQLALKYNLVESEVPYYKYVPDPVLENGHATLYWDRSIITDRTIIANKPDIVVIDRLERSAMIVDVTVPHDENLFKAEKEKEIKYLDLAHEVVDMWGVDAAIIVPIVVSANGLIAKSLDRHLRRLSLGGWIKGLIQKVVLLDTARIVRRFLSLGP

SEQ ID NO: 13124 - protein, 1107 aa, Acronicta aceris
MRWTRSLNENVMRAYYGATEGGTNLTAYRGRMLSLFQALEPTIDVSTQRLSDQVRVIQRNHMLDDSVLDQLRSEVQSSRAIAHPSQSVAPSAMLPQTNLAEVGSDDRVTNVSTQYNEKLTSALEGAFREYRSSPPELRPRLPRLPMNNKNLALVCALDSLLSDYFDSSEDLADTHSILYCAAVAACRVAHVKFPESDRATRPKPMIPAWQSRIEQRIGEARALIGKLICFREGNTRPRVMRFVRRAFSGTNIDPRDYASCVTERIDFLKQKVYAWANRIRRYKCRAERYSLNRTFQGDQRWVYRTWDRPDNGVSDVCRPNDDAMSSFWRNIWSVPVNHTEDDWICDVERACESLPAMDEINISPQDVACAVHSVPNWKAPGPDGLHNFWIKWLRSSHARLASQFQSSLESGTLPQFLTTGITHLLHKSGDTADPKNYRPITCLPTVYKLLTSILRAKICYHIDESSIMSASQNGCRNGSRGTKELLLIDMTISQQVRRLRKNLSTCWIDYKKAYDSVPHTWLMRVLELCKVDVSLRTFLRSCMGQWRTVLHYPGCRQIQRISEPIRIERGIFQGDSLSPLWFCLALNPLSTLLEESRLGYRLRRGGQVISHLLYMDDLKLFASSDLHLMELLKITENFSNSIRMEFGVEKCAVMHVKRGGIVESVGIQLSDSTQLRSLASTETYKYLGMAEALGINVADMKQSLQVRFFGRLTKVLKSLLSGGNKVRAFNGWVMPVLMYSFGVLKWTQTELETLDRKVRTLLTAYRMHHPRSSVMRLYIPRKCGGRGFLNAKNLHNREVCSLREHFLKTEMGMHRDVVAVDNGLTPLSMAKENWRKPVVLSTNDRRNVWQGKELHGRYYRALHEPGVDTLASVSWLRFGDLFGETEGFVCAIMDEVMMTNNYRKFIVKDGTVDICRACHRPGESIRHIISGCSRLANGEYLHRHNLVARIIHQQLALKYNLVESEVPYYKYVPDPVLENGHATLYWDRSIITDRTIIANKPDIVVIDRLERRAMIVDITVPHDENLFKAEKEKEIKYLDLAHEVVDMWGVDAAIIVPIVVSANGLIAKSLDRHLKRLSLGGWIKGLIQKVVLLDTARIVRRFLSLGP

SEQ ID NO: 13125 - protein, 1191 aa, Eilema sororculum
MLTRAQARNRNAQTTSPDSSLSSAAQPPAMEPAASSSSSSDEFFSPPTSPTPVRRPGRGRPPTCLGPRRPPASNRAPAAGGNVHRMRWTNSINENVMRAYFAATEGGTNLSAYRTRMLPLFQALEPSINTSAQRLSDQVRVIQRNRMLNETVLETLRQECLRNICVTPAPAPAPASTAEINNDTYVAPDDTPIPVSIQYNEEIKEALECALREYRSVPVHVRPRLPRMPIHRRNIALVSALDSLLPRYLENSENLGDTHSILYCTAVAACRMAGAKFPIKDPAIRPKSAIPAWQCRIERRVAEARVLIGKLICFRSGNTRPRVMRYVTRAFAGTDISPQDYTSRVTERIDFLKQKVYAWANRIRRYKRRVDRYTVNHMFQRDQRWVYRSWERTDESVDDVRRPDAEATNAFWRSIWSVPVSHTEGDWMREVERACETIPEMEEIYIDATDVDCAVRSLSNWKSPGPDGLHNFWLKWLRSSHVVLASQFQSAIESGTLPAFMTTGVTHLLHKTGSTLEPNNYRPITCLPTVYKLLTSILRAKINNHINNNSIMCASQNGCRNGARGTKELLLIDMAISQQARRNRKDLTACWIDYKKAFDSVPHTWLLRVLELYKVNTTLCTFLRLCMGQWRTVLFYPGCRQALGGGVPITIERGIFQGDSLSPLWFCLALNPLSTLLVNSGLGYRLRREGQMVSHLFYMDDLKLFAHTNPQLIALLKVTETFSNSIKMAFGVDKCAVIHVKRGRVVESEGIQLSDSTNLRSLLVTETYKYLGMSQALCINEVDMKQMLQERFFGRLKKVLNSLLSGGNKVRACNSWVMPLLMYSFGILRWTQTELDTIDRKVRTQLTAFRMHHPRSSVMRLYIPRKCGGRGFLNAKTLHNREVCNLRDYFLKSNVDMHRDVVNVDTGLTPLGLAKENWRRPTIVSTDSRREVWQSKELHGRFYRALHRPEVDLLASVSWLRFSDLFGETEGFVCAIADEVIKTNNYRRYIMRDGTIDICRACHQPGESLRHITSGCSRLANGEYLHRHNQVARIIHQRLALKYNLVEVEVPYYRYVPDPVLENSHITLYWDRSIITDRTVVANKPDIVVIDRSERRALIVDVTIPHDENLVKAEKDKQVKYLDLAHEVVDMWNVDSAIIVPIVVSVNGLIAKSLDQHLKRLGLDGWVKGQMQKAVLLDTARIVRKFLSLEP

SEQ ID NO: 13126 - protein, 1191 aa, Eilema sororculum
MLTRAQARNRNAQTTSPDSSLSSAAQPPAMEPAASSSSSSDEFFSPPTSPTPVRRPGRGRPPTCLGPRRPPASNRAPAAGGNVHRMRWTNSINENVMRAYFAATEGGTNLSAYRTRMLPLFQALEPSINTSAQRLSDQVRVIQRNRMLNETVLETLRQECLRNICVTPAPAPAPASTAEINNDTCVAPDDTPIPVSIQYNEEIKEALECALREYRSVPVHVRPRLPRLPIHRRNIALVSALDSLLPRYLENSENLGDTHSILYCTAVAACRMAGAKFPIKDPAIRPKSAIPAWQCRIERRVAEARVLIGKLICFRSGNTRPRVMRYVIRAFAGTDISPQDYTSRVTERIDFLKQKVYAWANRIRRYKRRVDRYTVNHMFQRDQRWVYRSWERTDESVDDVRRPDAEATNAFWRSIWSVPVSHTEGDWMREVERACETIPEMEEIYIDATDGDCAVHSLSNWKSPGPDGLHNFWLKWLRSSHVVLASQFQSAIESGTLPAFMTTGVTHLLHKTGSTLEPNNYRPITCLPTVYKLLTSILRAKINNHINNNSIMCASQNGCRNGARGTKELLLIDMAISQQARRNRKDLTACWIDYKKAFDSVPHTWLLRVLELYKVNTTLCTFLRSCMGQWRTVLFYPGCRQALGGGVPITIERGIFQGDSLSPLWFCLALNPLSTLLVNSGLGYRLRREGQMVSHLFYMDDLKLFAHTNPQLIALLKVTETFSNSIKMAFGVDKCAVIHVKRGRVVESEGIQLSDSTNLRSLLVTETYKYLGMSQALCINEVDMKQMLQERFFGRLKKVLNSLLSGGNKVRACNSWVMPLLMYSFGILRWTQTELDTIDRKVRTQLTAFRMHHPRSSVMRLYIPRKCGGRGFLNAKTLHNREVCNLRDYFLKSNVDMHRDVVNVDTGLTPLGLAKENWRRPTIVSTDSRREVWQSKELHGRFYRALHRPEVDLLASVSWLRFSDLFGETEGFVCAIADEVIKTNNYRKYIMRDGTIDICRACHQPGESLRHITSGCSRLANGEYLHRHNQVARIIHQRLALKYNLVEVEVPYYKYVPEPVLQNSHITLYWDRSIITDRTVVANKPDIVVIERSERRALIVDVTIPHDENLVKAEKDKQVKYLDLAHEVVDMWNVDSAIIVPIVVSVNGLIAKSLDQHLKRLGLDGWVKGQMQKAVLLDTARIVRKFLSLES

SEQ ID NO: 13127 - protein, 1192 aa, Eilema sororculum
MLTRAQAKRNRSAPTTSPDSSLSSAAQPPAVEPAAWSSSSSDEFFSPPTSPTPVRRPGRGRPPTCLGPRRPPASSGAPATGGDVHRMRWTTSINENVMRAYFAATEGGTNLSAYRTRMLPLFQALEPSINVSAQRLSDQVRVIQRNRMLNETVLETLRLECLRNICVTPAPAPAPASTAERNDDTRVAPDDTPIPVSIQYNEEIKEALECALREYRSMPVHVRPRLPRLPIHRRNIALVSALDSLLPRYLENSENLGDTHSILYCTAVAACRMAGAKFPIKEPAIRPKFTIPAWQCRIERRVAEARVLIGKLICFRSGNTRPRVMRYVTRAFAGTDISPQDYTSRVTERIDFLKQKVCAWANRIRRYKKRVDRYTVNRMFQRDQRWVYRSWERTDESVDDVRRPDAEATNAFWRSIWSVPVSHTEGDWMREVERACETIPEMEEIYIDATDVDCAVRSLSNWKSPGPDGLHNFWLKWLRSSHVVLASQFQSAIESGTLPAFMTTGVTHLLHKTGSTLEPNNYRPITCLPTVYKLLTSILRAKINNHINNNSIMCASQNGCRNGARGTKELLLIDMAISQQARRNRKDLTACWIDYKKAFDSVPHTWLLRVLELYKVNTTLCTFLRSCMRQWRTVLFYPGCRQALGGGVPITIERGIFQGDSLSPLWFCLALNPLSALLVNSGLGYRLRREGQVVSHLFYMDDLKLFAHTNPQLIALLKVTETFSNSIKMAFGVDKCAVIHVKRGRVVESEGIQLSDSTNLRSLLVTETYKYLGMSQALCINEVDMKQLLQERFFGRLKKVLNSLLSGGNKVRACNSWVMPLLMYSFGILKWTQTELDTIDRKVRTQLTAFRMHHPRSSVMRLYIPRKCGGRGFLNAKTLHNREVCNLRDYFLKSNVDMHRDVVNVDTGLTPLGLAKENWRRPTIVSTDSRREVWQSKELHGRFYRALHRPEVDLLASVAWLRFSDLFGETEGFVCAIADEVIKTNNYRKYIMRDGTIDICRACHQPGESLRHITSGCSRLANGEYLHRHNQVARIIHQRLALKYNLVEVEVPYYRYVPEPVQENSHITLYWDRSIITDRTVVANKPDIVVIDRSERRALIVDVTIPHDENLVKAETDKQVKYLDLAHEVVDMWNVDTAIIVPIVVSVNGLIAKSLDQHLKRLGLDGWVKGQMQKAVLLDTARIVRKFLSLEP

SEQ ID NO: 13128 - protein, 1192 aa, Eilema sororculum
MLTWAQAKRNRSAPITSPDSSLSSAAQPPAVEPAASSSSSSDEFFSPPTSPTPVRRPGRGRPPTCLGPRRPPASNGAPATGGDVHRMRWTNSINENVMRAYFAATEGGTNLSAYRTRMLPLFQALEPSINVSAQRLSDQVRVIQRNRMLNETVLETLRLECLRNICVTPAPVPVPASTVELNDDTCVAPDDTPIPVSIQYNEEIKEALECALREYRSMPVHVRPRLPRLPIHRRNIALVSALDSLLPRYLENSENLGDTHSILYCTAVAACRMAGAKFPIKDPAILPKSAIPAWQCRIERRVTEARVLIGKLICFRSGNTRPRVMRYVTRAFAGTDISPQDYTSRVTERIDFLKQKVYAWANRIRRYKKRVDRYTVNRMFQRDQRWVYRSWERTEESVDDVRRPDAEVTNALWRSIWSVPVNHTEGDWMHEVERACETIPEMEEINIDAIDVDCAVRSLSNWKSPGPDGLHNFWLKWLRSSHVVLASQFQSAVESGTLPAFMTTGVTHLLHKTGSTLEPNNYRPITCLPTVYKLLTSILRAKINNHINNNSIMCASQNGCRNGARGTKELLLIDMAISQQARRNRKDLTACWIDYKKAFDSVPHTWLLRVLELYKVNTTLCTFLRSCMGQWRTVLFYPGCRQALGGGVPITIERGIFQGDSLSPLWFCLALNPLSTLLVNSGLGYRLRREGQMVSHLFYMDDLKLFAHTNPQLITLLKITETFSNSIKMAFGVDKCAVIHVKRGRVVESEGIQLSDSTNLRSLLVTETYKYLGMSQALCINEVDMKQMLQERFFGRLKKVLNSLLSGGNKVRACNSWVMPLLMYSFGILKWTQTELDTIDRKVWTQLTAFRMHHPRSSVMRLYIPRKCGGRGFLNAKTLHNREVCNLRDYFLKSNVDMHRDVVNVDIGLTPFGLAKENWRRPTIVSTDSRREVWQSKELHGRFYRALHRPEVDLLASVSWLRFSDLFGETEGFVCAIADEVIKTNNYRKYIMRDGTIDICRACHQPGESLRHITSGCSRLANGEYLHRHNQVARIIHQRLALKYNLVEFEVPYYRYVPEPVLENTHITLYWDRSIITDRTVVANKPDIVVIDRSERRALIVDVTIPHDENLVKAEKDKQVKYLDLAHEVVDMWNVDSAIIVPIVVSVNGLIAKSLDQHLKRLGLDGWVKGQMQKAVLLDTARIVRKFLSLEP

SEQ ID NO: 13129 - protein, 1196 aa, Eilema sororculum
MLTRAKTKIIIQDAHLTPTDSSCSSASQAPGTTSPRPTPVEASSSDEYFSPPTSPTPVRRPGRGRPPTCLGPRRPPASNRAPAAGGNVHRMRWTNSINENVMRAYFAATEGGTNLSAYRSRMLPLFQALEPSINTSAQRLSDQVRVIQRNHMLNETVLETLRQECLRNICVTPALAPAPASTTALNEDSHVTRDDTPIPVSIQYNEEIKEALEYALREYRSMPIHVRPRLPRLPIHRRNIALVSALDSLLPKYLENSENLGDTHSILYCTAVAACRMAGAKFPIKDPAIRPKPAIPAWQCRIERRVAEARVLIGKLICFRSGNTRPRVMRYVTRAFAGTNISPQDYMSRVTERIDFLKQKVCAWANRIRRYKKRVDRYTVNRMFQRDQRWVYRSWERTDESVDDLRRPDAEATNAFWRSIWSVPVSHTEGDWMREVERACETIPEMEEIYIDVTDVDCAVRSLSNWKSPGPDGLHNFWLKWLRSSHVVLASQFQSAIESGTLPAFMTTGVTHLLHKTGSTLEPNNYRPITCLPTVYKLLTSILRAKINNHINNNSIMCTSQNGCRNGARGTKELLLIDMTISQQARRNRKDLVACWIDYKKAFDSVPHTWLLRVLELYKVNTTLCTFLRSCMGQWRTVLLYPGCRQALGSGEPITIERGIFQGDSLSPLWFCLALNPLSTLLVNSGLGYRLRREGQMVSHLFYMDDLKLFAHTNPQLIALLKVTETFSNSIKMAFGVDKCAVIHVKRGRVVESEGIQLSDSTNLRSLLVTETYKYLGMSQALCINEVGMKQMLQERFFGRLKKVLNSLLSGGNKVRACNSWVMPLLMYSFGILKWTQTELDTIDRKVRTQLTAFRMHHPRSSVMRLYIPRKCGGRGFLNAKTLHNREVCNLRDYFLKSNVDMHRDVVNVDTGLTPLGLAKENWRRPTIVGTDSRREVWQSKELHGRFYRALHRPEVDLLASVSWLRFSDLFGETEGFVCAIADEVIKTNNYRKYIMRDGTIDICRACHQPGESLRHITSGCSRLANGEYLHRHNQVARIIHQRLALKYNLVEVEVPYYRYVPEPVLENSHITLYWDRSIITDRTVVANKPDIVVIDRSERRALIVDVTIPHDENLVKAEKDKQVKYLDLAHEVVDMWNVDSAIIVPIVVSVNGLIAKSLDQHLKRLGLDGWVKGQMQKAVLLDTARIVRKFLSLEP

SEQ ID NO: 13130 - protein, 1193 aa, Eilema depressum
MLTRAQARRNASAPATPPDSSLSSAAQPPPTEPAASSSSSSDEFFSPPTSPTPVRRPGRGRPPICLGPRRPPVSNRAPAAGGDVHRMRWTPSINENVMRAYFAATEGGTNLSAYRTRMLPLFQALEPSVNTSSQRLSDQVRVIQRNRMLNETVLETLRQECLRNICVTPAPAPASTPAPVPVSHMNEETGDDTLIPVSIQYNEQIKEALECALREYRSMPLNDRPRLPRLPIHRRNMALVGALDSLLPSYLDNSENLGDTHSILYCTAVAACRMAGVKFPNKDPAIRPKSTIPAWQCRIERRVAEARVLISKLICFRSGNTRPRVMRYVTRAFAGTGISPQEYTSRITERIDFLKQKVCAWANRIRRYRKRVDRFTVNRMFRRDQRWVYRSWEQPDESVDDVRRPEAAATNTFWRSIWSVPVSHIEGDWMCEVERACESIPVMEDIYIDAIDVDCAVRPLSNWKSPGPDGLHNFWLKWLRSSHALLASQFQSAVESGTLPAFMTTGVTHLLHKTGSTLEPNNYRPITCLPTVYKLLTSILRVKINNHINNNSIMCASQNGCRNGARGTKELLLIDMAISQQARRRTKDLAACWIDYKKAFDSVPHTWLLRVLELYKVNATLCTFLRSCMRQWRTVLFYPGCRRALGDGEPITIERGIFQGDSLSPLWFCLALNPLSTLLVNSGLGYRLRREGQMVSHLLYMDDLKLFAHTNPQLMALLKITENFSNSIKMGFGVEKCAVIHVKRGRVVESQGIQLSDSTSLRSLLVTETYKYLGMSQALCINEAGMKQMLQERFFGRLKKVLNSLLSGGNKVRACNSWVMPLLMYSFGILKWTQTELDTIDRRVRTQLTAFRMHHPRSSVMRLYIPRKCGGRGFLNAKTLHNREVCNLRDYFLKSNVDMHRDVVSVDTGLTPLGLAKENWRRPIVVGTDSRREVWQSKELHGRFYRALHRPEVDLLASVSWLRFGDLFGETEGFVCAIADEVIKTNNYRKYIMRDGTIDICRACHQPGESLRHITSGCSRLANGEYLHRHNQVARIIHQRLALKYNLVELEVPYYRYVPEPVLENSHITLYWDRSIITDRTVVANKPDIVVIDRSERRALIVDVTIPHDENLVKAEKDKQVKYLDLAHEIVDMWNVDSAIIVPIVVTVNGLIAKSLDQHLKRLGLDGWVKGQMQKAVLLDTARIVRKFLSLEP

SEQ ID NO: 13131 - protein, 1212 aa, Ptilodon capucinus
MTDAPRRNPRRLCRQRTVNEPNAQSTPPDPSPRSASPSPASIIRTSVTAVASSESDEYFSPPTSPPPVRQQRGRPPGHLGLLGQPAPNRVLVPSGVVRRMRWTSSINENVMRAYYEATEGGTNLTAYRNRMLPLFQSLEPAVNVSAQRLSDQVRVIQRGNMLADTVLDRLRSEMQSRRVVPVASSQPAAQPVASATVTSRLAADSDVDRDNAPINVSNQYNELLRSTLEDVVRVYRSMPNHLRPRIPRLPMHKGNRALVGALDSLLSIYFDSSDNLADTHSILYCAAITVCRVARVKVFNTDTATRPKPAVPAWQCRIERRISEARALIGKLSCFREGNTRPRVMRFVKRAFAGTDVSPREYISRVTERIDFLKQKIYAWANRIRRYKVRVDRYSQNSMFQRDQRWVYRSWERPSEPVSELQRPDDNATTTFWRDIWSVPVTHYEGDWIGDVERMCEPIKEMEAISIGPLDVANAVRSLPNWKAPGPDGLHNFWLKWLRSSHVRLASQFQSALQSGSLPEFITTGVTHLLHKTGSTTDPKNYRPITCLPTIYKTLTSILRAKIARHVEDNSIMSASQNGCRSGSRGTKELLLIDMTICQQARRNRKDLSTCWIDYKKAYDSVPHTWLVRVLELYKIDTTLRTFLESCMRQWKTVLLCPGSRQILGNGEPIRIERGIFQGDSLSPLWFCLALNPLSTLLEESGFGFRLRRGGQVISHLLYMDDLKLFAPTALQLTGLLKVTETFSNSIRMEFGVDKCAVMHAKQGRLVESEGIQLSDSIQLRSLAATETYKYLGMSQGLGISETDMKQLLRDRFLGRLKKVLKSLLSGGNKVRAYNGWVMPVLMYSFGILKWTQTELDTLDRTVCTTLTSYRMHHPRSSVMRLYIPRKCGGRGFLNVKTLHNREICSLREYFLRADGEMHVDVVAVDNGLTPLSLAKENWRKPVVLTTDDRRLVWQGKELHGRYYRALHGPDVDLAASVAWLRFGDLFGETEGFVCAIMDEVVMTNNYRKYILRDGTIDICRACHRPGESLRHIISGCSRLANGQYLHRHNQVARIIHQQLALKYRLVTSEVPYYRYEPQPVLEEGHISLYWDRSIITDRTIVANKPDIVLIDRQERRAMIVDITVPHDENLVKAEKDKESKYLDLAHEVVDMWDIDAAIIVPIVVSAHGLLAKSLDKHLKRLALGGWIKGQIQKAVLLETARIVRKFLSLEP

SEQ ID NO: 13132 - protein, 1212 aa, Ptilodon capucinus
MTDAPRRNPRRQCRQRSAVRHYAQSTPPDQSPRSASPSPASIIRTSVTAVASSESDEYFSPPTSPPPVRRQRGRPPGHLGLLGQPAPNRVLVPSGVVRRMRWTSSMNENVMRAYYEATEGGTNLTAYRNRMLPLFQSLEPAVNVSAQRLSDQMRVIQRGNMLADTVLDRLRSEVQSRRVVPVASSQPAAQPVASATVTSRLAADSDVDRDNAPIDVSTQYNDLLRSTLEDVVREYQSMPNHLRPRIPRLPMHNGNRALVGALDLLLSIYFDSSDDLVDTHSILYCAAITVCRVARVKVFNTDTATRPKPAVPAWQCRIERRISEARALIGKLSCFREGNTRPRVMRFVKRAFAGTDVSPREYISRVTERIDFLKQKIYAWANRIRRYKARVDRYSQNSMFQRDQRWVYRSWERPNEPVSELQRPDDNAMTTFWRDIWSVPVTHYEGNWIGDVERMCEPIKEMEAISIGPLDVANAVRSLPNWKAPGPDGLHNFWLKWLRSSHVRLASQFQSALQSGSLPEFITTGVTHLLHKTGSTTDPKNYRPITCLPTIYKTLTSILRVKIARHVEDNSIMSASQNGCRSGSRGTKELLLIDMTICQQARRNRKDLSTCWIDYKKAYDSVPHTWLVRVLELYKIDTTLRTFLESCMRQWKTVLLCPGSRQILGNGEPIRIERGIFQGDSLSPLWFCLALNPLSALLEESGFGFRLRRGGQVISHLLYMDDLKLFAPTALQLSGLLKVTETFSNSIRMEFGVDKCAVMHAKQGRMVESEGIQLSDSIQLRSLAATETYKYLGMSQGLGISETDMKQLLRDRFLGRLKKVLKSLLSGGNKVRAYNGWVMPVLMYSFGILKWTQTELDTLDRTVRTTLTAYRMHHPRSSVMRLYIPRKCGGRGFLNVKTLHNREICSLREYFLRADGEMHVDVVAVDNGLTPLSLAKENWRKPVVLTTDDRRVVWQGKELHGRYYRALHGPDVDLAASVAWLRFGDLFGETEGFVCAIMDEVVMTNNYRRYILRDGTIDICRACHRPGESLRHIISGCSRLANGQYLHRHNQVARIVHQQLALKYRLVTSEVPYYRYEPQPVLEEGHITLYWDRSIITDRTIVANKPDIVLIDRQERRAMIIDITVPHDENLVKAEKDKESKYLDLAHEVVDMWDIDAAIIVPIVVSAHGLLAKSLDKHLKRLALGSWIKGQIQKAVLLETARIVRKFLSLEP

SEQ ID NO: 13133 - protein, 1201 aa, Hydraecia micacea
MLTRSAAARRARLPPPDSSLSSASPPAPLVSSPTVSAVTAPAAAVASSSSDEYFSPPTTPPPARRRGGRRPPDSLGPRGPLASDRVPAPGGSVQRMRWTRSINENVMRSYYGATEGGSNLTAYRVRMLSLFQVLEPAVNVSAQRLSDQVRVIQRNHMLDDTVLDRLRNEIQSSHAIAPQSQTAVILPQSNTSHADEGSNDRATNVSTQCNEELSSALEDAIQEYRFMSPELRPRLPRLPMHNKNRALVAVLNSQLSKYFDDCEDLTDTHSILYCAAVAACRVAHVKFTNDSRATRPKPTVPAWQCRIERRIGGARALIGKLICFREGNTRPRVMRFVRRAFLGTDISPQDYTSCVTERIDFLKQKVYAWANRIRRYKRRVERYTQNRTFQSDERWVYRDWERPDQSVADTCLPDDDAMCSFWRSIWSVPVSHTEGDWARDVERACDPIPEMEAITICPQDVARAVRPLPNWKSPGPDGLHNFWIKWFSRSHARLASQFQTALESGSLPQFLTTGITHLLHKSGSTAEPKNYRPITCLPTVYKVLTSILRAKINKHIDTNFIMSASQNGCRNGSRGTKELLLIDMTISQQVRRFRKDLSTCWIDYKKAYDSVPHTWLMRVLELYKVDTTLRTFLMSCMGQWRTVLRYPGCRNIQRNSEPIRIERGIFQGDSLSPLWFCLALNPLSTLLEDSGLGYRLRRGGQVISHLLYMDDLKLFAPNNLQLMELLKVTQTFSNAIRMEFGVDKCAVMHVKRGEIVESVGNQLSDSTNLRALSASETYKYLGMSEALGINVTDMKQSLKERFFGRLKKVLNSLLSGGNKVRAFNGWVMPVLMYSFGILKWTQTELDALDRRVRTLLTANRMHHPRSSVMRLYIPRKCGGRGFLNSKTLHNREICSLREYFLETDVGMHRDVVMVDKGLTPLSLAKENWRKPVVLDTNDRMEVWQSKELHGRFFRALHGPDVDLLASVAWLRFGDLFGETEGFVCAIMDEVMMTNNYRRFIVKDGTVDICRACHRPGESIRHIISGCSRLANGEYLHRHNLVARIIHQQLALKYSLVESEVPYYRYVPDPVLENGNITLYWDRSIITDRTIVANKPDIVVVDRSERRAMIVDITVPHDENLVKAEKDKQIKYLDLAREVVDMWDVDSAIIVPIVVTANGLIAKSLDQHLRRLSLASWIKGLIQKAVLLDTARIVRRFLSLGP

SEQ ID NO: 13134 - protein, 1203 aa, Hydraecia micacea
MLTRSRARRLPTTHPTSSGSSLSSASQLPEPAPDVSPVSPAAAVASSSSDEYFSPPTTPPPVCRRGRGRPPASLGLRGPPASERVPAPGGSVQRMRWTQTVNENVMRAYFGATEGGSNLTAYRGRMLSLFQVLEPAVNVSAQRLSDQVRVIQRNHMLDNVVLDRLRLESRNSHVTPASSLVAVQLQPSVPLRPDCVDIEDDDEAISVSSQCNARLRSALEDAFREYRSIPPGLRPRLPRLPMHKKNKALVCALDSQLSNCFNDSKDLADTHSMLYCAAVAACRVAHVKFPNSDRAPRPKPAVPAWQCRIECRIAEARALIGKLICFREGNTRPRVMRFVRRAFSGTDISSRDYLSRVTERIDFLKQKICAWANRIRRYRRRVERYTQNRRFQSDERWVYRAWERPDQGVTDTRLPDDDAMCSFWRNIWSVPVSHTEGDWTGKIERACDLIPEMEALIISPQDVARAVRPLPNWKSPGPDGLHNFWIKWFKRSHDRLASQFQSALESGSLPQFLTTGITHLLYKSGSTADPKNYRPITCLPTVYKVLTSILRTKINKHIDTNSIMSVSQNGCKNGSRGTKELLLIDMTINQQVRRSRKDLSTCWIDYKKAYDSVPHTWLMRVLELYKVDTTLCTFLMSCMGQWRTVLRYPGCRNIQRNSEPIRIERGIFQGDSLSPLWFCLALNPLSTLLEDSGLGYRLRRGGQVISHLLYMDDLKLFAPNNLQLMELLKITETFSSAIRMEFGVDKCAVMHVKRGEIVESVGNQLSDSTNLRALSASDTYKYLGMSEALGINVTDMKQSLKERFFGRLKEVFNSLLSGGNKVRAFNDWVMPVLMYSFGILKWTQTELDALDRKVRTLLTANRMHHPRSSVMRLYIPRKCGGRGFLNAKTLHNREICSLREYFLETDVGMHRDVVVVDNGLTPLSLGKENWRKPVVLDTNDRMEVWQSKELHGRFFRALHGPDVDLLASVAWLRFGDLFGETEGFVCAIMDEVMMTNNYRRFIVKDGTVDICRACHRPGESIRHIISGCSRLANGEYLHRHNLVARIIHQQLALKYSLVESEVPYYRYVPDPVLENGNITLYWDRSIITDRTIVANKPDIVVMDRLERRAMIVDITIPHDENLVKAEKDKQIKYLDLAREVVDMWDVDSAIIVPIVVTANGLIAKSLDQHLRRLSLASWIKGLIQKAVLLDTARIVRRFLSLEP

SEQ ID NO: 13135 - protein, 1205 aa, Amphipyra tragopoginis
MLTRSRAKTQQSTHLPPSASSLSSASQPPEPASIVSDVTPAAAVASSSSDEYFSPATTPPPARRRGRGRPPACLGPRGPPASDRVPAPGGSVQRMRWTQSMNENCMRAYFGATEGGTNLTAYRGRMLSLFQALEPAVNVSAQRLSDQVRVIQRDHRLDDAALDRLRNEMQNSHVTPLPAQIRTQPLVPPAVPLEPNHGDEEEENRAISAGTQCSELMRSALEDALREFRSTPPELRPRLPRLPMHNKNRALVCALDLLLSNVFESSEDLGDTHSILYCAAVAACRVAHVKFPNDNRATRPKSAVPAWQCRIERRIDEARVLIGKLTCFREGNRRPRVMRFVRRAFSGTDIVPGEYVSRITERIDFLKQKVYAWANRIRRYKRRVDRYTQNRIFQSDQRWVYRTWERPDQGVSDAHLPDNDVMNAFWRNIWSVPVTHTEGDWMQEVQRACEPIQEMGAVTIGPQDVASAVRPMPNWKSPGPDGLHNFWIKWLRSSHARLASQFQSSLESGSLPSFLTTGVTHLLFKSGSTAEPKNYRPITCLPTVYKLLTSILRAKLNHHIDSNAIMCATQNGCKNGSRGTKELLLIDMAISQQVRRSRKDLSTCWIDYKKAYDSVPHTWLMRVLELYKINATLRTFLMSCMGQWRTVLHYPGCRQIQGNGELIRIERGIFLGDSLSPLWFCLALNPLSTLLEGSGLGYRLRRGGQVISHLLYMDDLKLFAPNNLQLLELLKVTETFSNSIRMEFGVDKCAVMHVKRGRIMESVGTQLSDFIHLRSLSSTETYKYLGMSEALGINEADMKQSLRERFFGRLIKVLKSLLSGGNKVRAFNGWVMLVLMYSFGILRWTQTELDALDRRVRTLLTAYRMHHPRSSAMRLYIPRKCGGRGFLNAKTLHNREVCSLREYFSQADVGMHRDVVAVDKGLTPLSLAQENWRKPVVLDTNGRRDVWRSKELHGRFYRALHGPDVDFLASVAWLRFGDLFGETEGFVCAIMDEVMMTNNYRKYIVKDGTVDICRACHCPGESIRHIVSGCSRLANGEYLHRHNLVARIIHQQLALRYNLVDTEVPYYRYVPDPVLENGHVTLYWDRSIITDRTIVANKPDIVVIDRLERRTMIVDITVPHDENLVKAENDKKIKYLDLAHEVVDMWDVDSAVIVPIVVTANGLIAKSLDQHLMRLSLGSWIKGLIQKAVLLDTARIVRKFLSLGP

SEQ ID NO: 13136 - protein, 1205 aa, Amphipyra tragopoginis
MLTRSRAKTQQSTHLPPAASSLSSASQPPEPASIVSDVTPAAAVASSSSDEYFSPATTPPPARRRGRGRPPACLGPRGPPASDRVPASGGSVQRMRWTQSMNENCMRAYFGATEGGTKLTAYRGRMLSLFQALEPAVNVSAQRLSDQVRVIQRDHRLDDAALDRLRNEMQNSHVTPLPAQIRTQPLVPPAVPLEPNHGDEEEEDRAISAGTQCSELMRSALEDALREFRSTPPELRPRLPRLPMHNKNRALVCALDLLLSNVFESSEDLGDTHSILYCAAVAACRVAHVKFPNDNRATRPKSAVPAWQCRIERRIDEARVLIGKLTCFREGNRRPRVMRFVRRAFSGTDIGPGEYVSRITERIDFLKQKVYAWANRIRRYRRRVDRYTQNRIFQSDQRWVYRTWERPDQGVSDAHLPDNDVMNAFWRNIWSVPVTHTEGDWMQEVQRACEPIQEMGAVTIGPQDVASAVRPMPNWKSPGPDGLHNFWIKWLRSSHARLASQFQSSLESGSLPSFLTTGVTHLLFKSGSTAEPKNYRPITCLPTVYKLLTSILRAKLNHHIDSNAIMCATQNGCKNGSRGTKELLLIDMAISQQVRRSRKDLSTCWIDYKKAYDSVPHTWLMRVLELYKINATLRTFLMSCMGQWRTVLHYPGCRQIQGNGELIRIERGIFQGDSLSPLWFCLALNPLSTLLEGSGLGYRLRRGGQVISHLLYMDDLKLFAPNNLQLLELLKVTETFSNSIRMEFGVDKCAVMHVKRGRIMESVGTQLSDFIHLRSLSSTETYKYLGMSEALGINEADMKQSLRERFFGRLIKVLKSLLSGGNKVRAFNGWVMPVLMYSFGILRWTQTELDALDRRVRTLLTAYRMHHPRSSVMRLYIPRKCGGRGFLNAKTLHNREVCSLREYFSQADVGMHRDVVAVDKGLTPLSLAKENWRKPVVLDTNGRRDVWRSKELHGRFYRALHGPDVDFLASVAWLRFGDLFGETEGFVCAIMDEVMMTNNYRKYIVKDGTVDICRACHCPGESIRHIVSGCSRLANGEYLHRHNLVARIIHQQLALKYNLVDTEVPYYRYVPDPVLENGHVTLYWDRSIITDRTIVANKPDIVVIDRLERRTMIVDITVPHDENLVKAENDKKIKYLDLAHEVVDMWDVDSAVIVPIVVTANGLIAKSLDQHLMRLSLGSWIKGLIQKAVLLDTARIVRKFLSLEP

SEQ ID NO: 13137 - protein, 1203 aa, Amphipyra tragopoginis
MLTRSRAKTQGTRLPSSASSLSSASQPPEPASTVSDVTPAAAVASSSSDEYFSPPTSPPPRRRGRGRPPASLGPRGPPASDRVPAAGGSVQRMRWTQSMNENCMRAYFGATEGGTNLTAYRGRMLSLFQALEPAVSVSAQRLSDQVRVIQRDHRLDDAALDRLRSEVQSSHVISLQSQTAVQLQVPTVVPPRSIFADEESDDRVTNVSTQCSDQLRSALELAIREYRSTPPDLRPRLPRLPMNKKNRALVCALDSLLSSYFDGSEDLADAHSILYCAAVAACRVARVKFDNNDRATRPKPAVPAWQCRIERRIGEARALIGKLICFREGNTRPRVMRFVRRAFSGTDTSPRDYMSRVTERIDFLKQKVYAWANRIRRYKRRVERYTQNRMFQRDQRWVYRAWERSDQGVGDAHLPDDDAMNSFWRSIWSVPVSHTEGDWMRDVERVCEPILDMGAISISPQDVASAVRPLPNWKSPGPDGLHNFWLKWLRSSHARLASHFQSSLETGTLPQFLTTGVTHLLHKSGSTAEPKNYRPITCLPTVYKLLTSILRCKISCHIENNSIMSASQNGCRNGSRGTKELLLIDMAISQQVRRSRKDLSTCWIDYKKAYDSVPHTWLMRVLELYKVNTTLCTFLTSCMGQWRTVLRYPGCRQIQGIGEPIRIERGIFQGDSLSPLWFCLALNPLSTLLEGSGLGYRLRRGGQVISHLLYMDDLKLFAPNNLQLLQLLKVTETFSNAISMEFGVDKCAVMHVKRGRIMESVGTQLSDSINLRSLSSTETYKYLGMSEALGINEADMKQSLRERFYGRLKKVLKSLLSGGNKVRAFNGWVMPVLMYSFGILKWTQTELDALDRRVRTLLTAYRMHHPRSSVMRLYIPRKCGGRGFLNAKTLHNREVCSLREYFSQADVGMHRDVVAVDKGFTPLSLAKENWRKPVVLDTNGRKEVWRSKELHGRFYRALHGPDVDFLASVAWLRFGDLFGETEGFVCAIMDEVMMTNNYRKYVVKDGTVDICRACHCPGESIRHIVSGCSRLANGEYLHRHNLVARIIHQQLALKYNLVDAEVPYYKYVPDPVLENGHVTLYWDRSIITDRTIVANKPDIVVIDRSERRAMIVDITVPHDENLVKAENEKKIKYLDLAREVVDMWEIDSAVIVPIVVTANGLIAKSLDQHLMRLSLGSWIKGLIQKAVLLDTARIVRKFLSLEP

SEQ ID NO: 13138 - protein, 1200 aa, Amphipyra tragopoginis
MLTRSKARARDAHPPPPDSSPSSASQQQGLDPASPAAAVASSSSDEYYSPPSSPPPARRRGGTRPPGGLGLRGPLASDRVPAPGGIVPRMKWTQKINESVMRAYYGATEGGTNLTAYRGRMLSLFQVLEPAVNVSAQRLSDQVRVIQRGHMLDDTVLDRIRSEVQSSPVISPSPQVLEQSQNLAATLPRPNPADEEDDDRATNVSTQCNEELRSALEDAMREYRYTRSDLRPRIPRLPMHRKNRALVCALDSLLSNYFDGSEDLGDTHSILYCAAVAACRVAHVKFIDNERVTRPKNAVPAWQCRIERRIAEARALIGKLVCFREGNTRPRVMRFVRRAFSGTDVSPREYMSRVTERIDFLKQKVCAWASRIRRYRRRVDRYTQSRLFQSDERWVYRTWERPDQRVGDAHLPDNDVISAFWRNIWSVPVTHTEGDWMQEVQRACEPIQEMGDIIISPQDVASAVRPMSNWKSPGPDGLHNFWLKWLRSSHACLASQFQSSLESESLPQFLTTGVTHLLHKSGSTAEPKNYRPITCLPTVYKLLTSILRSKINFHIENNCIMSPSQNGCRNGSRGTKELLLIDMAISQQVRRSRKDLSTCWIDYKKAYDSVPHTWLMRVLELYKVNTTLCAFLTSCMRQWRTVLRYPGCRQIQGIGEPIRIERGIFQGDSLSPLWFCLALNPLSTLLEGSGLGYRLRRGGQVISHLLYMDDLKLFAPNKLQLLELLKVTETFSNSIRMEFGVDKCAVMHVKRGRIMESAGTQLTDSIHLRSLSSTETYKYLGMSEALGINGTDMKQSLRERFCGRLKKVLNSLLSGGNKVRAFNGWVMPVLMYSFGILKWTQTELDALDRRVRSLLTANRMHHPRSSVMRLYIPRKCGGRGFLNAKTLHNREVCSLREYFSQAGVGMHRDVVAVDKGFTPLSLAKENWRKPVVLDTNDRREVWRSKELHGRFYRALHGPDVDFLASVAWLRFGDLFGETEGFVCAIMDEVMMTNNYRKYIVKDGTVDICRACHCPGESIRHIVSGCSRLANGEYLHRHNLVARIIHQQLALKYNLVDAEVPYYKYVPDPVLENGHITLYWDRSIITDRTIVANKPDIVVIDRSERLTMIVDITVPHDENLVKAEKDKEIKYQDLAHEVVAMWDVDSAIIVPIVVTANGLIAKSLDQHLKRLSLGSWIKGLVQKAVLLDTARIVRKFLSLRP

SEQ ID NO: 13139 - protein, 1198 aa, Amphipyra tragopoginis
MLTRARSKAARPPPPDSPLSSASQPPELGPPVTPAAAAASSSSDEYFSPPTSPRPVRRQGRHRPPTSLGPRGPPAPSRVLATGGCVQRMKWTQSINENVMRAYYGSTEGGTNLTAYRVRMLTLFRELEPAINVSAQRLSDQVRVIQRNHRLDDAALDRLRLEVQNSRVTPFPSQTAVHEVNINIVPPRSDYVDGDMDDGAVTVSSQYNDQLRSALEDAIREYRANPELRPRLPRLPMHNKNRALVCALDSLLSSYFESSEDLGDTHSILYCAAVAACRVANVKFNNSERATRPKPAVPAWQCRIERRIDGARALIGKLICFREGNTRPRVMRFVRRAFSGTGISPREYMSQVTERIDFLKQKVCAWASRIRRYKRRVERYTQNRMFQCDQRWVYRAWERPDQGVSDGRLPDDDAMNSFWRSIWSVPVIHTEGDWMRDIERACEPIEEMGEILISPQDVASAARPLPNWKSPGPDGLHNFWIKWLRSSHARLATQFQSSLESGSLPQFFTTGVTHLLHKSGSTAEPKNYRPITCLPTVYKLLTSILRSKINTHIENNSVMSSAQNGCRNGSRGTKELLLIDMTISQQVRRSRKNLSTCWIDYKKAYDSVPHTWLMRVLELYKINATLRTFLMSCMGQWRTVLRYPGCRPIRESGEPIRIERGIFQGDSLSPLWFCLALNPLSTLLEGSGLGYPLRRGGQVVSHLLYMDDLKLFAPTKLQLVELLKVTETFSNSIRMEFGVDKCAVMHVRRGGIMESEGLQLSDSIHLRPLSANDTYKYLGMSEGLGISEADMKQSLRERFFGRLKKVLKSLLSGGNKVRAFNGWVMPVLMYSFGILKWTQTELDALDRRVRSLLTANRMHHPRSSVMRLYIPRKCGGRGLLNAKTLHNREVCSLREYFLHADAGMHRDVVAVDKGLTPLNLAKENWRKPVVLSTNDRREIWQSKELHGRFYRALHGPDVDFQASVSWLRFGDLFGETEGFVCAIMDEVIMTNNYRKYIVKDGTVDICRACHCPGESLRHIISGCSRLANGEYLHRHNQVARIIHQQLALKYNLVESEVPYYKYVPDPVLENGHITLYWDRSIITDRTIVANKPDIVVIDRSERRTMIVDVTIPHDENLVKAEKDKQIKYLDLAHEVVNMWDVDSATIVPIVVTANGLMAKSLDQHLKRLSLGGWIKGLIQKAVLLDTARIVRRFLSLEP

SEQ ID NO: 13140 - protein, 1205 aa, Amphipyra tragopoginis
MLTRSRAKTQQSTHLPPSASSLSSASQPPEPASIVSDVTPAAAVASSSSDEYFSPATTPPPARRRGRGRPPACLGPRGPPASDRVPAPGGSVQRMRWTQPMNENCMRAYFGATEGGTNLTTYRGRMLSLFQALEPAVNVSAQRLSDQVRVIQRDHRLDDAALDRLRNEMQNSHVTPLPAQIRTQPLVPPAVPLEPNHGDEEEEDRAISAGTQCSELMRSALEDALREFRSTPPELRPRLPRLPMHNKNRALVCALDLLLSNVFESSEDLGDTHSILYCAAVAACRVAHAKFPNDNRATRPKSAVPAWQCRIERRIDEARVLIGKLTCFREGNRRPRVMRFVRRAFSGTDIGPGEYVSRITERIDFLKQKVYAWANRIRRYRRRVDRYTQNRIFQSDQRWVYRTWERPDQGVSDAHLPDNDVMNAFWRNIWSVPVTHTEGDWMQEVQRACEPIQEMGAVTIGPQDVASAVRPMPNWKSPGPDGLHNFWIKWLRSSHARLASQFQSSLESGSLPSFLTTGVTHLLFKSGSTAEPKNYRPITCLPTVYKLLTSILRAKLNHHIDSNAIMCATQNGCKNGSRGTKELLLIDMTISQQVRRSRKDLSTCWIDYKKAYDSVPHTWLMRVLELYKINATLRTFLMSCMGQWRTVLHYPGCRQIQGNGELIRIERGIFQGDSLSPLWFCLALNPLSTLLEGSGLGYRLRRGGQVISHLLYMDDLKLFAPNNLQLLELLKVTETFSNSIRMEFGVDKCAVMHVKRGRIMESVGTQLSDFIHLRSLSSTETYKYLGMSEALGINEADMKQSLRERFFGRLIKVLKSLLSGGNKVRAFNGWVMPVLMYSFGILRWTQTELDALDRRVRTLLTAYRMHHPRSSVMRLYIPRKCGGRGFLNAKTLHNREVCSLREYFSQADVGMHRDVVAVDKGLTPLSLAKENWRKPVVLDTNGRRDVWRSKELHGRFYRALHGPDVDFLASVAWLRFGDLFGETEGFVCAIMDEVMMTNNYRKYVVKDGTVDICRACHCPGESIRHIVSGCSRLANGEYLHRHNLVARIIHQQLALKYNLVDTEVPYYRYVPDPVLENGHVTLYWDRSIITDRTIVANKPDIVVIDRLERRTMIVDITVPHDENLVKAENDKKIKYLDLAHEVVDMWDVDSAVIVPIVVTANGLIAKSLDQHLMRLSLGSWIKGLIQKAVLLDTARIVRKFLSLEP

SEQ ID NO: 13141 - protein, 1207 aa, Noctua pronuba
MSPMLTRRRAKLLETHPPSPGSSLSSASQPPGRATSVSAASPVAAVASSSSDEFFSPPSTPPSPRRRGRRPPAGLGPRGQQAPNRVPAAGGNVSRIRWTQSMNENVMRAYYGATEGGINLTAYRCRMLSLFQALEPAVNVSAQRLSDQVRVIQNNHRLDDATLDRLRSELRISPASNPLPSQNVTHVPTALPLRANQHAEEEDDRAVSADNLCNEELRSALEDAIREYRFTSPDLRPRLPRLPMNKKNRALVCALDALLPNFIASSANLCDTHSILYCTAVAACRVANVKFPNTDSATRPKSAVPVWQCRIERRINEARALIGKLICFREGNTRPRVMRFVRRAFSGTDISPREYMSRVTERIDFLKQKVYAWANRIRRYRRRVDRYTQNRMFQSDERWVYRIWERPVTIQGVTDTHLPDNDAMSAFWRSIWSVPVSHTEGDWMRVVEQACDSIPEMEAISISPLDVARAVRPLPNWKSPGPDGLHNFWIKWLQRSHACLASQFQSSLETGSLPSFLTTGVTHLLHKSGSTAEPKNYRPITCLPTVYKVLTSILRAKIVRHIDNNSIMSVSQNGCRNGSRGTKELLLIDMAISQQVRRSRRDLSTCWIDYKKAYDSVPHTWLRRVLELYKIDATLRTFLVSCMGQWSTVLLYPGCRQVLGNDEPIRIERGIFQGDSLSPLWFCLALNPLSTLLEDSGLGYRLKRGGQVISHLLYMDDLKIFAPSNLQLMELLKVTETFSSAIRMEFGVDKCAVMHVKRGEIMESVGTQLSDSIYLRSLSSTETYKYLGMSEALGINATDMKQSLKERFFGRLNKVLKSLLSGGNKVRAFNGWVMPVLMYSYGILKWTQTELDALDRKVRTLLTANRMHHPRSSVMRLYIPRKCGGRGFLNAKTLHNREVCSLREYFLETDVGMHRDVVSVDKGLTPLSLANENWRKPVVLDTNDRKEVWQSKELHGRFFRALHGPDVDLLASVSWLRFGDLFGETEGFVCAIMDEVIMTNNYRKYIVKDGTVDICRACHRPGESIRHIVSGCSRLANGEYLHRHNLVARIIHQQLALQYNLVGTEVPYYKYVPDPVLENGHATLYWDRSIITDRTILANKPDIVVIDRRERRAMIVDITVPHDENLVKAENDKKIKYLDLAHEVVDMWDVDSAIIVPIVVTVNGLIAKSLDQHLRRLSLRGWVKGLIQKAVLLDTARIVRRFLSLEP

SEQ ID NO: 13142 - protein, 1106 aa, Noctua pronuba
MRWTQSINENVMRSYYGATEGGNNRTAYRVRMLSLFQVLEPAVNVSAQRLSDQVRVIQRNRMLDDTVLDRLRTEMQSSHVITPSAQAVVLPQSNTIPNRANDESNDMITNVSTQCNEEIRSALEGAIREYRSMQPDLRPRIPRLPMHNKNRALVAVLDSQLSNYFDNCEDLTDAHSILYCAAVAACRVAHVKFSDDRATRPKPAVPAWQYRIERRIGGARALIGKLICFREGNTRPRVMRFVRRAFSGTDISPRDYMSRVTERIDFLKQKVYAWANRIRRYKRRVDRYTQNRTFQRDERWVYRAWERPDQGVADTRLPDDDAMCSFWRSIWSVPVSHTEDEWTREVERACDPVQEMGAITISPQDVVCAVRPLPNWKSPGPDGLHNFWIKWFTRSHARLATLFQSALESGSLPEFLTTGITHLLHKSGSTAEPKNYRPITCLPTVYKVLTSILRTKISKHINDNSIMSPSQNGCRNGSRGTKELLLIDMAISQQVRRFRRDLSTCWIDYKKAYDSVPHTWLMRVLELYKVDTTLRTFLMSCMGQWRTVLRYPGCRQIQRDSEPIRIERGIFQGDSLSPLWFCLALNPLSTLLEDSSLGYRLRRGGQVISHLLYMDDLKLFAPNDLQLMELLKVTETFSSAIRMEFGVDKCAVMHVKRGEIVESVRTQLSDSINLRSLSATETYKYLGMSEALGINVADMKQSLKERFFGRLKKVFNSLLSGGNKVRAFNGWVMPVLMYSFGILKWTQTELDALDRRVRTLLTAYRMHHPRSSVMRLYIPRRCGGRGFLNAKTLHNREICSLREYFLETDVGMHRDVVAVDKGLTPLSLAKENWRKPVVLDTNDRREVWQSKELHGRFFRALHGPDVDLSASVAWLRSGDLFGETEGFVCAIMDEVMMTNNYRRFIVKDGTVDICRACHRPGESIRHIISGCSRLANGEYLHRHNLVARIIHQQLALKYNLVESEVPYYKYVPDPVLENGCVTLYWDRSIITDRTIVANKPDIVVVDRSERRAMIVDITVPHDENLVKAEKDKQIKYLDLAHEVVDLWDVDSAIIVPIVVSAHGLIAKSFDQHLRRLSLGSWIKGLIQKAVLLDTARIVRRFLSLEP

SEQ ID NO: 13143 - protein, 868 aa, Noctua pronuba
MRFVRRAFSGTDISFRDYLARVTERIDFLKQKICAWASRIRRYKRRVERYTQNRTFQSDERWVYRAWERPDQGVTDTHLPDDDAICSFWRSIWSVPVSHIEGDWTREVERACDPIPQMGAINISPQDVACAVRPLPNWKSPGPDGLHNFWIKWFQRSHVRLASQFQSALESGSLPQFLTTGITHLLHKSGSTAEPKNYRPITCLPTVYKVLTSILRAKINHHIDSNSIMSASQNGCRNGSRGTKELLLIDMAISQQVRRSRKNLSTCWIDYKKAYDSVPHTWLMRVLELYKVDATLRTFLMSCMGHWRTVLRYPGCRQIQGNSEPIRIERGIFQGDSLSPLWFCLALNPLSTLLEGSGLGYRLRRGGQVISHLLYMDDLKLFAPNNLQLMKLLKVTETFSSAISMEFGVDKCAVMHVKRGEIMESVGTQLSDSIQLRSLSSTDTYKYLGMSEALGINTADMKQSLRERFFGRLNKVLSSLLSGGNKVRAFNGWVMPVLMYSFGILKWTQSELDALDRRVRALLTANRMHHPRSSVMRLYIPRKCGGRGFLNAKTLHNREVCSLREYFLEADVGMHRDVVSVDKGLTPLSLANENWRKPRVLDTNDRKEVWQSKELHGRFYRALHGPDVDFLASVSWLRFGDLFGETEGFVCAIMDEVMMTNNYRKYIVKDGTVDICRACHRPGESIRHIISGCSRLANGEYLHRHNLVARIIHQQLALKYNLVESEVPYYKYAPDPVLDNGNITLYWDRSIITDRTIVANKPDIVVIDRLERRAMIVDITVPHDENLVKAEKDKQFKYLDLAREVVDMWDVNTAVIVPIVVSANGLIAKSLDQHLRRLALGSWIKRLIQKAVLLDTARIVRRFLSQEP

SEQ ID NO: 13144 - protein, 974 aa, Noctua pronuba
MQPDLRPRIPRLPMHNKNRALVAVLDSQLSNYFDNCEDLTDAHSILYCAAVAACRVAHVKFSDDRATRPKPAVPAWQYRIERRIGGARALIGKLICFREGNTRPRVMRFVRRAFSGTDISPRDYMSRVTERIDFLKQKVYAWANRIRRYKRRVDRYTQNRTFQRDERWVYRAWERPDQGVADTRLPDDDAMCSFWRSIWSVPVSHTEDEWTREVERACDPVQEMGAITISPQDVVCAVRPLPNWKSPGPDGLHNFWIKWFTRSHARLATLFQSALESGSLPEFLTTGITHLLHKSGSTAEPKNYRPITCLPTVYKVLTSILRNKISKHINDNSIMSPSQNGCRNGSRGTKELLLIDMAISQQVRRFRRDLSTCWIDYKKAYDSVPHTWLMRVLELYKVDTTLRTFLMSCMGQWRTVLRYPGCRQIQRDSEPIRIERGIFQGDSLSPLWFCLALNPLSTLLEDSGLGYRLRRGGQVISHLLYMDDLKLFAPNDLQLMELLKVTETFSSAIRMEFGVDKCAVMHVKRGEIVESVRTQLSDSINLRSLSATETYKYLGMSEALGINVADMKQSLKERFFGRLKKVFNSLLSGGNKVRAFNGWVMPVLMYSFGILKWTQTELDALDRRVRTLLTAYRMHHPRSSVMRLYIPRRCGGRGFLNAKTLHNREICSLREYFLEADVGMHRDVVAVDKGLTPLSLAKENWRKPVVLDTNDRREVWQSKELHGRFFRALHGPDVDLSASVAWLRSGDLFGETEGFVCAIMDEVMMTNNYRRFIVKDGTVDICRACHRPGESIRHIISGCSRLANGEYLHRHNLVARIIHQQLALKYNLVESEVPYYKYVPDPVLENGCVTLYWDRSIITDRTIVANKPDIVVVDRSERRAMIVDITVPHDENLVKAEKDKQIKYLDLAHEVVDLWDVDSAIIVPIVVSAHGLIAKSFDQHLRRLSLGSWIKGLIQKAVLLDTARIVRRFLSLEP

SEQ ID NO: 13145 - protein, 1099 aa, Noctua pronuba
MMAGNIIIHNNVGLPHSPLYNNNNNKLEPGVSVSAQRLSDQVRVIQRNHMLDDTVLDRLRFDSRSNLVTPASPMIAVQLQNVSSAPPRSDHDGEEDDDEVISVSTQCNAQLRSALEGAFREYRSIPPELRPRLPRLPMHKKNKALVCALDSQLSTCFDSSKDLADTHSILYCGAVAACRVAHVKFPNNDRATRPKLAVPAWQRRIERRIGEARALIGKLICFREGNTRPRVMRFVRRAFSGTGISFRDYLARVTERIDFLKQKICAWANRIRRYKRRVERYTQNRTFQSDERWVYRAWERPDQGVTDTRLPDADAMCLFWRSIWSVPVSHTEGDWTREVEQACDPIPEMGAIIISPQDVACAVRLLPNWKSPGPDGLHNFWIKWFQRSHARLASQFQSALESGSLPQFLTTGITHLLHKSGSTAEPKNYRPITCLPTVYKVLTSILRAKINHHIDSNSIMSTSQNGCRNGSRGTKELLLIDMAISQQVRRSRRDLSTCWIDYKKAYDSVPHTWLMRVLELYKVDATLRTFLKSCMGHWRTVLRYPGCRQIQRNSEPIRIERGIFQGDSLSPLWFCLALNPLSTLLEGSGLGYRLRRGGQVISHLLYMDDLKLFAPNNLQLMKLLKVTETFSSAIRMEFGVDKCAVMHVKRGEIMESVGTQLSDSIHLRSLSSTETYKYLGMSEALGINTTDMKQSLRERFFGRLNKVLGSLLSGGNKVRAFNGWVMPVLMYSFGILKWTQTELDALDRRVRALLTANRMHHPRSSVMRLYIPRKCGGRGFLNAKTLHNREVCSLREYFLEADVGMHRDVVSVDKGLTPLSLANENWRKPRVLDTNDRKEVWQGKELHGRCYRALHGPDVDFLASVSWLRFGDLFGETEGFVCAIMDEVMMTNNYRKYIVKDGTVDICRACHRPGESIRHIISGCSRLANGEYLHRHNLVARIIHQQLALKYNLVESEVPYYKYAPDPVLDDGNITLYWDRSIITDRTIVANKPDIVVIDRLERRAMIVDITVPHDENLVKAEKDKQFKYLDLAREVVDMWDVSTAVIVPIVVSANGLIAKSLDQHLRRLSLGSWIKRLIQKAVLLDTARIVRRFLSQEP

SEQ ID NO: 13146 - protein, 1200 aa, Tinea trinotella
MLTRSRARNQSAQLTSSGSSLSSASQPPRSTPTVSPVISVAAVASSSSDECFSPPTTPPSARRRGGGRPPASLEPRGPSASGGVPATSGRVQRMRWTQSINENVMRSYFGATEGGISLTAYRGRMLTLFQVLEPAVNVSAQRLSDQVRVIQRNRMLDDVVLDRLRLESRSSHVSPVSPPVAVQLQPSALPRPNNIQENDDDVTISVSNQYNEQLRSALEDAFREYRSTPPGLRPRIPRLPMHKKNRALVCALDSQLVNHFKSSKDLADTHSILYCAAVAVCRVAHVQFPNNDRAARLAVPAWQCRIERRIGEARALIGKLISFRECNTRPRVMRFVRRAFLGTDISSRDYQTRVTERIDFLKQKIYAWANRIRRYKRRVERYTQNRTFQSNERWVYRAWERPDQDVSDMCLPDDDAMSLFWRNIWSVPVGHTEGEWTREVERACDLIPEMGAIIISPQDVACAVRPLSNWKSPGLDGLHNFWIKYFQRSHARLAAQFQSALELGSLPQFLTTGITHLLHKSGSTAEPKNYRPITCLPTVYKVLTSILRAKIDKHIDTNCIMSASQNGCRSGSRGTKELLLIDVAISQQVRRSRRDLSTCWIDYKKAYDSVPHTWLMRVLELYKVDAALRTFLVSCMGQWRTVLHYPGCRRILGNGEPIKIERGIFQGDSLSPLWFCLALNPLSTLLDGSGQGYRLRRDGQVISHLLYMDDLKLFAPNNLQLMKLLKVTETFSSAISMEFGVDKCAIMHVKRGEIMESVGTQLSDSIHLRSLCSTETYKYLGMSEALGINAVDVKQSLRDRFFGRLNKVLNSLLSGGNKVRAFNGWVKPVLMYSFGILKWTQTELDALDRRVRTLLTANRMHHPRSSVMRLYIPRKCGGRGFLNAKTLHNREVCSLREYFLKTDVGMHRDVVAVDKGLTSLSLANENWRKPVVLDANDRREVWQSKELHGRFYRALHGPDVDFLASVSWLRFGDLFGETEGFVCAIMDEVMMTNNYRKYIVKDGTVDICRACHRPGESIRHIISGCSRLANGDYLHRHNLVARIIHQQLALKYNLVESEVPYYRYVPDPVLENGNITLYWDRSIITDRTIVANKPDIVVIDRLERRTIIVDVAVPHDENLVKAEKDKQIKYLDLAREVVDMWEVDTAIIVPIVVTANGLIAKSLDEHLKRLSLGSWIKRLIQKAVLLDTARIVRRFLSQEP

SEQ ID NO: 13147 - protein, 1199 aa, Spilosoma lubricipeda
MLTRARSRAQLLTPDSSLRSALPSSDARTEVPTVAEASSSSSSDEFFSPPPSPTPVRRQERYRPPDSLGPRGPLTSNRAPAAGGNVRRMKWTHSINENVMRAYFRATELGTNLTAYRVRLVSLFQELEPAVNVSAQRLSDQVRAIQRCHLLDDAVLERIRSDIRNSLAVPSSSHVVDTIVNTTSQLPRSEYIDELVDSEIISVSTQCNDTIRSTLEDAIREYRYVDSNDRPRLSRLPIHKRNLALVSALDSLLPDYFNNSEDLSDTHSILYCAAIAVCRVAGVNFVECKTATRPKNTVPAWQCRIERRIAGTRTLIGKLISFRSGNTRPKVMRFVKQAFLGTTVSPQQYMSCVTERIDFLKQKVYAWANRIRRYRKRTDRYNQNRTFQRNEKWVYQKWEKLSPCMRDEHLPDKNATNYFWRNIWSTPVIHTEGRWCRDVERSCESITPMEPVRIDKEDVSCAVRSLANWKAPGPDGLHNFWLKWFRSSHAYLASQFQTALDSGSLPQFLTTGITHLLHKSGSTMDPKNFRPITCLPTLYKLLTSILRLKITTHINNNSIISVSQNGCRSGTRGTKELLIIDMTISQQVRRNRKSLATCWIDYKKAYDSVPHTWLLRVLELYKIDTTLCTFLKSCMGQWRTVLRYPGCRQSTMNDVLIKIERGIFQGDSLNPLWFCLALNPLSTLLEGSGIGYRLQKDDRVISHLLYMDDLKLLAPTKLQLTALLKVTENFSNSIKMEFGVDKCAVMYVKKGLIVESEGVELSDSTKLRSLSATETYKYLGFSQSLGIPESDVKQMLRERFFGRLKKVLKSLLSGGNKVRAYNSWVMPVLMYSFGILRWTQTELDAFDRRVRTLLTAFRMHHPRSSVMRLYIPRKFGGRGLLNIKTLHNREIYNLREYFLHTDVEMHRNVVAVDTGLTPLALAKENWRKPVVLSTNDRREVWKGKELHGRFYRALNGPDIDFKASTSWLRYGDLFGETEGFVCAIMDEVIMTNNYRKYILKDGTVDICRACHRPGESIRHIISGCSRLANGEYLHRHNQVARIVHQQLALKYHLVNSEVPYYRYVPDPVLENGRATLYWDRSIITDRTIVANKPDIVVIDRLERRAMIVDIAVPHDENLVKAEKEKQIKYLDLSHEIVDMWNVDSAIIVPIVVSAHGLIARSLDQHLKRLTLDGWIKGLMQKAVLLDTARIVRRFLSLEP

SEQ ID NO: 13148 - protein, 868 aa, Spilosoma lubricipeda
MRFVKQAFLGTTISPQQYMSCVTERIDFLKQKVYAWANRIRRYRKRIDRYNQNRMFQRNEKWVYRKWENLSPCMSDGQVPDENATNSFWRSIWSVPVAHTEGDWYRDVERSCESLLPMELINIDKEDVSCAVRSLPNWKAPGPDGLHNFWLKWFRSSHACLASQFQTALDSGSLPQFLTTGITHLLYKSGSAMDPKNFRPITCLPTLYKLLTSILRLKITTHINQNSILSVSQNGCRSGTRGTKELLIIDMTISQQVRRNRKSLATCWIDYKKAFDSVPHTWLLNVLELYKIDPTLCTFLKSCMRQWRTVLRYPGCRQTAVNDVPIKIERGIFQGDSLSPLWFCLALNPLSTLLEGSGLGYRLQKEAPVISHLFYMDDLKLFAPTKLQLTALLRVTENFSNSIKMEFGIDKCAVMHVKKGVIVESEGIELSDSTRLRSLSVTETYKYLGFSQSLGIPESDMKQSLRERFFGRLKKVLKSLLSGGNRVRAYNGWVMPVLMYSFGILRWTQTELDALDRRVRTLLTAFRMHHPRSSVMRLYIPRKFGGRGLLNVKTLHNREIYNLREYFLHTDVGVHRSVVAMDTGLTPLALAKENWRKPVVLGTNERREVWKGKELHGRFYRALNGPDIDFKASTSWLRYGDLFGETEGFVCGIMDEVIMTNNYRKYILKDGTVDICRACHRPGESIRHIISGCSRLANGEYLHRHNQVARIVHQQLALKYKLVNSEVPYYRYVPDPVLENGRATLYWDRSIITDRTIVANKPDIVVIDRSERRAMIVDIAVPHDENLVKVEKEKQIKYLDLSHEIVDMWDVDSVIIVPIVVSVHGLIAKSLDQHLKRLTLDGWIKGLMQKAVLLDTARIVRRFLSLEP

SEQ ID NO: 13149 - protein, 1198 aa, Spilosoma lubricipeda
MLTRARSRALLPSSDSSLRSALPSSDARTEVPTVAEASSSSSSDEFFSPPTSPTPVRRQGRDRPPTSLGPRGPLTSNRAPAAGGDVRRMKWTQSINENVMRAYFRATELGTNLTAYRVRLVSLFQELEPAVNVSAQRLSDQVRAIQRCHLLDDVVLERIRSDVRGTLTVPSSSHSVDLVATTPQLPHNEYVDEQVESEVMTVSTQCNDRIRRALEDAIQEYRHVDYKNRPRLPRLPIHKRNLALVSALNSLLPDYFGNSEDLSDTHSILYCAAIAVCRVAGVKFVEQITTTRPKNEVPAWQCRIERRITETRTLIGKLITFQSGNTRPRVMRFVKQAFLGTTISPQQYMSSVTERIDFLKQKVYAWANRIRRYRKRVDRFIQNRMFQRNEKWVYRKWEEPSPRVGEGRFPDENVTNTFWRNIWSVPVTHTEGDWYRDVERSCESITSMEPITISKDDIGCAVRSLPNWKSPGPDGLHNFWLKWFRSSHACLASQYQAAVDSGSLPQFLTTGITHLLYKSGSAMDPKNFRPITCLPTMYKLLTSILRLKISTHINNNLIMSVSQNGCRSGSRGTKELLIIDMTISQQVRRNRKSLATCWIDYKKAYDSVPHTWLLRVLELYKIDTTLCTFLKSCMGQWRTVLRYPGCRQTAVNDVLINIERGIFQGDSLSPLWFCLALNPLSALLEDSGLGYRLQKDDQVISHLFYMDDLKLLAPTKLQLTALLKVTENFSNSIKMEFGVDKCAVMYVKKGVIVESEGTELSDSTRLRSLSATETYKYLGFSQSLGIPEPDMKQSLRERFFGRLKKVLKSLLSGGNKVRAYNSWVMPVLMYSFGILRWTQTELDALDRRVRTLLTAFRMHHPRSSVMRLYIPRKFGGRGLLNAKTLHNREIYNLREYFLHTDVGVHRSVVTVDTGLTPLALAKENWRKPVVLSTNDRREVWKGKELHGRFYRALNGPDIDFKASTSWLRYGDLFGESEGFVCAIMDEVIMTNNYRKYILKDGTVDICRACHRPGESIRHIISGCSRLANGEYLHRHNQVARIVHQQLALKYHLVSSEVPYYRYVPDPVLENGRATLYWDRSIITDRTIVANKPDIVVIDRLERRAMIVDIAVPHDENLVKVEKEKQIKYLDLSHEIVDMWNVDSAIIVPIVVSAHGLIAKSLDQHLKRLTLEDWIKGLMQKAILLDTARIVRRFLSWEP

SEQ ID NO: 13150 - protein, 1198 aa, Ochropleura plecta
MITRLAARQHARLPPPDSPLSSASPPPEPSLIVSAVTPAVAVASSSSDEYFSPPTTPPPACRRGGRRPPDGLGLRGPLASDRVPAPGGSVQRMRWTSSINENVMRSYYGATEGGNNLTAYRVRMLSLFQVLEPAVNVSAQRLSDQVRVIQRNRMLDDTVLDRLRTEMQSSQVITSSSQAVVPPQSHQLVSHADEVSNDMATNVSTQCNEEMRIALEGAIREYRYISPELRPRLPRLPMHNKNRALVAVLDSQLSNYFDNCENLTDAHSILYCAAVAACRVAHVKFPDDGATRPKPAVPFWQCRIERRIGVARALIGKLICFREGNTRPRVMRFVRRAFAGTDISPPDYMSHITERIDFLKQKVYAWANRIRRYKRRVERYTLNRTFQSDERWVYRAWERPDQGVSDTHLPDDDAMCLFWRNIWSVPVSHTEGEWTREVERACDPIPEMGALTISPQDVACAVRPLPNWKSPGPDGLHNFWLKWIQRSHARLATLFQTALESGSLPKFLTTGITHLLHKSGSTTEPKNYRPITCLPTIYKVLTSILRAKITKHIDDNSIMSASQNGCRNGSRGTKELLLIDMAISQQVRRSRRHLSTCWIDYKKAYDSVPHTWLMRVLELYKVDATLCTFLSSCMRQWNTVLRYPGCRQIQRNSEPIRIERGIFQGDSLSPLWFCLALNPLSTLLEDSGLGYRLRRGGRVISHLLYMDDLKLFAPNDSQLMELLKVTETFSSAISMEFGVDKCAVMHVKRGEIVESVGTQLSDSIHLRSLSANETYKYLGMSEALGINVADMKQSLKERFFGRLRKVFNSLLSGGNKVRAFNGWVMPVLMYSFGILKWTQTELDALDRKVRTLLTAYRMHHPRSSVMRLYIPRSCGGRGFLNAKTLHNREICSLREYFLEADVGMHRDVVTVDKGFTPLSLAKENWRKPVVLDTNDRREVWQSKELHGRFFRALHGPDVDQPASVAWLRSGDLFGETEGFVCAIMDEVMMTNNYRRFIVKDGTVDICRACHRPGESIRHIISGCSRLANGEYLHRHNLVARIIHQQLALKYSLVESEVPYYRYEPDPVLEHGNITLYWDRSIITDRTIVANKPDIVVVDRSERRAMIVDITVPHDENLVKAEKDKQIKYIDLAREVVDMWDVDSAIIVPIVVSANGLIAKSLDQHLRRLSLGSWIKGLIQKAVLLDTARIVRRFLSLEP

SEQ ID NO: 13151 - protein, 1187 aa, Ochropleura plecta
MLTRAAQARNARHPPPGSSLSSASPPPEPSLVVSAVTPAVAVASSSSDEYFSPPTTPPPVRRRGRHRPPDGGPAPGGSVQRMRWTQSINENVMRSYYGATEGGNNLTAYRVRMLSLFQVLEPAVNVSAQRLSDQVRVIQRNRMLDDTVLDRLRTDMQSSQVITSSSQAVVPPQPHQLINRVNEVSNDVATNVSTQCSEEMRSTLEGAIREYRYMSPELRPRLPRLPMHNKNRALVAALDSQLSSYFDNCENLTDAHSILYCAAVTVCRVAHVKFPDDRATRPKPAIPFWQCRIERRIGAARALIGKLTCFREGNTRPRVMRFVRRAFAGTDISPPDYISRIAERIDFLKQKVYAWANRIRRYKRRVERYTQNRTFQSDERWVYRAWERPDQGVSDTHLPDDNAMCLFWRSIWSVPVSHTEGEWTREVERACDPIPEMGALTISPQDVACAVRPLPNWKSPGPDGLHNFWIKWIQRSHVRLAALFQTALESGSLPKFLTTGITHLLHKSGSTAEPKNYRPITCLPTLYKVLTSILRAKITKHIDDNSIMSASQNGCRNGSRGTKELLLIDMAISQQVRRSRRHLSTCWIDYKKAYDSVPHTWLMRVLELYKIDATLRTFLISCMRQWSTVLRYPGCRQIQRNSEPIRIERGIFQGDSLSPLWFCLALNPLSTLLENSGLGYRLRRGGQVISHLLYMDDLKLFAPNDLQLMELLKVTETFSSSIRMEFGVDKCAVMHVKRGEIVESVGTQLSDSINLRSLSATETYKYLGMSEALGINVADMKQSLKERFFGRLRKVFNSLLSGGNKVRAFNGWVMPVLMYSFGILKWTQTELDALDRKVRTLLTTFRMHHPRSSVMRLYIPRSCGGRGFLNAKTLHNREICSLREYFLETDVGMHRDVVAVDKGFTPLSLAKENWRKPVVLDTNDRREVWQSKELHGRFFRALHGPDVDQPASVAWLRSGDLFGETEGFVCAIMDEVMMTNNYRRFIVKDGTVDICRACHRPGESIRHIISGCSRLANGEYLHRHNLVARIIHQQLALKYSLVESEVPYYRYEPDPVLEHGNITLYWDRSIITDRTIVANKPDIVVVDRSERRAMIVDITVPHDENLVKAEKDKQIKYIDLAREVVDMWDVDSAIIVPIVVSANGLIAKSLDQHLRRLSLGSWIKGLIQKAVLLDTARIVRRFLSLEP

SEQ ID NO: 13152 - protein, 1200 aa, Ochropleura plecta
MKMITRSAARRDARLPPPGPSLSSASPPPEPSLVVSAVTPAVAVASSSSDEYFSPPTTPPPARRRGGRRLPDGLGLRGPPAFDRVPAPGGNVQRMRWTSSINENVMRSYYGATEGGNNLTAYRVRMLSLFQVLEPAVNVSAQRQSDQVRVIQRNRMLDDTVLDRLLTEMQSSQVITSSSQAVVPPQSHQLVSRADEVSNDMATNVSTQCSEEMRSALEGAIREYRYISPELRPRLPRLPMHNKNRMLVAVLDSQLSNYFDNCENLTDAHSLLYCAAVTACCVAHVKFPDDRATRSKPAVPVWQYRIERRIGVARALIGKLICFREGNTRPRVMRFVRRAFAETDISPSDYMSRITERIDFLKQKVYAWANRIRRYKRRVERYTLNRTFQSDERWVYRAWERPDQDVSDMRLPDDDAMCSFWRSIWSVPVSHTEGEWTREVERACDPIPEMGAITISPQDVACAVRPLPNWKSPGPDGLHNFWLKWIQRSHARLATLFQTALESGSLPKFLTTGITHLLHKSGSTAEPKNYRPITCLPTIYKVLTSILRAKITKHIDDNSIMSASQNGCRNGSRGTKELLLIDMAISQQVRRSRRHLSTCWIDYKKAYDSVPHTWLMRVLELYKIDATLRTFLISCMRQWSTVLRYPGCRLIQRNSEPIRIERGIFQGDSLSPLWFCLALNPLSTLLENSGLGYRLRRGGQVISHLLYMDDLKLFAPNDLQLMELLKVTETFSSSIRMEFGVDKCAVMHVKRGEIVESVGTQLSDSINLRSLSATETYKYLGMSEALGINVADMKQSLKERFFGRLRKVFNSLLSGGNKVRAFNGWVMPVLMYSFGILKWTQTELDALDRKVRTLLTAFRMHHPRSSVMRLYIPRSCGGRGFLNAKTLHNREICSLREYFLETDVGMHRDVVAVDKGLTPLSLAKENWCKPVVLDTNDRREVWQSKELHGRFFRALHGPDVDQPASVAWLRAGDLFGETEGFVCAIMDEVMMTNNYRRFIVKDGTVDICRACHRPGESIRHIISGCSRLANGEYLHRHNLVARIIHQQLALKYNLVESEVPYYRYEPDPVLEHGNITLYWDRSIITDRTVVANKPDIVVVDRSERRAMIIDITVPHDENLVKAEKDKQIKYIDLAREVVDMWDVDSAIIVPIVVSANGLIAKSLDQHLRRLSLGSWIKGLIQKAVLLDTARIVRRFLSLEP

SEQ ID NO: 13153 - protein, 1200 aa, Ochropleura plecta
MKMITRSAARRDARLPPPGPSLSSASPPPEPSLVVSAVTSAVAVASSSSDEYFSPPTTPPPARRRGGRRPPDGLGLRDPPASERVPAPGGSVQRMRWTSSINENVMRSYYGATEGGNNLTAYRVRMLSLFQVLEPAVNVSAQRLSDQVRVIQRNRMLDDTVLDRLRTEMQSSQVITSSSQAVVPPQSHQLVSRADEVSNDMATNVSTQCSEEMRSALEGAIREYRYMSPELRPRLPRLPMHNKNRALVAVLDSQLSNYFDNCENLTDAHSILYCVAVAACRVAHVKFPDDGATRPKPAVPFWQCRIERRIGVARALIGKLICFKEGNTRPRVMRFVRRAFAGTDISPPDYMSRITERIDFLKQKVYAWANRIRRYKRRVERYTLNRTFQSDERWVYRAWERPDQGVSDTHLPDDDAMCLFWRSIWSVPVSHTEGEWTREVERACDPIPEMGALTISPQDVACAIRPLPNWKSPGPDGLHNFWIKSIQRSHTCLATLFQTALESGSLPKFLTTGITHLLHKSGSTAEPKNYRPITCLPTLYKVLTSILRAKITKHIDDNSIMSASQNGCRNGSRGTKELLLIDMAISQQVRRSRRHLSTCWIDYKKAYDSVPHTWLMRVLEMYKVDATLRTFLISCMRQWSTVLRYPGCRQIQRNSEPIRIERGIFQGDSLSPLWFCLALNPLSTLLENSGLGYRLRRGGQVISHLLYMDDLKLFAPNDLQLMELLKVTETFSSAIRMEFGVDKCAVMHVKRGEIMESVGTQLPDSTNLRSLSATETYKYLGMSEALGINVADMKQSLKERFFGRLRKVFNSLLSGGNKVRAFNGWVMPVLMYSFGILKWTQTELDALDRKVRTLLTAFRMHHPRSSVMRLYIPRSCGGRGFLNAKTLHNREICSLREYFLETDVGMHRDVVAVDKGLTPLSLAKENWHKPVVLDTNDRKEVWQSKELHGRFFRALHGPDVDQSASVAWLRSGDLFGETEGFVCAIMDEVMMTNNYRRFIVKDGTVDICRACHRPGESIRHIISGCSRLANGEYLHRHNLVARIIHQQLALKYNLVESEVPYYRYEPDPVLEHGNITLYWDRSIITDRTIVANKPDIVVVDRSERRAMIVDITVPHDENLVKAEKDKQIKYIDLAREVVDMWDVDSAIIVPIVVSANGLIAKSLDQHLRRLSLGSWIKGLIQKAVLLDTARIVRRFLSLEP

SEQ ID NO: 13154 - protein, 1105 aa, Hecatera dysodea
MRWTQTINENVMRSYYRATEGGTNLTAYRGRMLSLFQVLEPAVNVSAQRLSDQVRVIQRNRMLDDSVLDRLRTEICSHVIVPSPQTVAPPQLTQIPCHADEENNDRVTNVSTQCNDELRSALESAIREYRYVSPELRPRIPRLPMHNKNRALVAALDSQLSNYFDNCEDLTDAHSIMYCAAVAACRVAHVKMPSDRVTRPKVAVPAWQCRIERRIGGARALIGKLICFREGNTRPRVMRFVRRAFSGTDISPSDYLSRVTERIDFLKQKVYAWANRIRRYKRRVERYTQNRTFRSNERWVYKAWERPDQDVTDMHPPDDDAMCSFWRNIWSVPVSHTEGDWIREVERACDPLPEMGAIIISPHDVARAVRPLPNWKSPGPDGLHNFWIKWFKGSHACLASRYQAALESGSLPEFFMTGVTHLLHKSGSTAEPKNYRPITCLPTVYKVLTSILRDKINQHINSNNIMSASQNGCRNGSRGTKELLLIDMVISQQVRRSRKDLSTCWIDYKKAYDSVPHSWLMRVLELYKIDTTLRTFLMSCMGQWRTVLRYPGCRNIQRNSEPVRIERGIFQGDSLSPLWFCLALNPLSTLLENSGLGYRLRRGGQVISHLLYMDDLKLFAPTNLQLMELLKVTETFSNAIRMEFGVDKCAVMHVKRGEIMESVGTQLSDSINLRSLSSTETYKYLGMSEALGINVTDMKQSLRERFFGRLKKVLNSLLSGGNKVRAFNGWVMPVLMYSFGVLKWTQTELDALDRRVRTLLTAYRMHHPRSSVMRLYIPRKCGGRGFLNAKTLHNREICSLREYFLAVDVGMHRDVVAVDKGLTPLSLANENWRKPAVLDTNDRRAVWQSKELHGRFFRALHGPDVDQLASVAWLRFGDLFGETEGFVCAIMDEVIMTRNYRRFIVKDGTVDICRACHRPGESIRHIVSGCSSLANGEYLHRHNLVARIIHQQLALKYSLVESEVPYYRYVPDPVLDNGNITLYWDRSIITDRTIVANKPDIVVVDRIVRRAMIVDITVPHDENLVKAEKDKQIKYLDLAREVVDMWDVDSAIIVPIVVSVNGLIAKSLDQHLRRLTLGGWIKGLIQKAVLLDTARIVRRFLSLEP

SEQ ID NO: 13155 - protein, 1196 aa, Hecatera dysodea
MLTRAAARRARLPPPASSLSSASPPPEPSPTVSAATPAVAVASSSSDEYFSPPTSPPPARRRRGRRPPDGLGPRGPPVSDRVPAPGGSVQRMRWTQTINENVMRSYYGATEGGTNLTAYRGRMLSLFQVLEPAVNVSAQRLSDQVRVIQRNRMLDDSVLDRLRTEICSHVIVPSLQTVAPPQLTQIPCHADEENNDRVTNVSTQCNDELRSALESAIREYRYVSPELRPRIPRLPMHNKNRALVAALDSQLSNYFDNCEDLTDAHSIMYCAAVAACRVAHVKMPSDRVTRPKVAVPAWQCRIERRIGGARALIGKLICFREGNTRPRVMRFVRRAFSGTDISPSDYLSRVTERIDFLKQKVYAWANRIRRYKRRVERYTQNRTFRSNERWVYKAWERPDQDVTDMHPPDDDAMCSFWRNIWSVPVSHTEGDWIGEVERACDPLPEMGAIIISPQDVARAVRPLPNWKSPGPDGLHNFWIKWFKGSHACLASRYQAALESGSLPEFFMTGVTHLLHKSGSTAEPKNYRPITCLPTVYKVLTSILRDKINQHINSNNIMSASQNGCRNGSRGTKELLLIDMVISQQVRRSRKDLSTCWIDYKKAYDSVPHSWLMRVLELYKIDTTLRTFLMSCMGQWRTVLRYPGCRNIQRNSEPVRIERGIFQGDSLSPLWFCLALNPLSTLLENSGLGYRLRRGGQVISHLLYMDDLKLFAPTNLQLMELLKVTETFSNAIRMEFGVDKCAVMHVKRGEIMESVGTQLSDSINLRSLSSTETYKYLGMSEALGINVTDMKQSLRERFFGRLKKVLNSLLSGGNKVRAFNGWVMPVLMYSFGVLKWTQTELDALDRRVRTLLTAYRMHHPRSSVMRLYIPRKCGGRGFLNAKTLHNREICSLREYFLAVDVGMHQDVVAVDKGLTPLSLANENWRKPAVLDTNDRRAVWQSKELHGRFFRALHGPDVDQLASVAWLRFGDLFGETEGFVCAIMDEVIMTRNYRRFIVKDGTVDICRACHRPGESIRHIVSGCSSLANGEYLHRHNLVARIIHQQLALKYSLVESEVPYYRYVPDPVLDNGNITLYWDRSIITDRTIVANKPDIVVVDRIVRRAMIVDITVPHDENLVKAEKDKQIKYLDLAREVVDMWDVDSAIIVPIVVSVNGLIAKSLDQHLRRLTLGGWIKGLIQKAVLLDTARIVRRFLSLEP

SEQ ID NO: 13156 - protein, 1046 aa, Hecatera dysodea
MLDDAVLDRLRLESRNSRVSPASPPAAVQIQPSISPRPDHVSEDVDDGTISVSTQCNERLRSALEDAFREYRSTPPELRPRLPRLPMHKKNRALVCALDSQLSIYFDSSENLTDTHSILYCGAAAACRVAHVKFPNSDRVARPAVPAWQCRIERRIGEARALIGKLICFREGNTRRRVMRFVRRAFSGTDISPRDYLTRVTERIDFLKQKVYAWANRIRRYKRRVERYTQNRTFQGNERWVYRAWERPDQGVTDTRLPDDEAMLSFWRNIWSVPVSHTEGDWTREVERACDPIPEMGAINISPQDVARAVRPLPNWKSPGPDGLHNFWIKWFKGSHARLASQFQSALGSGSLPKFLTTGITHLLHKSGSTAEPKNYRPITCLPTVYKVLTSILRAKINNHIDSNSIMSASQNGCRNGSRGTKELLLIDVAISQQVRRSRRDLSTCWIDYKKAYDSVPHTWLMRVLELYKVDAVLRTFLMSCMGQWSTVLHYPGCRQTQANSEPIRIERGIFQGDSLSPLWFCLALNPLSTLLEGSGQGYRLRRGGQVISHLLYMDDLKLFAPNNLQLMKLLKVTETFSSDISMEFGVDKCAVMHVKRGEIMESVGTQLSDSILLRSLCSTETYKYLGMSEALGINATGVKQSLKERFFGRLNKVLNSLLSGGNKVRAFNGWVMPVLMYSFGILKWTQTELDALDRRVRSLLTANRMHHPRSSVMRLYIPRKCGGRGFLNAKTLHNREICSLREYFLEADVGMHRDVVAVDKGLTPLSLANENWRKPVVLDTNDRRVVWQSKELHGRFYRVLHGPDVDFLASVAWLRFGDLFGETEGFICAITDEVMMTNNYRKYIVKDGTVDLCRACHRPGESIRHIISGCSSLANGDYLHRHNLVARIIHQQLALKYNLVESEVPYYRYAPDPVLENGNCTLYWDRSIITDRTIVANKPDIVVIDRLERRAMIVDIAVPHDENLVKAEKDKQSKYLDLAREVVDMWNVNTAVIVPIVVTANGIIAKSLDQHLKRLSLGSWIKGLIQKAVLLDTARIVRMFLSREP

SEQ ID NO: 13157 - protein, 1200 aa, Mythimna impura
MLTRSRAKKANTHPTSSGSSLSSASQPPAPAPTVSPEIPVAAVASSSSDEYFSPPTTPPPARRRGRGRPPASLGSRGPPASDRVLAAGGSVQRMRWTQSINENVMRSYFGATEGGSNLTAYRSRMLSLFQVLEPAVNVSAQRLSDQVRVIQRNRLLDDAVLDRLRLESRSSRVSPASPQAAVQLQSNVSLRPDHVGEDDDDGAISVSNQCNVRLRSALEDAFREYRFTPAELRPRLPRLPMHKKNRALVCALDSQLSNCFDSSEDLTDTHSILYCAAVAACRVARVKFPNSDRVTRPAVPAWQCRIERRIGEARALIGKLICFREGNTRPRVMRFVRRAFSGTDISPRDYLPHITERIDFLKQKVYAWANRIRRYKRRVERYTQNRTFQRNERWVYRAWERPDQGVIDTRLPDDDAMCSFWRSIWSVPVSHTEGDWIREIERTCDLIPEMGAITISPQDVARAVRPLPNWKSPGPDGLHNFWLKWFQRSHARLASQFQSALESGSLPEFLTTGITHLLHKSGSTAEPKNYRPITCLPTVYKVLTSILRAKINSHIETNSIMSASQNGCRNGSRGTKELLLIDVAISQQVRRSRRDLSTCWIDYKKAYDSVPHTWLMRVLELYKVDATLRTFLMSCMRQWRTALHYPGCRQIRESSEPIRIERGIFQGDSLSPLWFCLALNPLSTLLEGSGLGYRLRRGGHVISHLLYMDDLKLFASNNLQLMELLKVTETFSSAIRMEFGLDKCAVMHVKRGEIMESVGTQLSDSIYIRSLCSTETYKYLGMSEALGINAADMKQSLRERFFGRLNKVLNSLLSGGNKVRAFNGWVMPVLMYSFGILKWTQTELDALDRRVRSLLTANRMHHPRSSVMRLYIPRKCGGRGFLNAKTLHNREICSLREYFLKTDVGMHRDVVAVDKGLTPLSLVNENWRKPTVMDTNERRAVWQGKELHGRFYRALHGPDVDLLASVSWLRFGDLFGETEGFVFAIMDEVMMTNNYRKYIVKDGTVDICRACHRPGESIRHIISGCSHLANGDYLHRHNLVARIIHQQLALKYNLVESEVPYYRYVPDPVLENGGVTLYWDRSIITDRTIVANKPDIVVIDRLERRTMIVDIAVPHDENLVKAEKDKQTKYLDLAREVVDMWEVDRAIIVPIVVTANGLIAKSLEQHLRRLSLGSWIKGLIQKAVLLDTARIVRRFLSQEP

SEQ ID NO: 13158 - protein, 1200 aa, Mythimna impura
MLTRAAARRARHPPPGSPLSSASPPPDLESPVSPAAAVASSSSDEYFSPPTSPTPVRRQRRGRPPKSLGSRGQPAPSRVPAAGGCVQRMRWTQSMNENVMRAYYGSTEGGTNLTAYRDRMLSLFQDLEPTVNVSAQRLSDQVRVIQRNHRLDDATLDRLRSEVLSNQIVSTSIQTQTAATPTTNAISPRSNPNNDDADDMVVTVSSQCNDELRSALEDALREYRTTPTELRPRLPRLPMHKKNRALVCTLDSLLKNNFESSENLVDTHSILYCGAVAACRLANINFPNIDGTIRPKPAVPAWQYRIERRIDGARVLIGKLHCFREGNTRPRVMRFVRRAFLGTGISPQEYMSRVTERIDFLKQKVCAWASRIRRYKRRVDRYSQNRMFQSDERWVYRAWERPEQNVIDGRRPDDFATITFWRNIWSVPVSHTEGDWMRDVERVCEAIPEMEKVVITPADVAKAVRPLPNWKSPGPDGLQNFWLKWFSNSHAPLASQFQSTLESGSLPDYLTTGVTHLLHKTGNPVEPKNYRPITCLSTVYKLFTSILRAKINRHIENNLIMSASQNGCRNGSRGTKELLLIDMAISQQARRSRKDLSTCWIDYKKAYDSVPHTWLMRVLELYKVDMTLRTFLESCMRQWKTVLRYPGCRPIQGNDEPIRIKRGIFQGDSLSPLWFCLALNPLSTLLEESGLGYRLRRGGQAISHLLYMDDLKLFAPSNLQLMELLKVTETFSSAIRMEFGVDKCAAMHVKRGEIMESEGILLPDSIHLRSLSSTETYRYLGMSEALGINNADMKQSLKERFFGRLKKVLNSLLSGGNKVRAFNGWVMPVLMYSFGILKWTQTELDALDRRVRTLLTANRMHHPRSSVMRLYISRKCGGRGFLNAKTLHNREVCSLREYFLKTDVGMHRDVVAVDKGLTPLSMAKEDWRKPVILTTDDRKEIWKGKELHGRFYRALHEPDVDFLASVAWLRFSDLFGETEGFICAIMDEVILTNNYRRYIMKDGTVDVCRACHRPGESIRHIISGCSRLANGEYLHRHNQVARIIHQQLALKYNLVDSEVPYYKYVPDPVLENDHVTLYWDRSIITDRTIVANKPDIVVIDRLARRAVIVDVTIPHDENLVKAEKEKQIKYLDLAHEVVDMWNVDSAVIVPMVVTANGLIAKSFDDHLSKLSLRGWIKGLIQKAVLLDTARIVRRFLSLEP

SEQ ID NO: 13159 - protein, 1107 aa, Mythimna impura
MRWTQSINENVMRSYFGATEGGSNLTAYRGRMLSLFQVLEPAVNVSAQRLSDQVRVIQRNRMLDDAVLDRLRLESRSSRVSPASPQAAVQLQSNVSLRPDHVGEDDDDGAISVSNQCNVRLRSALEDAFREYRFTPAELRPRLPRLPMHKKNRALVCALDSQLSNCFDSSEDLTDTHSILYCAAVAACRVARVKFPNSDRVTRPAVPAWQCRIERRIGEARALIGKLICFREGNTRPRVMRFVRRAFSGTNISPRDYLPHITERIDFLKQKVYAWANRIRRYKRRVERYTQNRTFQRNERWVYRAWERPDQGVIDTRLPDDDAMCSFWRSIWSVPVSHTEGDWTREIERTCDLIPEMEPITISPQDVARAVRPLPNWKSPGPDGLHNFWLKWFQRSHARLASQFQSALESGSLPQFLTTGITHLLHKSGSTAEPKNYRPITCLPTVYKVLTSILRAKINSHIETNSIMSASQNGCRNGSRGTKELLLIDVAISQQVRRSRRDLSTCWIDYKKAYDSVPHTWLMRVLELYKVDATLRTFLMSCMRQWRTALHYPGCRQIRESSEPIRIERGIFQGDSLSPLWFCLALNPLSTLLEGSGLGYRLKRGGQVISHLLYMDDLKLFASNSLQLMELLKVTETFSSAIRMEFGLDKCAVMHVKRGAIMESVGTQLSDSIYIRSLCSTETYKYLGMSEALGINAADMKQSLRERFFGRLNKVLNSLLSGGNKVRAFNGWVMPVLMYSFGILKWTQTELDALDRRVRSLLTANRMHHPRSSVMRLYIPRKCGGRGFLNAKTLHNREICSLREYFLKTDVGMHRDVVAVDKGLTPLSLVNENWRKPTVMDTNERRAVWQGKELHGRFYRALHGPDVDLLASVSWLRFGDLFGETEGFVFAIMDEVMMTNNYRKYIVKDGTVDICRACHRPGESIRHIISGCSHLANGDYLHRHNLVARIIHQQLALKYNLVESEVPYYRYVPDPVLENGSVTLYWDRSIITDRTIVANKPDIVVIDRLERRTMIVDIAVPHDENLVKAEKDKQTKYLDLAREVVDMWEVDRAVIVPIVVTANGLIAKSLEQHLRRLSLGSWIKGLIQKAVLLDTARIVRKFLSQEP

SEQ ID NO: 13160 - protein, 1200 aa, Mythimna impura
MLTRSRAREQETHPTSSGSSLSSASQPPGPAPAVSPVIPAAAVASSSSDEYFSPPTTPPPARRRGRGRPPASLRPRGPPASDRVPAAGGSVQRMRWTQSINENVMRSYFGATEGGSNLTAYRGRMLSLFQVLEPTVNVSAQRLSDQVRVIQRNRMLDDAVLDRLRLESQRSRASSATPLAAVQLQPSALPRPDHIGDADDDAAISVSTQCNERLRSALEHAFREYRSTPPGLRPRLPRLPMHKRNRALVCALDSQLSNCFDSSKDLADTHSILYCAAAAACRVAHVKFPNCDRATRPAVPAWQRRIERRIGEARALIGKLICFREGNTRPRVMRFVRRAFLGTDISPQNYLPCVTERIDFLKQKVYAWASRIRRYKRRVERYTQNRTFQSNERWVYRTWERPDQDVTDTRLPDDDAMCSFWRRIWSVPVSHIEGDWIREVERTCDLLPEMGAITISPQDVARAVRPLPNWKSPGPDGLHNFWIKWFQGSHARLASQFQSALESGSLPEFLTTGITHLLHKSGSTADPKNYRPITCLPTVYKVLTSILRAKINTHIETNSIMSASQNGCRNGSRGTKELLLIDMAISQQVRRSRKDLSTCWIDYKKAYDSVPHTWLMRVLELYKVDTTLRTFLMSCMGQWRTVLHYPGCRQIRENSEPIRIERGIFQGDSLSPLWFCLALNPLSTLLEGSGLGYRLKRGGQVISHLLYMDDLKLFAPNNLHLMELLKVTETFSSAIRMEFGVDKCAVMHVKRGEIMESVGTQLSDSIYLRSLCSTETYKYLGMSEALGINAADVKQSLKERFFGRLNRVLKSLLSGGNKVRAFNGWVMPVLMYSFGILKWTQTELDALDRRVRTLLTANRMHHPRSSVMRLYIPRKCGGRGFLNAKTLHNREVCSLREYFLETDVGMRRDVVAVDKGLTPLSLANGNWRKPIILDTNDRREVWQSKELHGRFYRALHGPDVDLLASVSWLRFGDLFGETEGFVCAIMDEVVMTNNYRKYIVKDGTADICRACHRPGESIRHIISGCSHLANGDYLHRHNLVARIIHQQLALKYNLVESEVPYYKYVPDPVLDNGSITLYWDRSIITDRTIVANKPDIVVIDRLERRTVIVDIAVPHDENLVKAEKDKQTKYLDLAREVVDMWEVDTAVIVPIVVTANGLISKSLDQHLRRLSLGSWIKGLIQKAVLLDTARIVRRFLSQEP

SEQ ID NO: 13161 - protein, 1200 aa, Mythimna impura
MLTRSRARFQNAQPTSSGSSLSSASQPPGPAPTVSPEIPVAAVASSSSDEYFSPPTTPPPARRRGRGRPPASLGPRGPPASDRVPAAGGSVQRMRWTSSINENVMRSYFGATEGGINLTAYRGRMLSLFQVLEPAVNVSVQRLSDQVRVIQRNRMLDDAVLDRLRLESQSSRVSPATPPTAVQRLPTASPRPDHVGDADDDAAISVSTQCNDRLRGALEDAFREYRSTPPGLRPRLPRLPMHKRNRALVCALDSQLSNCFDSSEDLTDTHSILYCAAVAACRVAHVKFPNCDGATRPAVPAWQCRIEHRIGEARALIGKLICFREGNTRPRVMRFVRRAFSGTDISPRDYLPCVTERIDFLKQKIYAWANRIRRYKRRVERYTQNRTFQSNERWVYRDWERPDQGVTDTRLPDDDAMCSFWRSIWSTPVSHTEGDWIREVERACDLLPEMGAITISPQDVTRAVRPLPNWKSPGPDGLHNFWLKLFQRSHARLASQFQSALESGSLPQFLTTGITHLLHKSGSTAEPKNYRPITCLPTVYKVLTSILRAKINSHIETNSIMSASQNGCRNGSRGTKELLLIDVAISQQVRRSRKNLSACWIDYKKAYDSVPHTWLMRVLELYKVDATLRTFLMSCMGQWRTVLHYPGCRQIQENSEPIRIERGIFQGDSLSPLWFCLALNPLSTLLEGSGLGYRLKRGGQVISHLLYMDDLKLFAPNNLQLVELLKVTETFSSAIRMEFGVDKCAVIHVKRGEIMESMGIQLSDSIHLRSLCSTETYKYLGMSESLGINTDDVKQSLKERFFGRLNKVLNSLLSGGNKVRAFNGWVMPVLMYSFGILKWTQTELDALDRRVRTLLTAHRMHHPRSSVMRLYIPRKCGGRGFLNAKTLHNREVCSLREYFLKTDVGMHRDVAAVDKGLTPLSLANGNWRKPIVLDTNDRREVWQSKELHGRFYRALHGPDVDLLASVSWLRFGDLFGETEGFVFAIMDEVMMTNNYRKYIVKDGTVDICRACHRPGESIRHIISGCSHLANGDYLHRHNLVARIIHQQLALKYNLVESEVPYYRYVPDPVLDNGNNTLYWDRSIITDRTIVANKPDIVVIDRLERRTMIVDIAVPHDENLVKAEKDKQTKYLDLAREVVDMWEVDRAIIVPIVVTANGLIAKSLEQHLRRLSLGSWIKGLIQKAVLLDTARIVRRFLSQEP

SEQ ID NO: 13162 - protein, 1199 aa, Mythimna impura
MLTRSRAREQETHPTSSGSSLSSASQPPGPAPAVSPVIPAAAVASSSSDEYFSPPTTPPPARRRGRGRPPASLRPRGPPASDRVPAAGGSVQRMRWTQSINENVMRSYFGATEGGSNLTAYRGRMLSLFQVLEPTVNVSAQRLSDQVRVIQRNRMLDDAVLDRLRLESQRSRASSATPPAAVQLQPSALPRPDHVGDADDDAAISVSTQCNERLRSALEDAFREYRSTPPGLRPRLPRLPMHKRNRALVCALDSQLSNCFDSSKDLADTHSILYCAAAAACRVAHVKFPNCDRATRPAVPAWQRRIERRIGEARALIGKLICFKGNTRPRVMRFVRRAFLGTDISPQNYLPCVTERIDFLKQKVYAWASRIRRYKRRVERYTQNRTFQSNERWVYRTWERPDQDVTDTRLPDDDAMCSFWRRIWSVPVSHIEGDWIREVERTCDLLPEMGAITISPQDVARAVRPLPNWKSPGPDGLHNFWIKWFQGSHARLASQFQSALESGSLPEFLTTGITHLLHKSGSTADPKNYRPITCLPTVYKVLTSILRAKINTHIETNSIMSASQNGCRNGSRGTKELLLIDMAISQQVRRSRKDLSTCWIDYKKAYDSVPHTWLMRVLELYKVDTTLRTFLMSCMGQWRTVLHYPGCRQIRENSEPIRIERGIFQGDSLSPLWFCLALNPLSTLLEGSGLGYRLKRGGQVISHLLYMDDLKLFAPNNLHLMELLKVTETFSSAIRMEFGVDKCAVMHVKRGEIMESVGTQLSDSIYLRSLCSTETYKYLGMSEALGINAADVKQSLKERFFGRLNRVLKSLLSGGNKVRAFNGWVMPVLMYSFGILKWTQTELDALDRRVRTLLTANRMHHPRSSVMRLYIPRKCGGRGFLNAKTLHNREVCSLREYFLETDVGMHRDVVAVDKGLTPLSLANGNWRKPIILDTNDRREVWQSKELHGRFYRALHGPDVDLLASVSWLRFGDLFGETEGFVCAIMDEVVMTNNYRKYIVKDGTADICRACHRPGESIRHIISGCSHLANGDYLHRHNLVARIIHQQLALKYNLVESEVPYYKYVPDPVLDNGSITLYWDRSIITDRTIVANKPDIVVIDRLERRTVIVDIAVPHDENLVKAEKDKQTKYLDLAREVVDMWEVDTAVIVPIVVTANGLISKSLDQHLRRLSLGSWIKGLIQKAVLLDTARIVRRFLSQEP

SEQ ID NO: 13163 - protein, 930 aa, Mythimna impura
MYCAAVAACRVAHVKFPSCDVSTRPKPAVPAWQCRIERRIGGARTLIGKLICFREGNTRPRVMRFVRRAFSGTDISPRDYMSRVTERIDFLKQKVYAWANRIRRYKRRVERYTQNRTFRSNERWVYRAWERPDQGVTDTRLPDDDAMSLFWRSIWSVPVSHTEGDWTREVERACDPIPQMGAIDISPQDVARAVRPLPNWKSPGPDGLHNFWIKWFTRSHARLAYQFQSALESGSLPQFLTTGITHLLHKSGSTAEPKNYRPITCLPTVYKVLTSILRSKINSHIDKNLIMSPSQNGCRNGSRGTKELLLIDMTISQQVRRFRKDLSTCWIDYKKAYDSVPHTWLMRVLELYKIDTTLRTFLMSCMRQWSTVLRYPGCRHIQRNSEPVRIERGIFQGDSLSPLWFCLALNPLSTLLENSGLGYRLKRGGQVISHLLYMDDLKLFAPNNLQLMELLKVTETFSSAIRMEFGVDKCAVMHVKRGEVVESVGTQLTDSINLRSLSPTETYKYLGMSEALGINITDMKQSLKERFFGRLKKVFNSLLSGGNKVRAFNGWVIPVLMYSFGLLKWTQTELDALDRRVRTLLTAYRMHHPRSSVMRLYIPRKCGGRGFLNAKTLHNREVCSLREYFLATDVGMHRDVVTVDKGLTPLSLANENWRKPVVLDTNDRREVWQSKELHGRFFRAFHGPDVDQLASVAWLRFGDLFGETEGFVCAIMDEVIMTNNYRRFIVKDGTVDICRACHRPGESIRHIISGCSRLANGEYLHRHNLVARIIHQQLALKYSLVESEVPYYRYEPDPVLDNGHITLYWDRSIITDRTIVANKPDIVVVDRSERRAMIVDISVPHDENLVKAEKDKQIKYIDLAREVVDMWDVDSAIIVPIVVSANGLIAKSLDQHLRRLALGGWIKALIQKAVLLDTARIVRRFLSLEP

SEQ ID NO: 13164 - protein, 1200 aa, Mythimna impura
MLTRAAARRARLPPPASSLSSASPPPESSPTVSAVTPAVAVASSSSDEYFSPPTSPPPARRRRGRRPPSGLGPRGPPASDRVPAPGGSVQRMRWTQSINENVMRAYYGATEGGNNLTAYRVRMLSLFQVLEPAVNVSAQRLSDQVRVIQRNHMLDDTVLDRLRTEMSNHAIAPSSQPVVPVMVPPSYHLSDHADEEITDMVTHVSTQCNNELRSALECAIREYRNMPLELRPRLPRLPMHNKNKALVAALDLQLSNYFDDCEDLTDTHSIMYCAAVAACRVAHVKFPSCDVSTRPKPAVPAWQCRIERRIGGARALIGKLICFREGNTRPRVMRFVRRAFSGTDISPRDYMSHVTERIDFLKQKVYAWANRIRRYKRRVERYTQNRTFRSNERWVYRAWERPDQGVTDTRLPDDDAMSSFWRSIWSVPVSHTEGDWTREVERACDPIPQMGAIDISPQDVARAVRPLPNWKSPGPDGLHNFWIKWFTRSHARLAYQFQSALESGSLPQFLTTGITHLLHKSGSTAEPKNYRPITCLPTVYKVLTSILRSKINSHIDKNLIMSPSQNGCRNGSRGTKELLLIDMTISQQVRRFRKDLSTCWIDYKKAYDSVPHTWLMRVLELYKIDTTLRTFLMSCMRQWSTVLRYPGCRHIQRNSEPVRIERGIFQGDSLSPLWFCLALNPLSTLLENSGLGYRLKRGGQVISHLLYMDDLKLFAPNNLQLMELLKVTETFSSAIRMEFGVDKCAVMHVKRGEVVESVGTQLTDSINLRSLSPTETYKYLGMSEALGINITDMKQSLKERFFGRLKKVFNSLLSGGNKVRAFNGWVMQGLMYSFGVLKWTQTELDALDRRVRTLLTAYRMHHPRSSVMRLYIPRKCGGRGFLNAKTLHNREVCSLREYFLATDVGMHRDVVAVDKGLTPLSLANENWRKPVVLDTNDRKEVWQSKELHGRFFRAFHGPDVDQLASVAWLRFGDLFGETEGFVCAIMDEVIMTNNYRRFIVKDGTVDICRACHRPGESIRHIISGCSRLANGEYLHRHNLVARIIHQQLALKYSLVESEVPYYRYEPDPVLDNGHITLYWDRSIITDRTIVANKPDIVVVDRSERRAMIVDISVPHDENLVKAEKDKQIKYIDLAREVVDMWDVDSAIIVPIVVSANGLIAKSLDQHLRRLALGGWIKALIQKAVLLDTARIVRRFLSLEP

SEQ ID NO: 13165 - protein, 1200 aa, Mythimna impura
MLTRAAARRARLPPPASSLSSASPPPESSPTVSAVTPAVAVASSSSDEYFSPPTSPPPARRRRGRRPPSGLGPRGPPASDRVPAPGGSVQRMRWTQSINENVMRAYYGATEGGNNLTAYRVRMLSLFQVLEPAVNVSAQRLSDQVRVIQRNHMLDDTVLDRLRTEMSNHAIAPSSQPVVPVMVPPSYHLSDHADEEITDMVTNVSTQCNNELRSALECAIREYRNMPLELRPRLPRLPMHNKNKALVAALDLQLSNYFDDCEDLTDTHSIMYCAAVAACRVAHVKFPSCDVSTRPKPAVPAWQCRIERRIGGARALIGKLICFREGNTRPRVMRFVRRAFSGTDISPRDYMSRVTERIDFLKQKVYAWANRIRRYKRRVERYTQNRTFRSNERWVYRAWERPDQGVTDTRLPDDDAMSSFWRSIWSVPVSHTEGDWTREVERACDPIPQMGAIDISPQDVARAVRPLPNWKSPGPDGLHNFWIKWFTRSHARLAYQFQSALESGSLPQFLTTGITHLLHKSGSTAEPKNYRPITCLPTVYKVLTSILRSKINSHIDKNLIMSPSQNGCRNGSRGTKELLLIDMTISQQVRRFRKDLSTCWIDYKKAYDSVPHTWLMRVLELYKIDTTLRTFLMSCMRQWSTVLRYPGCRHIQRNSEPVRIERGIFQGDSLSPLWFCLALNPLSTLLENSGLGYRLKRGGQVISHLLYMDDLKLFAPNNLQLMELLKVTETFSSAIRMEFGVDKCAVMHVKRGEVVESVGTQLTDSINLRSLSPTETYKYLGMSEALGINITDMKQSLKERFFGRLKKVFNSLLSGGNKVRAFNGWVMPVLMYSFGVLKWTQTELDALDRRVRTLLTAYRMHHPRSSVMRLYIPRKCGGRGFLNAKTLHNREVCSLREYFLATDVGMHRDVVAVDKGLTPLSLANENWRKPVVLDTNDRREVWQSKELHGRFFRAFHGPDVDQLASVAWLRFGDLFGETEGFVCAIMDEVIMTNNYRRFIVKDGTVDICRACHRPGESIRHIISGCSRLANGEYLHRHNLVARIIHQQLALKYSLVESEAPYYRYEPDPVLDNGHITLYWDRSIITDRTIVANKPDIVAVDRSERRAMIVDISVPHDENLVKAEKDKQIKYIDLAREVVDMWDVDSAIIVPIVVSANGLIAKSLDQHLRRLALGGWIKALIQKAVLLDTARIVRRFLSLEP

SEQ ID NO: 13166 - protein, 1200 aa, Phlogophora meticulosa
MLTRSAARRARPPPLASSLSSASPPPESSPIVSTVTPAVAIASSSSDEYFSPPTSPPPARRRRGRRPPDSIGPRGPPASDRVPASGGSVQRMRWTQSINENVMRSYYGATEGGTNLTAYRGRMLSLFQMLEPAVNVSAQRLSDQVRVIQRNHMLDDVVLDRLRLNSRIYHVTPALPPVAVQLQSLPSVSPRPDYVGEEDDDAAISVSSQCNVRLRSALDDAFREYRSTPPELRSRLPRLPMHKKNKALMSALDSLLTKSFDNSKDLTDTHSILYCAAAAACRVANVKFPNTERATRPTVPAWQCRIQRRIDEARALIGKLICFREGNTRPRVMRFVRRAFSGTDISSRDYLTRVTERIDFLKQKICAWANRIRRYKRRVERYTQNRTFRSDERWVYRAWERSDQGVTDTCLPDDEAMCSFWRSIWSVPVSHTEGNWTREIERACEPLPEMGAINISPQDVASAVRPLPNWKSPGPDGLHNFWIKWLQSSHARLACQFQSALESGSLPQFLTTGITHLLHKSGSTAEPRNYRPITCLPTVYKVLTSILRSKINNHIDSNLIMSFSQNGCRNGSRGTKELLLIDTAISQQVRRSRKDLSTCWVDYKKAYDSVPHTWLMRVLELYKVDATLRTFLMSCMGQWRTVLRYPGCQQTRENSEPIRIERGIFQGDSLSPLWFCLALNPLSTLLEGSGLGYRLRTGGQVISHLLYMDDLKLFAPNNLQLMELLKVTETFSSAIRMDFGVDKCAVMHVKRGEIVESVGTQLSDSIYLRSLSSTETYKYLGMSEALGINATDMKQSLKERFFGRLNKVLNSLLSGGNKVRAFNGWVMPVLMYSFGILKWTQTELDALDRRVRTLLTANRMHHPRSSVMRLYIPRKCGGRGFLNAKTLHNREICSLREYFLKADVGMHRDVVAVDKTFTPLSLANKNWRKPIVLDTADRMEIWKSKELHGRFYRVLHGPDVDLVASISWLRFGDLFGETEGFVCAIMDEVIMTNNYRKYIVKDGTVDICRACHRPGESIRHIISGCSRLANGDYLHRHNLVARIIHQQLALKYNLVDLEVPYYKYVPDPVLENGSITLYWDRSIITDRTIVANKPDIVVIDRSERRTMIIDITVPHDENLVKAEKEKQMKYLDLAREVVDMWDVNTAVIVPIVVTANGIIAKSLDQHLKRLSLGSWIKGLIQKAVLLDTARIVRRFLSQEP

SEQ ID NO: 13167 - protein, 1198 aa, Phlogophora meticulosa
MLTRSAARRARPPPPASSLSSASSPPKPSTIVSTVKPAVPVASSSSDEYFSPPTSPPPARRRRGRRPPDGLGPRGPPASDRVPAPGGSVQRMRWTQSINENVMRSYYGATEGGSNLTAYRVRMLSLFQVLEPAVNVSAQRLSDQVRVIQRNHMLDDVVLDRLRTEMQSSRVITSPSHTVVPPQYNMVSSSFADGEGSDKVTNVSTQYNEELRSALEGAIREYRFMLPALRPRLPRLPMHNKNRALVAALDSQLSNYFDNCDDLTDAHSILYCAAVAACRVAHVKFPNDIATRPKPAVPAWQCRIERRIAGARALIGKLVCYREGNTRPRVMRYVRRAFLGTDISPRDYMSRVTERIDLLKQNVYAWASRIRRYKRRVERYTQNRTFQSNERWVYRAWERPVQGVTDTHLPDDDVMCSFWRNIWSMPVSHTEGDWTREVERACDPIPQMGAITISPEDVARAVRPLPNWKSPGPDGLHNFWIKWLQKSHGRLASQFQSALETGSLPQFLTTGITHLLHKSGSTAEPKNYTPITCLPTVYKVLTSILRVKINNHIDSNSIMSASQNGCRNGSRGTKELLLIDTAISQQVRRSRKDLSTCWIDYKKAYDSVPHTWLKRVLELYKVDATLRTFLTSCMGQWRTVLRYPGCRQIQRNSEPIRIERGIFQGDSLSPLWFCLALNPLSTLLEDSGLGYRLKRGGQVVSHLLYMDDLKLFAPSDLQLMELLKVTKTFSSAIRMEFGVDKCAVMHVKRGKIVESVGTQLPDFINFRALSPIETYKYLGMSQALGINAADMKQSLKERFFGRLKKVCNSLLSGGNKVRAFNGWVMPVLMYSFGILKWTQTELDALDRRVRTFLTASRMHHPRSSVMRLYIPRKCGGRGFLNAKTLHNREICSLRDYFLETDVGMHRDVVAVDQGLTPLSLAKENWRKPVVLDTNDRKEVWQSKELHGRFFQALHGPDVDQLASVSWLRFGDLFGETEGFVCAIMDEVIMTNNYRRFIVKDGTVDICRACHRPGESIRHIISGCSRLANEEYLHRHNLVARIIHQQLALKYSLVESEVPYYKYVPDPVLENGSVTLYWDRSIITDRTIVANKPDIVVMDRIERRATIIDVTVPHDGNLVKAEKDKQIKYLDLAREVVDMWDVDSAIVVPIVVSANGLIAKSLDQHLRRLALGSWIKGLIQKAVLLDTARIVRRFLSLEP

SEQ ID NO: 13168 - protein, 1198 aa, Xestia xanthographa
MLTRSAAARRARLPPPDSSLSSASPPPEPSPIVSAVTPAVAVASSSSDEYFSPPTTPPPARRRGGRRPPDGLGPRGPPASDRVPAPGGSVQRMRWTQSINENVMRAYYGATEGGNNLTAYRVRMLSLFQVLESAVNVSAQRLSDQVRVIQRNRMLDDTVLDRLRTEIQSSHVIATPSQAVVPPQSSIIPNCDNDVGNDMVTNVSTQCNVEMRSALEGAIREYRFMQPDLRPRIPRLPMHNKNRALVAVLDSQLSNYFDNCEDLTDVHSILYCAAVAACRVAHVKFSSDRATRPKPAVPAWQYRIERRIGGARALIGKLVCFREGNTRPRVMRFVRQAFSGTDISPRDYMSRVTERIDFLKQKVYAWANRIRRYKRRVDRYTQNRTFQKDERWVYRAWERPDQGVADTHLPDDDAMCSFWRSIWSVPVSHAEGEWTRVIERACDPVLEMGAITISPQDVARAVRPLPNWKSPGPDGLHNFWIKWFTRSHARLATLFQSALESGSLPEFLTTGITHLLHKSGSTAEPKNYRPITCLPTVYKVLTSILRTKISKHIDDNSVMSASQNGCRNGSRGTKELLLIDMAISHQVRRSRKDLSTCWIDYKKAYDSVPHTWLMRVLELYKVDATLRTFLMSCMGQWRTVLRYPGCRQIQRNSEPIRIERGIFQGDSLSPLWFCLALNPLSTLLEDSGLGYRLRKDGQVISHLLYMDDLKLFAPNDLQLMELLKVTDTFSSAIRMEFGVDKCAVMHVKRGEIVESVGTQLSDSITLRSLSATETYKYLGMSEALGVNVADMKQSLKERFFGRLKKVFNSLLSGGNKVRAFNGWVMPVLMYSFGILKWTQTELDALDTKVRKLLTAYRMHHPRSSVMRLYIPRKCGGRGFLNAKTLHNREICSLREYFIGTDVGMHRDVVTVDKGLTPLSLAKENWRKPPVLDTNDRREVWQSKELHGRFFRALHGPDVDLPASVAWLRSGDLFGETEGFVCAIMDEVMMTNNYRRFIVKDGTVDICRACHRPGETIRHIISGCSRLANGEYLHRHNLVARIIHQQLALKYNLVESEVPYYRYVPDPVLDNGCITLYWDQSIITDRTIVANKPDIVVVDRSERRAMIVDITVPHDENLVKAEKDKQIKYLDLAREVVDMWEVDSAIIVPIVVSAHGLIAKSLDQYLRRLSLGSWIKGLIQKAVLLDTARIVRRFLSLEP

SEQ ID NO: 13169 - protein, 961 aa, Xestia xanthographa
MHNKNRALVAVLNSQLSSYFDNCEDLTDVHSILYCAAVAACRVAHVKFSSDRATRPKPAVPAWQYRIERRIGGARALIGKLVCFREGNTRPRVMRFVRQAFSGTDISPRDYMSHVTERIDFLKQKVYAWANRIRRYKRRVDRYTQNRTFQKDERWLYRAWERPDQGVANTHLPDDDAVCSFWRSIWSVPVSHAEGEWTRVIERACDPVSEMGAITISPQDVARAVRPLPNWKSPGPDGLHNFWIKWFTRSHARLATLFQSALESGSLPEFLTTGITQLLYKSGSTAEPKNYRPITCLPTVYKVLTSILRTKISKHIDDNSVMSASQNGCRNGSRGTKELLLIDMAISHQVRRSRKDLSTCWIDYKKAYDSVPHTWLMRVLELYKVDATLRTFLMSCMGQWRTVLRYPGCRQIQRNSEPIRIERGIFQGDSLSPLWFCLALNPLSTLLEDSGLGYRLRKDGQVISHLLYMDDLKLFAPNDLRLMELLKVTDTFSSAIRMEFGVDKCAVMHVKRGEIVESVGTQLSDSITLRSLTATETYKYLGMSEALGVNVADMKQSLKERFFGRLKKVFNSLLSGGNKVRAFNGWVMPVLMYSFGILKWTQTELDALDTKVRKLLTAYRMHHPRSSVMRLYIPRKCGGRGFLNAKTLHNREICSLREYFLGTDVGMHRDVVTVDKGLTPLSLAKENWRKPPVLDTNDRMEIWPSKELYGRFFHALHGADVDLLASVAWLRSGDLFGETEGFVCAIMDEVMMTNNYRRFIVKDGTVDICRACHRPGESIRHIISGCSRLANGEYLHRHNLVARIIHQQLALKYNLVESEVPYYRYVPDPVLDNGCITLYWDQSIITDRTIVANKPDIVVVDRSERRAMIVDITVPHDENLVKAEKDKQIKYLDLAREVVDMREVDSAIIVPIVVSAHGLIAKSLDQYLRRLSLGSWIKGLIQKAVLLDTARIVRRFLSLEP

SEQ ID NO: 13170 - protein, 1205 aa, Cosmia trapezina
MLTRSRAQQLRNTQPTSSGSSLSSASQLPEPAPDVSQVIPAAAVASSSSDEYFSPPTTPPPVRRRGRGRPPASLGPRGPSASDRVPAPGGSVQRMRWTQTVNENVMRAYFGAIEGGSNLTAYRGRMLSLFQVLEPAVNVSAQRLSDQVRVIQRNHMLDDVVLDRLRLESRNSRVTSVSPMVAVQLQNLPSASPRPDCVGEEDDSGAISVSSQCNVQLRSALEDAFREYRSAPPGLRPRLPRLPMHKKNKALVGALDSQLSNCFDGSKDLADTHSILYCAAVAACRVAHVKFPNSDRVPRPKPAVPAWQCRIERRIGEARALIGKLICFREGNTRPRVMRFVRRAFSGTDISPRDYFTCVTERIDFLKQKICAWANRIRRYRRRVERYTQNRTFQSDERWVYRAWERPDQGVADTQLPDDDAMCSFWRSIWSVPVSHTEGDWTREVERACDHIPQMGALTISPQDVARAVRPLPNWKSPGPDGLHNFWIKWFQRSHARLASQFQSALQSGSLPQFLTTGITHLLHKSGSTAEPRNYRPITCLPTVYKVLTSILRAKINKHIDTNSIMSASQNGCGNGSRGTKELLLIDMTINQQVRRSRKDLSTCWIDYKKAYDSVPHTWLMRVLELYKIDATLRTFLMSCMGQWRTVLRYPGCRNIQRNSEPIRIERGIFQGDSLSPLWFCLALNPLSTLLEDSGLGYRLRRGGQVISHLLYMDDLKLFAPNNLQLMELLKVTETFSSAIRMEFGVDKCAVMHVKRGEIVESVRTQLSDSIHLRSLSPLETYKYLGMSEALGINAADMKQSLRERFFGRLNKVLNSLLSGGNKVRAFNGWVMPVLMYSFGILKWTQTELDALDRRVRTLLTANRMHHPRSSVMRLYIPRKCGGRGFLNAKTLHNREVCSLREYFLEADVGMHRDVVSVDKGLTPLSLANENWCKPVVLDTNDRREVWQSKELHGRFYRVLHGPDVDFLASVSWLRFGDLFGETEGFVFAIMDEVMMTNNYRKYIVKDGTVDICRACHRPGESIRHIISGCSRLANGDYLHRHNLVARIIHQQLALKYSLVESEVPYYRYVPDPVLENGNITLYWDRSIITDRTIVANKPDIVVIDRLERRTMIIDIAVPHDENLVKAEKDKQIKYLDLAREVVDMWDVDTAIIVPIVVTANGIIAKSLDQHLRRLSLGGWIKGLIQKAVLLDTARIVRRFLSQQP

SEQ ID NO: 13171 - protein, 1002 aa, Cosmia trapezina
MARLQISTQCNEELRSALEGAIQEYRFVSPELRPRLPRLPMHNKNRALVAALDSQLSNYFDDCEDLTDTHSILYCAAVAACRVAHVKFANDSRATRPKPAVPAWQCRIERRIGGARALIGKLICFREGNTRPRVMRFVRRAFSGTDVSPQDYMSRVTERIDFLRQKVYAWANRIRRYKRRVDRYTQNRTFQSDERWVYRGWERPYQGVTDTRLPDDDAMCSFWRSIWSVPVSHTEGDWAREVRRACDPIPEMGAITICPQDVARAVRPLPNWKSPGPDGLHNFWIKWFLGSHARLAAQYQSALQSGSLPQFLTTGITHLLHKSGSTTEPKNYRPITCLPTVYKVLTSILRAKINEHIDTNSIMSASQNGSRNGSRGTKELLLIDMAISQQVRRSRRDLSTCWIDYKKAYDSVPHTWLMRVLELYKVDATLRTFLMSCMGQWRTVLRYPGCRNIQRNSEPIRIERGIFQGDSLSPLWFGLALNPLSTLLEDSGLGYRLRRGGQVISHLLYMDDLKLFAPSNLQLVELLKVTETFSSAIRMEFGVDKCAVMHVKRGEIVESVGTQLPDSINLRTLSAAETYKYLGMSEALGINVADMKQSLKERFFGRLKKVFNSLLSGGNKVRAFNGWVMPVLMYSFGILKWTQTELDALDRRVRTLLTAYRMHHPRSSVMRLYIPRKCGGRGFLNAKTLHNREICSLREYFLETDVEMHRDVIAVDKGLTPLSLAKENWRKPVVLDANDRMEVWQSKELHGRFFRALHGPDVNLLASVAWLRSGDLFGETEGFVCAIMDEVIMTNNYRRFIVKDGTVDICRACHRPGESIRHIISGCSRLANEEYLHRHNLVARIIHQQLALKYSLVESEVPYYRYVPDPVLENGHITLYWDRSIITDRTIVANKPDIVVVDRTERRAMIVDITVPHDGNLVKAEKDKQIKYIDLAREVVDMWDVDSAVIVPIVVSANGLIAKSLDQHLRRLSLGSWIKGLIQKAVLLDTARIVRRFLSLEP

SEQ ID NO: 13172 - protein, 1198 aa, Mamestra brassicae
MLTRVAAQRARLPPPASSLSSASPPPEPSPTVSAVIPAVAVASSSSDEYFSPPTSPPPARRRRGRRPPDGLGPRGPPASDRVPAPGGSVQRMRWTQTINENVMRSYYGATEGGTNLTAYRGRMLSLFQVLEPAVNVSAQRLSDQVRVIQRNRMLDDAVLDRLRLESRNGRVSAASPPAAVQIQFSVSPRPNIVGEDDDDGAISVSTQCNERLRSVLEDAFREYRSTPPELRPRLPRLPMHNKNRALVCALDSQLANCFDSSEDLADTHSILYCAAAAACRVAHVKFPNSDRATRPAVPAWQCRIERRIGEARALIGKLICFREGNTRRRVMRFVRRAFSGTDTSPRDYLTRVTERIDFLKQKIYAWANRIRRYKRRVERYTQNRTFQSNERWVYRAWERPDQGVTDTRLPDDDVMCSFWRNIWSVPVSHTEGDWTREVERACDPIPEMGAITISPQDVARAVRPLPNWKSPGPDGLHNFWIKWFKRSHARLASQFQSALESGSLPQFLTTGITHLLHKSGSTAEPKNYRPITCLPTVYKVLTSILRAKINQHIETNSIMSASQNGCRNRSRGTKELLLIDVAISQQVRRSRRDLSTCWIDYKKAYDSVPHTWLMRVLELYKVDAVLRTFLMSCMGQWRTVLRYPGCRQIQANSDPIRIERGIFQGDSLSPLWFCLALNPLSTLLEGSGQGYRLRRGGQVISHLLYMDDLKLFAPNNLQLMKLLKVTETFSSAISMEFGVDKCAVMHVKRGEIMESVGTQLSDSIHLRSLSSTETYKYLGMSEALGINANDVKQSLKERFFGRLNKVLNSLLSGGNKVRAFNGWVMPVLMYSFGILKWTQTELDALDRRVRSLLTANRMHHPRSSVMRLYIPRKCGGRGFLNAKTLHNREICSLREFFLEADVGMHRDVVAVDKGLTALSLANENWRKPVVLDTNDRREVWQSKELHGRFYRVLHGPDVDFLASVAWLRFGDLFGETEGFVCAIMDEVMMTNNYRKYIVKDGTVDICRACHRPGESIRHIISGCSSLANGDYLHRHNLVARIIHQQLALKYNLVESEVPYYRYVPDPVLENGNCTLYWDRSIITDRTIIANKPDIVVIDRLERRAMIVDIAVPHDVNLVKTEKDKQTKYLDLAREVVDMWDVNTAVIVPIVVTANGIIAKSLDQHLKRLSLGSWNKGLIQKAVLLDTARIVRWFLSQGP

SEQ ID NO: 13173 - protein, 1197 aa, Mamestra brassicae
MLTRSRARHLATHPSPSASSLSSASPPPEPSPTVSAVTPAVAVASSSSDEYFSPPTTPPPARRRRGRRPPDGLGPRGPPASDRVPAPGGSVQRMRWTQSINENVMRSYFGATEGGTNLTAYRGRMLSLFQVLEPAVNVSAQRLSDQVRVIQRNRMLDDSVLDRLRMEMCGHVITPPSQTVSPPQSQISSHADEESNDRVTNVSTQCNEELRSALECAIREYRYIPPELRPRLPRLPMHNKNRALVAALDSQLSNYFDDCEDLTDTHSIMYCAAVAACRVAHVKMTNDRVTRPKPAVPAWQCRIERRIGGARALIGKLICFREGNTRPRVMRFVRRAFSGTDISPRDYMSRVTERIDFLKQKVYAWANRIRRYRRRVERYTQNRTFRSNERWVYRVWEQPDQGVTDTRLPDDDAMCSFWRNIWSVPVSHTEGGWIREVERACDPLPEMGAITISPQDVARALRPLPNWKSPGPDGLHNFWIKWLQRSHARLASQYQTALESGSLPEFLTTGVTHLLHKSGSTAEPKNYRPITCLPTVYKVLTSILRAKINNHINSNNIMSVSQNGCRNGSRGTKELLLIDMAISQQVRRFRKDLSTCWIDYKKAYDSVPHTWLMRVLELYKIDTMLRTFLMSCMGQWRTVLRYPGCRNIQRNSEPVRIERGIFQGDSLSPLWFCLALNPLSTLLENSGLGYRLKRGGQVISHLLYMDDLKLFAPSNLQLMELLKVTETFSSAIRMEFGVDKCAVMHLKRGEIMESVGTQLSDSINLSSLSSTETYKYLGMSEALGINVTDMKQSLRERFFGRLKKVFNSLLSGGNKVRAFNGWVMPVLMHSFGVLKWTQTELDALDRRVRTLLTAYRMHHPRSSVMRLYIPRKCGGRGFLNAKTLHNREICSLREYFLAVDVGMHRDVVTVDKGLTPLSLANENWRKPAVLDTNDRRAVWQSKELHGRFFRALHGPDVDQLASVAWLRFGDLFGETEGFVCAIMDEVIMTNNYRRFIVKDGTVDICRAYHRPGESIRHIVSGCSRLANGEYLHRHNLVARIIHQQLALKYSLVESEVPYYRYAPDPVLDNGNITLYWDRSIITDRTIVANKPDIVVVDRIERRAMIVDITVPHDENLVKAEKDKQIKYIDLAREVVDMWDVDSAIIVPIVVSANGLIATSLDQHLRRLSLGSWIKGLIQKAVLLDTARIVRRFLSLEP

SEQ ID NO: 13174 - protein, 1197 aa, Noctua fimbriata
MLTRAAAKRARLSPPDPSLSSASPPPESSPVVSAVTPAVAVASSSSDEYFSPPTTPPPVRRRGGRRPPDGLGPRGPPASDRVPAPGGSVQRMRWTQSINENVMRSYYGATEGGNNLTAYRVRMLSLFQVLEPAVNVSAQRLSDQVRVIQRNRMLDDTVLDRLRTETQSSHVITPSAQAVVLPQSSTIPNRDNDVSNDMVTNVSTQCNEEMRSALEGAIREYRFMQPDLRPRIPRLPMHNKNRALVAVLDSQLSNYFDNCEDLTDAHSILYCAAVAACRIAHVKFSDDRATRPKPAVPPWQYRIERRIGGARALIGKLICFREGNTRPRVMRFVRRAFSGTDISPRDYMSRITERIDFLKQKVYAWASRIRRYKRRVDRYTQNRTFQRDERWVYRTWERPDQGVADTRIPDDDAMCSFWRSIWSVPVSHTEGEWTREVERACDLVPEMGAITISPQDVVRAVRPLPNWKSPGPDGLHNFWIKWFTRSHARLAILFQSALESGSLPEFLTTGITHLLHKSGSTAEPKNYRPITCLPTVYKVLTSILRAKINKHIDDNSIMSASQNGCRNGSRGTKELLLIDMAISQQVRRSRRDLSTCWIDYKKAYDSVPHTWLMRVLELYKVDATLRTFLMSCMGQWRTVLRYSRCWQIQRNSEPIRIERGIFQGDSLSPLWFCLALNPLSTLLEDSGLGYQLRRGGQVISHLLYMDDLKLFAPNDLQLMELLKVTETFSSAIRMEFGVDKCAVMHVKRGEIVESVGTQLSDSINLRSLSTTETYKYLGMSEALGINVADMKQSLKERFFGRLKKVFNSLLSGGNKVRAFNGWVMPVLMYSFGILKWTQTELDALDRRVRTLLTAYRMHHPRSSVMRLYIPRKCGGRGFLNAKTLHNREICSLREYFLETDVGMHRDVVAMDKGLTPLSLAKENWRKPLVLDTNDRMEVWQSKELHGRFFRALHGPDVDLSASVAWLRSGDLFGETEGFVCAIMDEVMMTNNYRRFIVKDGTVDICRACHRPGESIRHIISGCSRLANGEYLHRHNLVARIIHQQLALKYNLVESEVPYYKYVPDPVLENGSITLYWDQSIITDRTIVANKPDIVVVDRSERRTMIVDITVPHDENLVKAEKDKKIKYLDLAREVVDMWDVDSAIIVPIVVSAHGLIAKSLDQYLRRLSLGSWIKGLIQKAVLLDTARIVRRFLSLEP

SEQ ID NO: 13175 - protein, 1200 aa, Noctua fimbriata
MKMLTRAAAKRARLSPPDPSLSSASPPPKSSPVVSAVTPAVAVASSSSDEYFSPPTTPPPVRRRGGRRPPDGLGPRGPPASDRVPAPGGSVQRMRWTQSINANVMRAYYGATEGGNNLTAYRVQMLSLFQVLEPAVNVSAQRLSDQVRVIQRNRMLDDTVLDRLRTEMQSSHVIATPPPQAVVPPQSTIIPNRDNDVSNDIVTNVSTQCNEEMRSALEGAIREYRFMQPDLRPRIPRLPMHNKNRALVAVLDSQLSNYFDNCEDLTDAHSILYCAAVAACRVAHVKFSDDRATRPKPAVPPWQYRIERRIGGARALIGKLICFREGNTRPRVMRFVRRAFSGTDISPRDYMSRITERIDFLKQKVYAWANRIRRYKRRVDRYTQNRTFQRDERWVYRAWERPDQGVADTRLPDDDAMCSFWRSIWSVPVSHTEGEWTQGVERACDLVPEMGAITISPQDVVRAVRPLPNWKSPGPDGLHNFWIKWFTRSHARLAILFQSALESGSLPEFLTTGITHLLHKSGSTAEPKNYRPITCLPTVYKVLTSILRAKINKHIDDNSIMSASQNGCRNGSRGTKELLLIDMAISQQVRRSRSDLSTCWIDYKKAYDSVPHTWLMRVLELYKVDATLRTFLMSCMGQWRTVLRYPGCWQIQRNSEPIRIERGIFQGDSLSPLWFCLALNPLSTLLEDSGLGYRLRRGGQVISHLLYMDDLKLFAPNDLQLMELLKVTETFSSAIRMEFGVDKCAVMHVKRGEIVESVGTQLSDSINLRSLSATETYKYLGMSEALGINVADMKQSLKERFFGRLKKVFNSLLSGGNKVRAFNGWVMPVLMYSFGILKWTQTELDALDRRVRTLLTAYRMHHPRSSVMRLYIPRKCGGRGFLNAKTLHNREICSLREYFLETDVGMHRDVVAVDKGLSPLSLAKENWRKPLVLDTNDRMEVWQSKELHGRFFRALHGPDVDLSASVAWLRSGDLFGETEGFVCAIMDEVMMTNNYRRFIVKDGTVDICRACHRPGESIRHIISGCSRLANGEYLHRHNLVARIIHQQLALKYNLVESEVPYYKYVPDPVLENGSITLYWDQSIITDRTIVANKPDIVVVDRSERRTMIVDITVPHDENLVKAEKDKKIKYLDLAREVVDMWDVDSAIIVPIVVSAHGLIAKSLDQYLRRLSLGSWIKGLIQKAVLLDTARIVRRILSLEP

SEQ ID NO: 13176 - protein, 1198 aa, Noctua fimbriata
MLTRAAAKRARLSPPDPSLSSASPPPESSPVMSAVTPAVAVASSSSDEYFSPPTTPPPVRRRGGRRPPDGLGPRGPPASDRVPAPGGSVQRMRWTQSINENVMRSYYGATEGGNNLTAYRVRMLSLFQVLEPAVNVSAQRLSDQVRVIQRNRMLDDTVLDRLRTEMQSSHVIATPPPQAVVSPQSTIIPNRDNDVSNDIVTNVSTQCNEEMRSALEGAIREYRFMQPDLRPRIPRLPMHNKNRALVAVLDSQLSNYFDNCEDLTDAHSILYCAAVAACRVAHVKFSNDRATRPKPAVPPWQYRIERRIGGARALIGKLICFREGNTRPRVMRFVRRAFSGTDISPRDYMSRITERIDFLKQKVYAWANRIRRYKRRVDRYTQNRTFQRDERWVYRAWERPDQGVADTRLPDDDAMCSFWRSIWSVPVSHTEGEWTQGVERACDLVPEMGAITISPQDVVRAVRPLPNWKSPGPDGLHNFWIKWFTRSHARLAILFQSALESGSLPEFLTTGITHLLHKSGSTAEPKNYRPITCLPTVYKVLTSILRAKINKHIDDNSIMSASQNGCRNGSRGTKELLLIDMAISQQVRRSRRDLSTCWIDYKKAYDSVPHTWLMRVLELYKVDATLRTFLMSCMGQWRTVLRYPGCRQIQRNSEPIRIERGIFQGDSLSPLWFCLALNPLSTLLEDSGLGYRLRRGGQVISHLLYMDDLKLFAPNDLQLMELLKVTETFSSAIRMEFGVDKCAVMHVKRGEIVESVGTQLSDSINLRSLSATETYKYLGMSEALGINVADMKQSLKERFFGRLKKVFNSLLSGGNKVRAFNGWVMPVLMYSFGILKWTQTELDALDRRVRTLLTAYRMHHPRSSIMRLYIPRKCGGRGFLNAKTLHNREICSLREYFLETDVGMHRDVVAVDKGLTPLSLAKENWRKPLVLDTNDRMEVWQSKELHGRFFRALHGPDVDLSASVAWLRSGDLFGETEGFVCAIMDEVMMTNNYRRFIVKDGTVDICRACHRPGESIRHIISGCSRLANGEYLHRHNLVARIIHQQLALKYNLVESEVPYYKYVPDPVLENGSITLYWDQSIITDRTIVANKPDIVVVDRSERRIMIVDITVPHDENLVKAEKDKKIKYLDLAREVVDMWDVDSAIIVPIVVSAHGLIAKSLDQYLRRLSLGSWIKGLIQKAVLLDTARIVRRFLSLEP

SEQ ID NO: 13177 - protein, 1190 aa, Noctua fimbriata
MLTRSAARRARLSPPDPSLSSASPPPESSPVVSAVTPAVAVASSSSDEYFSPPTTPPPVRRRGGRRPPDGLGPRGPPASDRVPAPGGSVQRMRWTQSINANVMRAYYGATEGGNNLTAYRVRMLSLFQVLEPAVNVSAQRLSDQVRVIQRNRMLDDTVLDRLRTEMQSSHVIATPPPQAVVPPQSTIIPNRDNDVSNDIVTNVSTQCNEEMRSALEGAIREYRFMQPDLRPRVPRLPMHNKNRALVAVLDSQLSNYFDNCEDLTDAHSILYCAAVKFYDDRATRPKPVVPPWQYRIERRIGGARAFIGKLICFREGNTRPRVMRFVRRAFSGTDISPRDYMSRITERIDFLKQKVYAWASRIRRYKRRVDRYTQNRTFQRDERWVYRAWERPDQGVADTRIPDDDAMCSFWRSIWSVPVSHTEGEWTREVERACDLVPEMGAITISPQDVVRAVRPLPNWKSPGPDGLHNFWIKWFTRSHARLAILFQSALESGSLPEFLTTGITHLLHKSGSTAEPKNYRPITCLPTVYKVLTSILRAKINKHIDDNSIMSASQNGCRNGSRGTKELLLIDMAISQQVRRSRSDLSTCWIDYKKAYDSVPHTWLMRVLELYKVDATLRTFLMSCMGQWRTVLRYPGCRQIQRNSEPIRIERGIFQGDSLSPLWFCLALNPLSTLLEDSGLGYRLRRGGQVISHLLYMDDLKLFAPNDLQLMELLKVTETFSSAIRMEFGVDKCAVMHVKRGEIVESVGTQLSDSINLRSLSATETYKYLGMSEALGINVADMKQSLKERFFGRLKKVFNSLLSGGNKVRAFNGWVMPVLMYSFGILKWTQTELDALDRRVRTLLTAYRMHHPRSSVMRLYIPRKCGGRGFLNAKTLHNREICSLREYFLETDVGMHRDVVAVDKGLTPLSLAKENWRKPLVLDTNDRMEVWQSKELHGRFFRALHGPDVDLSASVAWLRCGDLFGETEGFVCAIMDEVMMTNNYRRFIVKDGTVDICRACHRPGESIRHIISGCSRLANGEYLHRHNLVARIIHQQLALKYNLVESEVPYYKYVPDPVLENGSITLYWDQSIITDRTIVANKPDIVVVDRSERRTMIVDITVPHDENLVKAEKDKKIKYLDLAREVVDMWDVDSAIIVPIVVSAHGLIAKSLDQYLRRLSLGSWIKGLIQKAVLLDMARIVRRFLSLEP

SEQ ID NO: 13178 - protein, 961 aa, Noctua fimbriata
MHNKNRALVAVLDSQLSNYFDNCEDLTDAHSILYCAAVAACRVAHVKFYDDRATRPKPVVPPWQYRIERRIGGARALIGKLICFREGNTRPRVMRFVRRAFSGTDISPRDYMSRITERIDFLKQKVYAWASRIRRYKRRVDRYTQNRTFQRDERWVYRAWERPDQGVADTRIPDDDAMCSFWRSIWSVPVSHTEGEWTREVERACDLVPEMGAITISPQDVVRAVRPLPNWKSPGPDGLHNFWIKWFTRSHARLAILFQSALESGSLPEFLTTGITHLLHKSGSTAEPKNYRPITCLPTVYKVLTSILRAKMNKHIDDNSIMSVSQNGCRNGSRGTKELLLIDMAISQQVRRSRSDLSTCWIDYKKAYDSVPHTWLMRVLELYKVDATLRTFLMSCMGQWRTVLRYPGCRQIQRNSEPIRIERGIFQGDSLSPLWFCLALNPLSTLLEDSGLGYRLRRGGQVISHLLYMDDLKLFAPNDLQLMELLKVTETFSSAIRMEFGVDKCAVMHVKRGEIVESVGTQLSDSINLRSLSATETYKYLGMSEALGINVADMKQSLKERFFGRLKKVFNSLLSGGNKVRAFNGWVMPVLMYSFGILKWTQTELDALDRRVRTLLTAYRMHHPRSSVMRLYIPRKCGGRGFLNAKTLHNREICSLREYSLETDVGMHRDVVAVDKGLTPLSLAKENWRKPLVLDTNDRMEVWQSKELHGRFFRALHGPDVDLSASVAWLRCGDLFGETEGFVCAIMDEVMMTNNYRRFIVKDGTVDICRACHRPGESIRHIISGCSRLANGEYLHRHNLVARIIHQQLALKYNLVESEVPYYKYVPDPVLENGSITLYWDQSIITDRTIVANKPDIVVVDRSERRTMIVDITVPHDENLVKAEKDKKIKYLDLAREVVDMWDVDSAIIVPIVVSAHGLIAKSLDQYLRRLSLGSWIKGLIQKAVLLDTARIVRRFLSLEP

SEQ ID NO: 13179 - protein, 1198 aa, Noctua fimbriata
MLTRSATRRARLSPPDPSLSSASPPPESSPVVSAVTPAVAVASSSSDEYFSPPTTPPPVRRRGGRRPPDGLGPRGPPASDRVPAPGGSVQRMRWTQSINANVMRAYYGATEGGNNLTAYRVRMLSLFQVLEPAVNVSAQRLSDQVRVIQRNRMLDDTVLDRLRTEMQSSHVIATPPPQAVVPPQSTIIPNRDNDVSNDIVTNVSTQCSEEMRSALEGAIREYRFMQPDLRPRIPRLPMHNKNRTLVAVLDSQLSNYFDNCEDLTDAHSILYCAAVAACRVAHVKFSDDRATRPKPAVPPWQYRIERRIGGARALIGKLICFREGNTRPRVMRFVRRAFSGTDISPRDYMSRITERIDFLKQKVYAWANRIRRYKRRVDRYTQNRTFQRDERWVYRAWERPDQGVADTRLPDDDAMCSFWRSIWSVPVSHTEGEWTQGVERACDLVPEMGAITISPQDVVRAVRPLPNWKSPGPDGLHNFWIKWFTRSHARLAILFQSALESGSLPEFLTTGITHLLHKSGSTAEPKNYRPITCLPTVYKVLTSILRAKINKHIDDNSIMSASQNGCRNGSRGTKELLLIDMAICQQVRRSRSDLSTCWIDYKKAYDSVPHTWLMRVLELYKVDATLRTFLMSCMGQWRTVLRYPGCRQIQRNSEPIRIERGIFQGDSLSPLWFCLALNPLSTLLEDSGLGYRLRRGGQVISHLLYMDDLKLFAPNDLQLMELLKVTETFSSAIRMEFGVDKCAVMHVKRGEIVESVGTQLSDSINLRSLSATETYKYLGMSEALGINVADMKQSLKERFFGRLKKVFNSLLSGGNKVRAFNGWVMPVLMYSFGILKWTQTELDALDRRVRTLLTAYRMHHPRSSVMRLYIPRKCGGRGFLNAKTLHNREICSLREYFLETDVGMHRDVVAVDKGLTPLSLAKENWRKPVVFDTNYRMEVWQSKELHGRFFRALHGPDVDLSASVAWLRSGDLFGETEGFVCAIMDEVMMTNNYRRFIVKDGTVDICRACHRPGESIRHIISGCSRLANGEYLHRHNLVARIIHQQLALKYNLVELEVPYYKYVPDPVLENGSITLYWDQSIITDRTIVANKPDIVVVDRSERRTMIVDITVPHDENLVKAEKDKKIKYLDLAREVVDMWDVDSAIIVPIVVSAHGLIAKSLDQYLRRLSLGSWIKGLIQKAVLLDTARIVRRFLSLEP

SEQ ID NO: 13180 - protein, 1106 aa, Noctua fimbriata
MRWTQSINANVMRAYYGATEGGNNLTAYRVRMLSLFQVLEPAVNVSAQRLSDQVRVIQRNRMLDDTVLDRLRTEMQSSHVIATPPPQAVVPPQSTIIPNRDNDVSNDIVTNVSTQCNEEMRSALEGAIREYRFMQPDLRPRIPRLPMHNKNRALVAVLDSQLSNYFDNCEDLRSHSILYCAAVAACRVAHVKFSDDRATRPKPAVPPWQYRIERRIGGARALIGKLICFREGNTRPRVMRFVRRAFSGTDISPRDYMSRITERIDFLKQKVYAWANRIRRYKQRVDRYTQNRTFQRDERWVYRAWERPDQGVADTRIPDDDAMCSFWRSIWSVPVSHTEGEWTQGVERACDLVPEMGAITISPQDVVRAVRPLPNWKSPGPDGLHNFWIKWFTRSHARLAILFQSALESGSLPEFLTTGITHLLHKSGSTAEPKNYRPITCLPTVYKVLTSILRAKINKHIDDNSIMSASQNGCRNGSRGTKELLLIDMAISQQVRRSRSDLSTCWIDYKKAYDSVPHTWLMRVLELYKVDATLRTFLMSCMGQWRTVLRYPGCRQIQRNSEPIRIVRGIFQGDSLSPLWFCLALNPLSTLLEDSGLGYRLRRGGQVISHLLYMDDLKLFAPNDLQLMELLKVTETFSSAIRMEFGVDKCAVMHVKRGEIVESVGTQLSDSINLRSLSATETYKYLGMSEALGINVADMKQSLKERFFGRLKKVFNSLLSGGNKVRAFNGWVMPVLMYSFGILKWTQTELDALDRRVRTLLTAYRMHHQRSSVMRLYIPRKCGGRGFLNAKTLHNREICSLREYFLETDVGMHRDVVAVDKGLTPLSLAKENWRKPLVLDTNDRMEVWQSKELHGRFFRALHGPDVDLSASVAWLRSGDLFGETEGFVCAIMDEVMMTNNYRRFIVKDGTVDICRACHRPGESIRHIISGCSRLANGEYLHRHNLVARIIHQQLALKYNLVESEVPYYKYVPDPVLENGSITLYWDQSIITDRTIVANKPDIVVVDRSERRTMIVDITVPHDENLVKAEKDKKIKYLDLAREVVDMWDVDSAIIVPIVVSAHGLIAKSLDQYLRRLSLGSWIKGLIQKAVLLDTARIVRRFLSLEP

SEQ ID NO: 13181 - protein, 1194 aa, Atethmia centrago
MLTRSAARARLPPPDFSLSSASPPPVPNPTVTSPAAVVASSSSDEYFSPPTTPPPVRRRGGHRPPDGLGSRGPPASDRVPAPGGSVQRMRWTRSINENVMRSYYGATEGGNNLTAYRVRMLSLFQVLEPAVNVSAQRLSDQVRVIQRNHMLDDTVLDRLRSETQSGHAIAPPSQTVVVSTQLRTNQADKGSDDRATNVSTQYNVELRSALEDAIREYRFMSPELRPRLPRLPMHKKNRALVAALDSQLSNYFDDCEDLTDTHSILYCAAVAVCRVAHVKFAKDSRATRPKPTVPAWQRRIERRIGGARALIGKLICFREGNTRPRVMRFVRRAFSGTDIGPQDYMSRVTERIDFLKQKVYAWANRIRRYKRRVERYTQNRTFQSDERWVYRGWERPDQGVTGTRLPDDDVMCSFWRSIWSVPVSHTEGDWVREVERACDPIPEMGAITISPQDVARAVRPLPNWKSPGPDGLHNFWLKWFLRSHARLAAQYQTALESGSLPQFLTTGVTHLLHKSGSTAEPKNYRPITCLPTVYKVLTSILRAKINEHIDTNSIMSASQNGCRNGSRGTKELLLIDITITQQVRHSRKDLATCWIDYKKAYDSVPHTWLMRVLELYKVDATLRTFLMSCMGQWRTVLRYPGCRNIQRNSEPIRIERGIFQGDSLSPLWFCLALNPLSTLLEDSGLGYRLRRGSQAISHLLYMDDLKLFASNNLQLMELLKITETFSSAIRMEFGVDKCAVMHVKRGKIMESVGTQLSDSINLRALSASETYKYLGMSEALGINVTDMKQSLKERFFGRLKKVFNSLLSGGNKVRAFNGWVMPVLMYSFGILKWTQTELDALDRRVRTLLTAYRMHHPRSSVMRLYIPRKCGGRGFLNAKTLHNREVCSLREYFLKADVGMHRDVVAVDKGLTPLSLAKENWRKLVVLDTNDRREVWQSKELHGRFFRALHEPDVDFQASVAWLRFGDLFGETEGFVCAIMDEVIMTKNYRRFIVKDGTVDVCRACQRPGESIRHIISGCSRLANEEYLHRHNLVARIIHQQLALKYNLVESEVPYYRYVPDPVLENGNITLYWDRSIITDGTIIANKPDIVVVDRTERRAMIVDITVPHDGNLVKAEKDKQIKYLDLAREVVDMWDVNSAIIVPIVISANGLIAKSLDQHLRRLSLDSWIKGLIQRAVLLDTARIVRRFLSLEP

SEQ ID NO: 13182 - protein, 1100 aa, Atethmia centrago
MRTSCAHTMGATEGGNNLTAYRVRMLSLFQVLEPAVNVSAQRLSDQVRVIQRNHMLDDTVLDRLRSEMQRSHVIVPPSQTVVHSPQLSTNQADEGSDDRATNVSTQCNVELRSALEDAIREYRLMSPELRPRLPRLPMHKKNRALVAALDSQLSNYFDDCEDLTDTHSILYCAAVAVCRVAHVKFAKDSRTTRPKPTVPAWQCRIESRIGGARALIGKLICFREGNTRPRVMRFVRRAFSGTDIGPQDYMTRVTERIDFLKQKVYAWANRIRRYKRRVERYTQNRTFQSDERWVYRGWERPDQDVTDTRLPHDDVMCSFWRSIWSVPVSHTEGDWARKVERACDPIPEMGAITICPQDVARAVRPLPNWKSPGPDGLHNFWLKWFLRSHARLAAQYQTALESGSLPQFLTTGVVTHLLHKSGSTAEPKNYRPITCLPTVYKLLTSILRAKINKHIDTNSIMSASQNGCRNGSRGTKELLLIDMTISQQVRRSRKDLSTCWIDYKKAYDSVPHTWLMRVLELYKVDATLRTFLISCMGQWRTVLRYPGCRNIQRNSEPIRIERGIFQGDSLSPLWFCLALNPLSTLLEGSGLGYRMRRGGQVISHLLYMDDLKLFASNNLQLMELLKITESFSSAIRMEFGVDKCAVMHVKRGKIVESVGTQLSDSINLRTLSASETYKYLGMSEALGINVTDMKQSLKERFFGRLKKVFNSLLSGGNKVRAFNGWVMPILMYSFGILKWTQIELDALDRRVRTLLTAYRMHHPRSSVMRLYIPRKCGGRGFLNAKTLHNREVCSLREYFLEADVGMHRDVVAVDKGLTPLSLAKENWRKLVVLDTNDRREVWQSKELHGRFFRALHEPDVDFQASVAWLRFGDLFGETEGFVCAIMDEVIMTKNYRRFIVKDGTVDVCRACHRPGESIRHIISGCSRLANEEYLHRHNLVARIIHQQLALKYSLVESEVPYYRYVPDPVLDNGNITLYWDRSIITDRTIVANKPDIVVVDRTERRAMIVDITVPHDGNLVKAEKDKQIKYLDLAREVVDMWDVDSAIIVPIVVSANGLVAKSLDQHLKRLTLDGWIKGLIQKAVLLDTARIVRRFLSLEP

SEQ ID NO: 13183 - protein, 1107 aa, Autographa gamma
MKWTLSINENVMRAYYGATEGGTNLTAYRARMLSLFQGLEPDVNVSAQRLSDQVRVIQRNHRLDDATLDRLRSEVQRSPATSAPSPAVVPVTGSPPTNLVDGEEEDGAITVSTQCSENIRSTLEDTIREFRSTPPDIRPRLPRLPMHNRNKAIMGVLDSLLLAYFGSSEDLSDTHSILYCAALAACRVANVKINNQNLDTRPKPAVPAWQCRIERRVAEARALIGKLIAFKDGNSRPRVMRFVRRAFTGTSISPSEYTARVTERIDFFKQKVCAWANRIRRYKRRVDRFHLNRMFQRDQRWVFRTWERPVLGVDDGRLPDEDATNSFWRNIWSVPVSHSEGDWMRDVEESCEPIQEMGAITISPQDVANAIRPMSNWKAPGPDGLQNFWLKWFKSSHGCLASQFQCAIESESLPQFFTTGSTHLLHKTGSTTDPKNYRPITCLPTIYKLLTSILRVKINEHIDSNSIMSASQNGCRNGSRGTKELLLIDMAICQQVRRSKKNLSTCWIDYKKAYDSVPHSWLMRVLELYKINTTLRAFLLSCMRRWTTVLRYPGCRDIQQSGGPIRIERGIFQGDSLSPLWFCLALNPLSTLLENSRLGYSLRRGSQVISHLLYMDDLKLFASNELQLMGLLKITESFSNSIRMEFGVDKCAVMHVKQGGIVESQGIQLSDSINLRSLSAADTYKYLGMSEALGINVADMKQSLLTRFFGRLNKVLKSLLSGGNRVRAFNGWVMPVLMYSFGILKWTQTELDALDRRVRTLLTANRMHHPRSSVMRLYIPRKCGGRGFLNAKTLHNREVCNLREYFLQVDVGMHRDVVVVDKGFTPLSLGKENWHKPVVLSVKDRKDVWQSKELHGRYYRSLHGPDVDFLASVAWLRFGDLFGETEGFVCAIMDEVVMTNNYRKYIIKDGTVDICRACHCPGESIRHIISGCSRLANGEYLHRHNQVARIIHQQLALRYKLVEAEVPYYRYVPDPVLDNGHVTLYWDRSIITDRTIVANKPDIVVIDRSERRAMIVDVTIPHDENLVKAEKEKQLKYLDLAHEVVDMWEVDSAVIVPIVVTANGIIAKSLDQHLKRLSLGIWVKGLMQKAVLLDTARIVRRFLSLEP

SEQ ID NO: 13184 - protein, 1198 aa, Mesoligia furuncula
MLTRLAAKRARLLPPDSSLSSASPPPVPSPTVSAVMTPAAAVASSSSDEYFSPPTTPPPARRRRGRRPPDCLGLRGPPASDRVPAPGGSVQRMRWTQSINENVMRSYYGATEGGNILTAYRVRMLSLFQVLEPAVNVSAQRLSDQVRVIQRNHMLDDTVLDRLRSEMQSSHVIAPQSQTAVILPQPNISHADEGSNDRAIHVSTQCNEELRSALEDAIQEYRFMSPELRPRLPRLPMHNKNRALVAALDSQLSKYFDTCEDLIDTHSILYCAAVAACRVAHVKFANDSRATRPKQAVPAWQCRIERRIGGARTLIGKLICFREGNTRPRVMRFVRRAFSGTDISPQDYMSCVTERIDFLKQKVYAWANRIRRYRRRVERYTQNRTFQSDERWVYRGWERPDQGVAETCLPDDDAMCSFWRNIWSVPVSHTEGDWAREVERACDLIPEMGAITICPQDVARAVRPLPNWKSPGPDGLHNFWIKWFPGSHARLASQFQTALKSGSLPQFLTTGITHLLHKSGSTAEPKNYRPITCLPTVYKVLTSILRTKINKHIDTNSIMSASQNGCRNGSRGTKELLLIDMAISQQVRRFRKDLSTCWIDYKKAYDSVPHTWLMRVLELYKVDTTLRTFLMSCMGQWRTVLRYPGCRNIQRNSEPIRIERGIFQGDSLSPLWFCLALNPLSTLLEDSGLGYRLRRGGQVISHLLYMDDLKLFAPNNFQLMELLKITETFSSAIRMEFGVDKCAVMHVKRGEIVESVGTQLSDSTNLRALSASETYKYLGMSEALGINVTDMKQSVKERFFGRLKKVLNSLLSGGNKVRAFNGWVMPVLMYSFGILKWTQTELDALDRRVRTLLTANRMHHPRSSVMRLYIPRKCGGRGFLNAKTLHNRKICSLREYFLETDVGMHRDVVIVDKGLTPLSLAKENWRKPVVLDTKDRMEVWQSKELHGRFLRALRGPDVDLQASVAWLRFGNLFGETEGFVCAIMDEVMMTNNYRRFIVKDGTVDICRACHRPGESIRHIISGCSRLANGEYLHRHNLVARIIHQQLALKYNLVESEVPYYRYVPDPVLENGNITLYWDRSIITDRTIVANKPDIVVVDRSERRAMIVDITVPHDENLVKAEKDKQIKYLDLAREVVDMWDVDTAIIVPIVVTANGLIAKSLDQHLRRLSLGSWIKGLIQRAVLLDTARIVRRFLSLEP

SEQ ID NO: 13185 - protein, 1198 aa, Mesoligia furuncula
MLTRSALRKARLPPPDSSLSSASPPPVPSLTVSAVTTPAVAVASSSSDEYFSPPTTPPPARRRGGRRPPDGLGPRGPPASDRVPAPGGSVQRMRWTRSINENVMRSYYGATEGGNNLTAYRVRMLSLFQVLEPAVNVSAQRLSDQVRVIQRNHMLDDTVLDRLRSEMQSSHVIAPQPQTAVLLPQCNTIHADEGSNDRATNVSTQCNEELRSALEDAIREYRFMSPEHRPRLPRLPMHNKNRALVAALDSQLSNYFDDCEDLTDTHSILYCAAVAACRVAHVKFANDSRTTRPKPAIPAWQCRIERRIGGARALIGKLICFREGNTRPRVMRFVRRAFLGTDISPQDYMSCVTERIDFLKQKVYAWANRIRRYKRRVERYTQNRTFQSDERWVYRGWERPDQSVADTCLPDDEAMCSFWRSIWSVPVSHTEGDWAWEVERACDPIPEMGAITICPQDVARAVRPLPNWKSPGPDGLHNFWIKWFLRSHARLASQFQTALESGSLPQFLTTGITHLLHKSGSTAEPKNYRPITCLPTVYKVLTSILRAKIDNHINTNSIMSVSQNGCKNGSRGTKELLLIDMAISQQVRRSRKDLSTCWIDYKKAYDSVPHTWLMRVLELYKVDATLRTFLMSCMGQWRTVLRYPGCRNIQRNSEPIRIERGIFQGDSLSPLWFCLALNPLSTLLEDSGLGYRLRRGGQVISHLLYMDDLKLFAPNNLQLMELLKVTQTFSSAIRMEFGVDKCAVMHVKRGEIVESVGTQLSDSTNLRALSASETYKYLGMSEALGINVTDMKQSLKERFFGRLKKVLNSLLSGGNKVRAFNGWVMPVLMYSFGILKWTQTELDALDRRVRMLLTANRMHHPRSSVMRLYIPRKCGGRGFLNAKTLHNREICSLREYFLETDVGMHRDVVAVDKGLTPLSLAKENWRKPVVLDTNDRMEVWQSKELHGRFFRALHGPDVDLLASVAWLRFGDLFGETEGFVCAIMDEVMMTNNYRRFIVKDGTVDICRACHRPGESIRHITSGCSRLANGEYLHRHNLVARIIHQQLALKYSLVESEVPYYRYVPDPVLENGNISLYWDRSIITDRTIFANKPDIVVMDRSERRAMIVDITVPHDENLVKAEKDKQIKYLDLAREVVDMWDVDSAIIVPIVVTANGLIAKSLDQHLKRLSLGSWIKGLIQKAVLLDTARIVRRFLSLEP

SEQ ID NO: 13186 - protein, 1198 aa, Mesoligia furuncula
MLTRLAAKRARLPPPDSSLSSASPPPVPSPTVSAVMTPAAAVASSSSDEYFSPPTTPPPARRRRGRRPPDGLGLRGPPASDRVPAPGGSVQRMRWTQSINENVMRSYYGATEGGNILTAYRVRMLSLFQVLEPAVNVSAQRLSDQVRVIQRNHMLDDTVLDRLRSEMQSSHVIAPQSQTAVILPQPNISHADEGSNDRAINVSTQCNEELRSALEDAIQEYRFMSPELRPRLPRLPMHNKNRALVAALDSQLSKYFDTCEDLIDTHSILYCAAVAACRVAHVKFANDSRATRPKQAVPAWQCRIERRIGGARTLIGKLICFREGNTRPRVMRFVRRAFSGTDISPQDYMSCVTERIDFLKQKVYAWANRIRRYRRRVERYTQNRTFQSDERWVYRGWERPDQGVAETCLPDDDAMCSFWRNIWSVPVSHTEGDWAREVERACDPIPEMGAITICPQDVARAVRPLPNWKSPGPDGLHNFWIKWFPRSHALLASQFQTALKSGSLPQFLTTGITHLLHKSGSTAEPKNYRPITCLPTVYKVLTSILRTKINKHIDTNSIMSASQNGCRNGSRGTKELLLIDMAISQQVRRFRKDLSTCWIDYKKAYDSVPHTWLMRVLELYKVDTTLRTFLMSCMGQWRTVLRYPGCRNIQRNSEPIRIERGIFQGDSLSPLWFCLALNPLSTLLEDSGLGYRLRRGGQVISHLLYMDDLKLFAPNNLQLMELLKITETFSSAIRMEFGVDKCAVMHVKRGDIVESVGTQLSDSTNLRALSASETYKYLGMSEALGINVTDMKQSVKERFFGRLKKVLNSLLSGGNKVRAFNGWVMPVLMYSFGILKWTQTELDALDRRVRTLLTANRMHHPRSSVMRLYIPRKCGGRGFLNAKTLHNREICSLREYFLETDVGMHRDVVIVDKGLTPLSLAKENWRKPVVLDTNDRMEVWQSKELHGRFLRALRGPDVDLQASVAWLRFGNLFGETEGFVCAIMDEVMMTNNYRRFIVKDGTVDICRACHRPGESIRHIISGCSRLANGEYLHRHNLVARIIHQQLALKYNLVESEVPYYRYVPDPVLENGNITLYWDRSIITDRTIVANKPDIVVVDRSERRAMIVDITVPHDENLVKAEKDKQIKYLDLAREVVDMWDVDTAIIVPIVVTANGLIAKSLDQHLRRLSLGSWIKGLIQRAVLLDTARIVRRFLSLEP

SEQ ID NO: 13187 - protein, 962 aa, Mesoligia furuncula
MHKKNKALVCALDSQLSNCFNNSKDLTDTHSILYCAAVAACRVAHVKFPNSDRAPRPKLAVPAWQCRIECRIGEARALIGKLICFREGNTRPRVMRFVRRAFSGTDISSRDYLSRVTERIDFLKQKIYAWANRIRRYRRRVERYTQNRTFQNDERWVYRAWERPDQGVTDTRLPDDDAMCSFWRNIWSVPVSHTEGDWTAKIERACDLIPEMGVLTISPQDVARAVRPLPNWKSPGPDGLHNFWIKWFQGSHARLASQFQSALESGSLPQFLTTGITHLLHKSGSTADPKNYRPITCLPTVYKVLTSILRAKINKHIDTNSIMSVSQNGCGNGSRGTKELLLIDMTISQQVRRFRKDLSTCWIDYKKAYDSVPHTWLMRVLELYKVDTTLRTFLMSCMGQWRTVLRYPGCRNIQRNSEPIRIERGIFQGDSLSPLWFCLALNPLSTLLEDSGLGYRLRRGGQVISHLLYMDDLKLFAPNNLRLMELLKITETFSSAIRMEFGVDKCAVMHVKRGEIVESVGTQLSDSTNLRALSASETYKYLGMSEALGINATDMKQSLKERFFGRLKKVFNSLLSGGNKVRAFNGWVMPVLMYSFGILKWTQTELDALDRKVRTLLTANRMHHPRSSVMRLYIPRKCGGRGFLNAKTLHNREICSLRDYFLETDVGMHRDVVAVDKGLTPLSLGKENWRKPVVLDTNDRMEVWQSKELHGRFFRALHGPDVDLIASVAWLRFGDLFGETEGFVCAIMDEVMMTNNYRRFIVKDGTVDICRACHRPGESIRHIISGCSRLANGEYLHRHNLVARIIHQQLALKYSLVESEVPYYRYVPDPVLENGNITLYWDRSIITDRTIVANKPDIVMVDRSERRAMIVDITVPHDENLVKAEKDKQVKYLDLAREVVDMWDVDSAIIVPIVVTVNGLIAKSLDQHLKRLSLGSWIKGLIQKAVLLDTARIVRRFLSLEP

SEQ ID NO: 13188 - protein, 1198 aa, Mesoligia furuncula
MLTRSALRKARLPPPDSSLSSASPPPVPSLTVSAVTTPAVAVASSSSDEYFSPPTTPPPARRRGGRRPPDGLGPRGPPASDRVPAPGGSVQRMRWTRSINENVMRSYYGATEGGNNLTAYRVRMLSLFQVLEPAVNVSAQRLSDQVRVIQRNHMLDDTVLDRLRNEMQSSHVIAPQPQTAVLLPQCNTNHADEGSNDRATNVSTQCNEELRSALEDAIREYRFMSPEHRPRLPRLPMHNKNRALVAALDSQLSNYFDDCEDLTDTHSILYCAAVAVCRVAHVKFANDSRATRPKPAIPAWQCRIERRIGGARALIGKLICFREGNTRPRVMRFVRRAFLGTDISPQDYMSCVTERIDFLKQKVYAWANRIRRYKRRVERYTQNRTFQSDERWVYRSWERPDQSVADTCLPDDEAMCSFWRNIWSVPVSHTEGDWAREVERACDPIPEMGAITICPQDVARAVRPLPNWKSPGPDGLHNFWIKWFLRSHARLASQFQTALESGSLPQFLTTGITHLLHKSGSTTEPKNYRPITCLPTVYKVLTSILRAKIDKHINTNSIMSVSQNGCKNGSRGTKELLLIDMAISQQVRRSRKDLSTCWIDYKKAYDSVPQTWLMRVLELYKIDATLRTFLMSCMGQWRTVLRYPGCRNIQRNSEPIRIERGIFQGDSLSPLWFCLALNPLSTLLEDSGLGYRLRRGGQVISHLLYMDDLKLFAPNNLQLMELLKVTQTFSSAIRMEFGVDKCAVMHVKRGEIVESVGTQLSDSTNLRALSASETYKYLGMSEALGINVTDMKQSLKERFFGRLKKLLNSLLSGGNKVRAFNGWVMPVLMYSFGILKWTQTELDALDRRVRTLLTANRMHHPRSSVMRLYIPRKCGGRGFLNAKTLHNREICSLREYFLETDVGTHRDVVAVDKGLTPLSLAKENWRKPVVLDTNDRMEVWQSKELHGRFFRALHGPDVDLLASVAWLRFGDLFGETEGFVCAIMDEVMMTNNYRRFIVKDGTVDICRACHRPGESIRHIISGCSRLANGEYLHRHNLVARIIHQQLALKYRGVESEVPYYRYVPDPVLENGNISLYWDRSIITDRTIVANKPDIVVVDRSERRAMIVDITVPHDENLVKAEKDKQIKYLDLAREVVDMWDVDSAIIVPIVVTANGLIAKSLDQHLRRLSLGSWIKGLIQKAVLLDTARIVRRFLSLEP

SEQ ID NO: 13189 - protein, 902 aa, Spilarctia lutea
MPAWQYRIERRIAVTRTLIGKLIAFKSGNTRPRVMRFVKQAFLGTTISPQQYMSSVTERIDFLKQKVCAWANRIRRYKKRVDRFNQNRMFQTNEKWVYRKWEAPNPCDRDGHLPDENATNTFWRNIWSVPVTHTDGDWMRDVKRSCESITNMKPVSIDREDVSCAVRSLPNWKAPGPDGLHNFWLKWFRSSHACLASQFQAALDSGSLPQFLTTGTTHLLYKSGSTMDPKNFRPITCLPTLYKLLTSILRLKITTHINHNSIFSISQNGCRSGTRGTKELLIIDMTISQQVRRNRKSLATCWIDYKKAYDSVPHTWLLKVLELYKIDTTLCTFLKSCMGQWRTVLRYPGCRQSAMNDVLIKIERGIFQGDSLSPLWFCLALNPLSTLLEGSELGYGLRKDDRVISHLLYMDDLKLLAPTKLQLTALLKITENFSNSIKMEFGVDKCAVMYVKKGLIVESEGVELSDSTKLRSLSATESYKYLGFSQSLGMPESDMKQALRERFFGRLKKVLKSLLSGGNKVRAYNGWVMPVLMYSFGILRWTQTELDALDRRVRTLLTAFRMHHPRSSVMRLYIPRKLGGRGLLNIKTLHNREIYNLREYFLHTDVGMHRSVVAVDTGLTPLALAKENWRKPVVLSTDDRREVWKGKELHGRFYRALHGPDIDFKTSTSWLRYGDLFGETEGFVCAIMDEVIMTNNYRKYILKDGTVDICRACHRPGESIRHIISGCSRLANGEYLHRHNQVARIVHQQLALKYHLVNSEVPYYRYVPDPVLENGRATLYWDRSIITDRTIVANKPDIVVIDRLERRAIIIDIAVPHDENLVKVEKEKQIKYLDLSHEIVDMWNVDSVIIVPIVVSAHGLIAKSLDQHLKRLTLEGWIKSLIQKAVLLDTARIVRRFLSLEP

SEQ ID NO: 13190 - protein, 1186 aa, Spilarctia lutea
MLTRARRRAQLSPPDSSLRSALPSPEEAIEVPAGAEASSSSSSDEFFSPPTSPIPVRRQGRGRPPTSLGSRGLLTSNRAPAAGGDVRRMKWTHSINENVMRAYFRATELGTNLTAYRVRLVSLFQELEPAVNVSAQRLSDQVRAIQRCHLLDDAALERIRSDIRNSLTVPSSSHVLNVVTNSTPQVPQNDDISELVDSEIISVSTQYNDRIRSTLEDAIREYRYVNLNNRPRLPRLPIHKRNLALVSALDSLLPKYFSNSEDLSDTHSILYCAAIAVCRVAGVKFAEYTTTTRQENTLPAWQYRIERRIAEARTLIGKLMSFRSGNTRPRVMRFVKRAFLGTTISPQVYMSCVTERIDFLKQKVYAWANRIRRYRKRVDRYNQNRMFLRNEKWVYRKWENLSPCMSDGQVPDENATNTEGDWYRDVERSCESLLPMEPISIDEEDVSCAVRSLPNWKAPGPDGLHNFWLKWFRSSHACLASQFQTALDSGSLPQFLITGITHLLYKSGDAMDPKNFRPITCLPTLYKLLTSILRLKITTHINHNSILSISQNGCRSGTRGTKELLIIDMTISQQVRRNRKSLATCWIDYKKAFDSVPHTWLLKVLELYKIDTTLCTFLKVCMGQWRTALRYPGCRQSAMNDVLIKIERGIFQGDSLSPLWFCLALNPLSTLLEGSGLGYRFQKDDRVISHLFYMDDLKLLAPTKLQLTALLKVTENFSNSIKMEFGVDKCAVMYVKKGEIVESEGIELSDSTKLRSLSATETYKYLGFSQSLGMPESDMKQTLRERFFSRLKKVLKSLLSGGNKVRACNGWVMPVLMYSFGVLRWTQTELDAIDRRVRTLLTAFRMHHPRSSVMRLYIPRRLGGRGLLNIKTLHNREVYNLREYFLQTDVGVHRSVVTVDTGLTPLALAKENWRKPVVLSTNDRREVWKGKVLHGRFYRALNGPDIDFKASTSWLRYSDLFGETEGFVCAIMDEVIMTNNYRKYILKDGTVDICRACHRPGESIRHIISGCSRLANGEYLHRHNQVARIVHQQLALKYNLVISEVPYYRYVPDPVLENGRATLYWDRSIITDRTIVANKPDIVVIDRLERRAMIVDIAVPHDENLVKVEKEKQIKYLDLSHEIVDMWNVDSVIIVPIVVSAHGLIAKSLDQHLKRLTLGGWIKGLIQKAVLLDTARIVRRFLSLEP

SEQ ID NO: 13191 - protein, 1198 aa, Xestia c-nigrum
MLTRAAARRARLPPPDPSLSSASPPPEPSPIVSAVTPAVAVASSSSDEYFSPPTTPPPVRRRGGRRPPDGLGPRGPPASDRVPAPGGSVQRMRWTQSNNENVMRAYYGATEGGNNLTAYRVRMLSLFQVLEPAVNVSAQRLSDQVRVIQRNRMLDDTVLDRLRTEMHSSHVIATPPSQAVVPPQSTTITNRDDDVSSDMITNVGTQYSEDMRSALEGAIREYRFMTPELRPRLPRLPMHNKNRMLVAVLDSQLSNYFDNCEDLTDVHSVLYCAAVAACRVARVKFPDDRATRPKPAVPAWQYRIEQRIGGARALIGKLICFKEGNTRPRVMRFVRRAFSGTDINPRDYMSRVTERIDFLKQKVYAWASRIRRYKRRVDRYAQNRTFQRDERWVYRAWERPDQGVSDTRLPDDDAMCSFWRSIWSVPVSHAEGEWTRVVERACDPVSEMGAITISPQDVACAVRPLPNWKSPGPDGLHNFWIKWFTRSHARLATLFQSALESGSLPEFLTTGITHLLHKSGSTAEPKNYRPITCLPTVYKVLTSILRAKITKHIDENSVMSASQNGCRNGSRGTKELLLIDMAISQQVRRSRKDLSTCWIDYKKAYDSVPHTWLMRVLELYKVDATLRTFLMSCMGQWRTVLRYPGCRQIQRNSEPIRIERGIFQGDSLSPLWFCLALNPLSTLLEDSGLGYQLRKDGRVISHLLYMDDLKLFAPNDFQLMELLKVTETFSSAIRMEFGVDKCAVMHVKRGEIVESVGTQLSDSINLRSLSATETYKYLGMSEALGINVADMKQSLKERFFGRLKKVFNSLLSGGNKVRAFNGWVMPVLMYSFGILKWTQTELDALDTKVRKLLTAFRMHHPRSSVMRLYIPRKCGGRGFLNAKTLHNREICSLRDYFLEADVGMHRDVVAMDKGLTPLSLAKENWRKPIILTTDDRRKEWQGKELHGRFYRALHGPDVDFLASVSWLRSGDLFGETEGFVCAIMDEVMMTNNYRRFIVKDGTVDICRACHRPGESIRHIISGCSRLANGEYLHRHNLVARIIHQQLALKYNLVESEVPYYRYVPDPVLVNGSITLYWDQSIITDRTVIANRPDIVVMDRSERRAMIVDITVPHDENLVKAEKDKQIKYLDLAREVVDMWEVDSAIIVPIVVSAHGLIAKSLDQHLRRLSLGSWIKGLIQKAVLLDTARIVRRFLSLEP

SEQ ID NO: 13192 - protein, 1198 aa, Xestia c-nigrum
MLTRAAARRARLSPPDPPLSSASPPPEPSSIVSAVIPAVAVASSSSDEYFSPPTTPPPARRRGGRRPPDGLGPRGPLASDRVPAPGGSVQRMRWTSSNNENVMRAYYGATEGGNNLTAYRVRMLSLFQVLEPAVNVSAQRLSDQVRVIQRNRMLDDTVLDRLRTEMQSSHVTAMPPSQAVVSPQSSSIPNRDGDVSSEMVTNVSTQCNEDMRSALEGAIREYRFMAPELRPRLPRLPMHNKNRMLVAVLDSQLSNYFDTCEDLTDVHSILYCAAVAACRVAHAKFSDDRATRPKPAIPAWQYRIEQRIGGARALIGKLICFREGNTRPRVMRFVRRAFSGTDISPRDYISRVTERIDFLKQKVYAWASRIRRYKRRVDRYTQNRTFQRDERWVYRAWERPDQGVADTCLPDDDAMCSFWRSIWSVPVSHAEGEWTRVIERVCDPVLEMGAITISPQDVACAVRPLPNWKSPGPDGLHNFWIKWFTRSHARLATLFQSALESGSLPEFLTTGVTHLLHKSGSTTEPKNYRPITCLPTIYKVLTSILRTKINKHIDDNSIMSASQNGCRNGSRGTKELLLIDMAISQQVRRSRKDLSICWIDYKKAYDSVPHTWLMWVLELYKVDATLRTFLMSCMGQWRTVLRYPGCRQIQRNSEPIRIERGIFQGDSLSPLWFCLALNPLSTLLEDSGLGYRLRKDGQVISHLLYMDDLKLFAPNDLQLMELLKVTETFSSAIRMEFGVDKCAVMHVKRGEIVESVGTQLSDSINLRSLSATETYKYLGMSEALGINVADMKQSLKERFFGRLKKVFNSLLSGRNKVRAFNGWVMPVLMYSFGILKWTQTELDALDTKVRKLLTAYRMHHPRSSVMRLYIPRKCGGRGFLNAKTLHNREICSLREYFLEANVGMHRDVVAMDKGLTPLSLAKENWRKPVVLTTDDRRKEWQSKELHGRFYRALHGPDVDFLASVSWLRSGDLFGETEGFVCAIMDEVMMTNNYRRFIVKDGTVDICRACHRPGESIRHIISGCSRLANGEYLHRHNLVARIIHQQLALKYNLVESEVPYYRYVPDPVLDNGSITLYWDQSIITDRTVIANRPDIVVMDRSERRAMIVDITVPHDENLVKAEKDKQIKYLDLAREVVDMWEVDSAIIVPIVVSAHGLIAKSLDQYLRRLSLGSWIKGLIQKAVLLDTARIVRRFLSLEP

SEQ ID NO: 13193 - protein, 1198 aa, Xestia c-nigrum
MLTRAAARRARLPPPDPSLSSASPPPEPSPIVSAVTPAVAVASSSSDEYFSPPTTPPPARRRGGRRPPDGLGPRGPPASDRVPAPGGSVQRMRWTQSNNENVMRAYYGATEGGNNLTAYRVRMLSLFQVLEPAVNVSAQRLSDQVRVIQRNRMLDDTVLDRLRTEMHSSHVIATPPSQAVVLPQSTTITYRDDDVSSDMITNVGTQYSEDMRSALEGAIREYRFMTPELRPRLPRLPMHNKNRMLVAVLDSQLSNYFDNCEDLTDVYSILYCAAVAACRVARVKFSDDRATRPKPAVPAWQYRIEQRIGGARALIGKLICFREGNTRPRVMRFVRRAFLGTDINPRDYMSRVTERIDFLKQKVYAWASRIRRYKRRVDRYTQNRTFQRDERWVYRAWERPDQGVADTRLPDDDAMCSFWRSIWSVPVSHAEGEWTRVIERACDPVPEMGAITISPQDVACAVRPLPNWKSPGPDGLHNFWIKWFTRSHARLATLFQSALESGSLPEFLTTGITHLLHKSGSTAEPKNYRPITCLPTVYKVLTSILRTKICKHVDDNSVMSASQNGCRNGSRGTKELLLIDMAISQQVRRSRKDLSTCWIDYKKAYDSVPHTWLMRVLELYKVDATLRTFLMSCMGQWRTVLRYPGCRQIQRNSEPIRIERGIFQGDSLSPLWFCLALNPLSTLLEDSGLGYQLRKDGRVISHLLYMDDLKLFAPNDLQLMELLKVTETFSSAIRMEFGVDKCAVMHVKRGEIVESVGTQLSDSINLRSLSATETYKYLGMSEALGINVADMKQSLKERFFGRLKKVFNSLLSGGNKVHAFNGWVMPVLMYSFGILKWTQTELDALDTKVRKLLTAFRMHHPRSSVMRLYIPRKCGGRGFLNAKTLHNREICSLRDYFLEADVGMHRDVVAMDKGLTPLSLAKENWRKPIILTTDDRRKEWQGKELHGRFYRALHGPDVDFLASVSWLRSGDLFGETEGFVCAIMDEVMMTNNYRRFIVKDGTVDICRACHRPGESIRHIISGCSRLANGEYLHRHNLVARIIHQQLALKYNLVESEVPYYRYVPDPVLVNGSITLYWDQSIITDRTVIANRPDIVVMDRSERRAMIVDITVPHDENLVKAEKDKQIKYLDLAREVVDMWEVDSAIIVPIVVSAHGLIAKSLDQHLRRFSLGSWIKGLIQKAVLLDTARIVRRFLSLEP

SEQ ID NO: 13194 - protein, 1000 aa, Xestia c-nigrum
MITNVGTQYSEDMRSALEGAIREYRFMTPELRPRLPRLPMHNKNRMLVAVLDSQLSNYFDNCEDLTDVHSILYCAAVAACRVARVKFSDDRATRPKPAVPAWQYRIEQRIGGARALIGKLICFREGNTRPRVMRFVRRAFSGTDINPRDYMSRVTERIDFLKQKVYAWASRIRRYKRRVDRYTQNRTFQRDERWVYRAWERPDQGVADTRLPDDDAMCSFWRSIWSVPVSHAEGEWTRVIERACDPVPEMGAITISPQDVACAVRPLPNWKSPGPDGLHNFWIKWFTRSHARLATLFQSALESGSLPEFLTTGITHLLHKSGSTAEPKNYRPITCLPTVYKVLTSILRTKICKHVDDNSVMSASQNGCRNGSRGTKELLLIDMAISQQVRRSRKDLSTCWIDYKKAYDSVPHTWLMRVLELYKVDATLRTFLMSCMRQWRTVLRYPGCRQIQRNSEPIRIERGIFQGDSLSPLWFCLALNPLSTLLEDSGLGYQLRKDGRVISHLLYMDDLKLFAPNDLQLMELLKVTETFSSAIRMEFGVDKCAVMHVKRGEIVESVGTQLSDSINLRSLSATETYKYLGMSEALGINVADMKQSLKERFFGRLKKVFNSLLSGGNKVRAFNGWVMPVLMYSFGILKWTQTELDALDTKVRKLLTAFRMHHPRSSVMRLYIPRKCGGRGFLNAKTLHNREICSLRDYFLEADVGMHRDVVTMDKGLTPLSLAKENWCKPIILTTDDRRKEWQGKELHGRFYRALHGPDVDFLASVSWLRSGDLFGETEGFVCAIMDEVMMTNNYRRFIVKDGTVDICRACHRPGESIRHIISGCSRLANGEYLHRHNLVARIIHQQLALKYNLVESEVPYYRYVPDPVLVNGSITLYWDQSIITDRTVIANRPDIVVMDRSERRAMIVDITVPHDENLVKAEKDKQIKYLDLAREVVDMWEVDSAIIVPIVVSAHGLIAKSLDQHLRRLSLGSWIKGLIQKAVLLDTARLVRRFLSLEP

SEQ ID NO: 13195 - protein, 1198 aa, Griposia aprilina
MLTRSAARHARPPTPDSSLSSASPPPVSSTTVSAVTTPAVVVASSSSDEYFSPPTTPPPARRRGGHRPPEGLGPRGPPASDRVPAPGGSVQRMRWTRSINENVMRSYYGDTEGGNNLTAYRVRMLSLFQVLEPAVNVSAQRLSDQVRVIQRNHMLDDIVLDRLRNEIQSSHVIAPPSQTVVVLPQPITSQADEGTADRAKNVSTQCNEELRSALEGAIREYRFMSPELRPRLPRLPMHNKNRALVATLDSQLSNYIDDCEDLTDTHSILYCAAVAACRVAHVKFANDSRATRPKPAVPAWQCRIERRIGGARALIGKLTCFGEGNTRPRVMRFVRRAFAGTNISPQDYMSCVTERIDFLKQKVYAWANRIRRYKRRVERYTQNRTFQRDERWVYRDWERPDQGVTDTYLPDDDAMCSFWRNIWSVPVSHTEGDWTRDVERACEPIPEMGAITICPQDVARAVRPLPNWKSPGPDGLHNFWIKSFLRSHARLAAQFQVALESGSLPQFLTTGVTHLLHKSGSTAEPKNYRPITCLPTVYKVLTSILRAKINNHIDTNSIMSPSQNGCRNGSRGTKELLLIDMTISQQVRRSRKDLSTFWIDYKKAYDSVPHTWLMRVLELYKVDSTLRTFLKSCMGQWRTVHHYTGCRNVQRNSEPIRIERGIFQGDSLSPLWFCLAFNPLSTLLENSGLGYWLRRGGQVISHLLYMDDLKLFASKNLQLMELLKVTETFSSAIRMEFGVDKCAVMHVKRGEIVESVGTQLSDSINLRALSASETYKYLGISEALGINGTDMKQSLKERFFGRLKKVFNSLLSGGNKVCAFNGWVMPVLMYSFGILKWTQTELDALDKKVRSLLTANRMHHPRSSVMRLYIPRKCGGRGFLNAKTLHNREICSLREYFLEADVGMHRDVVTVDKGLTPLSLAKENWRKPVVLDTNDRMEVWQSKELHGRFFRALHGPDVDQLASVAWLRFGDLFGETEGLVCAIMDEVMMTKNYRRFIVKDGTVDICRACHRPGESIRHIISGCSRLANEEYLHRHNLVARIIHQQLALKYSLVESEVPYYRYVPDPVFENGHITLYWDRSIITDRIIVANKPDIVVVDRIERRAVIVDITIPHDGNLVKAEKDKQIKYLDLAREVVDMWDVDSAIIVPIVVTANGLIAKSLDQHLRRLSLGSWIKGLIQKAVLLDTARIVRRFLSLEP

SEQ ID NO: 13196 - protein, 922 aa, Griposia aprilina
MSCSSRQIANDSRATRPKPAVPAWQCRIERRIGGARALIGKLICFREGNTRPRVMRFVRRAFAGTDISPQDYMSCVTERIDFLKQKVYAWANRIRRYKRRVERYTQNRTFKRDERWVYRGWERPHQGVADTCLPDDDAMCSFWRNIWSVPVSHTEGDWTREVERACDPIPEMGAITIGPQDVTRAVRPLPNWKSPGPDGLHNFWIKWFGGSHARLAAQYQVALESGSLPQFLTTGVTHLLHKSGSTAEPKNYRPIACLPTVYKVLTSILRDKINKHIDTNYIMSPSQNGCRNGSRGTKELLLIDMAISQQVRRSRKDLSTCWIDYKKAYDSVPHTWLMRVLELYKVEATLRTFLMSCMGQWRTVLRYPACRNTQRNSEPIRIERGIFQGDSLSPLWFCLALNPLSTLLEDSGLGYRLRRGGQVISHLLYMDDLKLFEPNNLQLMDLLKVTETFSSAIRMEFGMDKCAVMHVKRGEIVESVGTQLSDSINLRALSASETYKYLGMSEALGINGTDMKQSLKDRFFGRLKKVFNSLLSGGNKVRAFNGWVMPVLMYSFGILKWTQTELDALDRKVRTLLTANRMHHPRSSVMRLYIPRKCGGRGFLNAKTLHNREICSLREYFLEADVRMHRDVVTVDKGLTPLSLAKENWRKPVVLDTNDRMEVWQSKELHGRFFRALHGPDVDQLASVAWLRFGDLFGETEGFVCAIMDEVMMTNNYRRFIVKDGTVDICRACHRPGESIKHIISGCSRLANEEYLHRHNLVARIIHQQLALKYSLVESEVPYYRYVPDPVLENGHITLYWDRSIITDRTIVANKPDIVMVDRLERRAMIVDITVPHDGNLVKAEKDKQIKYLDLAREVVDMWDVDSAIMVPIVVTANGLIAKSLDQHLRRLSLGSWIKGLIQKAVLLDTARIVRRFLSLEP

SEQ ID NO: 13197 - protein, 1199 aa, Griposia aprilina
MMLTRSAKRRAHPPPPDSSLSSASPPPVSSPTVSAVTTPAAVVASSSSDEYFSPPTTPPPVRRRGGHRPPDGLGPRGPPASDRVPAPGGSVQRMRWTQSINENVMRSYYGATEGGKNLTAYRVRMLSLFQVLEPAVNVSAQRLSDQVRVIQRNHMLDDTVLDRLRNEMQSSHVIAPPSQTVVVLPQSNTSQADEESDDRATNVSTQCNDELRSALEDAIREYRFISPELRPRLPRLPMHNKNRVLVAALDAQLSNYFDDCVDLTDTHSILYCAAVAACRVAHIKFANDSRPTRPKPAVPAWQCRIERRIGGARALIGKLICFREGNTRPRVMRFVRRAFAGTNISPQDYMSCVTERIDFLKQKVYAWANRIRRYKRRVERYTQNRTFQRDERWVYRGWERPDQGVADTCLPDDDAMCSFWRNIWSVPVSHTEGDWGREVERACDPIPEMGAISICPQDVTRAVRPLPNWKSPGPDGLQNFWIKWFGRSHARLAAQYQVAIESGSLPHFLTTGVTHLLHKSGSTAEPKNYRPITCLPTVYKVLTSILRAKINKHIDTNSIMSPSQNGCRNGSRGTKELLLIDMAISQQVRRSRKDLSTCWIDYKKAYDSVPHTWLVRVLELYKVDATLRTFLKSCMGQWRTILHYPGCRNIQRDNEPIRIERGIFQGDSLSPLWFCLALNPLSTLLEDSGLGYRLRRGGQVISHLLYMDDLKLFAPNNLQLMELLKVTETFSSAIRMEFGVDKCAVMHVKRGEIVESVGTQLSYSINLRALSASDTYKYLGMSEALGINGTDMKQSLKERFFGRLKKVFNSLLSGGNKVRAFNGWVMPVLMYSFGILKWTQTELDALDRKVRTLLTANRMHHPRSSVMRLYIPRKCGGRGFLNAKTLHNREICSLREYFLEADVGMHTDVVKVDKGLTPLSLAKENWRKPVVLDANDRMEVWQSKELHGRFFRALHGPDVDQLASVAWLRFGDLFGETEGFVCAIMDEVILTNNYRRHIMKDGTVDVCRACHRSGESIRHIISGCSRLANEEYLHRHNLVARIIHQQLALKYSLVESEVPYYRYVPDPVLENGHITLYWDRSIITDRTIVANKPDIVMVDRLERRAMIVDITVPHDGNLVKAEKDKQIKYLDLAREVVDMWDVDSAIIVPIVVTANGLIAKSLDQHLRRLSLGSWIKGLIQKAVLLDTARIVRRFLSLEP

SEQ ID NO: 13198 - protein, 1199 aa, Griposia aprilina
MMLTRSAKRRAHPPPPDSSLSSASPPPVSSSIVSAVTTPAAVVASSSSDEYFSPPTTPPPARRRGPPRPPDGLGPRGPPASDRVPAPGGSVQRMRWTRSINENVMRSYYGATEGGNNLTAYRVRMLSLFQVLEPAVNVSAQRLTDQVRVIQRNHMLDDTVLDRLRNEMQSSHVIAPPSQTVVVLPQSNTSQADEESDDRATKVSTQCNEELRSALEDAIREYRFISPELRPRLPRLPMHNKNRALVAALDAQLSNYFDDCVDLTDTHSILYCAAVAACRVAHVKFANDSRATRPKPVVPAWQCRIERRIGGARALIGKLICFREGNTRPRVMRFVRRAFAGTDISPQDFMSCVTERIDFLKQKVYAWANRIRRYKRRVERYTQNRTFQRDERWVYRDWEQPDQGVADTYLPDNDAMCSFWRNIWSVPVSHSEGDWIREVERACEPLPEMGAITICPQDVTRAVRPLPNWKSPGPDGLHNFWIKWFLRSHARLAAQFQVALESGLLPQFLTTGVTHLLHKSGSTAEPKNYRPITCLPTVYKVLTSILRAKINKHIDTNSIMSASQNGCKNGSRGTKELLLIDMTISQQVRRSRKDLSTCWIDYKKAYDSVPHTWLMRVLELYKIDATLRTFLMSCMGQWRTVLRYPACRNTQRNSKPIRIKRGIFQGDSLSPLWFCLALNPLSTLLEDSGLGYRLRRGGRVISHLLYMDDLKLFSPNNLQLMELLKVTETFSSAIRMEFGVDKCAVMHVKRGEIVESVGTQLSDSMNLRALSASETYKYLGMSEALGINDTDMKQSLKERFFGRLKKVFNSLLSGGNKVRAFNGWVMPVLMYSFGVLKWTQTELDTLDRRVQTLLTANRMHHPRSSVMRLYIPRKCGGRGFLNAKTLHNREICSLREYFLETDVGMHRDVVAVDKGLTPLSLAKENWRKLVVLDTNDRMEVWQSKELHGRFFRALHGPDVDLQASVAWLRFGDLFGETEGFVCAIMDEVMMTNNYRRFIVKDGTVDICRACHRPGESIRHIISGCSRLANEEYLHRHNLVARIIHQQLALKYSFVESEVPYYRYVPDPVLENGNITLYWDRSIITDRTIVANKPDIVVVDRRERRAMIVDITIPHDVNLVKAEKDKQIKYLDLAHEVVDMWDVDSAIIVPIVVTANGLIAKSLDQHLRRLSLGSWIKGLIQKAVLLDTARIVRRFLSLEP

SEQ ID NO: 13199 - protein, 1045 aa, Griposia aprilina
MLDDTVLDRLRNEMQSSHVIAPPSQTVVVLPESNTSQADEESDDIATNVSTQCNDELRSALEDAIREYRFISPKLRPRLPRLPMHNKNRVLVAALDAQLSNYFDDCVDLTDTHSILYCAAVAACRVAHVKFANDSRATRPKPAVPAWQCRIERRIGGARALIGKLICFREGNTRPRVMRFVRRSFAGTNISPQDYMSCVTERIDFLKQKVYAWANRIRRYKRRVERYTQNRTFQRDERWVYRGWERPDQGVADTCLPDDDAMCSFWRNIWSVPVSHTEGDWAREVERACDPIPEMGAISICPQDVTRAVRPLHNWKSPGPDGLHNFWIKWFGRSHARLAAQFQVALESGSLPQFLTTGVTHLLHKSGSTAEPKNYRPITCLPTVYKVLTSILRAKINKHIDTNSIMSPSQNGCRNGSRGTKELLLIDMAISQQVRRSRQDLSTCWIDYKKAYDSVPHTWLVRVLELYKVDATLRTFLKSCMGQWRTVLHYPGCRNIQRDNEPIRIERGIFLGDSLIPLWFCLSLNPLSTLLEDSGLGYRLRRGGQVISHLLYMDDLKVFAPNNLQLMELLKVTETFSSAIRMEFGVDKCAVMHVKRGEIVESVGTQLSDSINLRALSASETYKYLGMSEALGINGTEMKQSLKERFFGRLKKVFNSILSGGNKVRAFNGWVMPVLMYSFGILKWTQTELDALDRKVRTLLTANRMHHPRSSVMRLYIPRKCGGRGFLNAKILHNREICSLREYFLEADVGMHGDVVTVDKGLTPLSLAKENWRKPVVLDTNDRMEVWQSKELHGRFFRALHGPDVDQLASVAWLRFGDLFGETEGFVCAIMDEVILTNNYRRHIMKDGTVDVCRACHRPGESIRNIISGCSRLANEEYLHRHNLVARIIHQQLALKYSFVESEVPYYRYVPVAVLENGHITLYWDRSIITDRTIVANKPDIVMVDRLERRAMIVDITVPHDGILVKAEKDKQIKYLDLAREVVDMWDVDSAIIVPIVVTTNGLIAKSLDQHLRRLSLGSWKKGLIQKAVLLDTARIVRRFLSLEP

SEQ ID NO: 13200 - protein, 1095 aa, Griposia aprilina
MCSYYGATEGGNNLTAYRVRMLSLFQVLEPAVNVSAQRLSDQVRVIQRNHMLDDTVLDRLRNEMQSSHVIAPPSQTVVVLPQSNTSQADEECDDRATNVSTQCNDELRSALEDAIREYWFISPELRPRLPRLPMHNKNRVLVAALDAQLSNYFDDCVDLTDTHSILYCAAVAACRVAHVKFANDSRATRPKPAVPAWQCRVERRIGGARALIGKLICFREGNTRPRVMRFVRRAFAGSDISPQDYMSCVTERIDFLKQKVYAWANRIRRYKRRVERYTQNRTFQRDERWVYRGWERPDQGVADTCLPDDDAMCSFWRNIWSVPVSHTEGDWTREVERACDPIPEMGAITICPQDGTRAVRPLPNWKSPGPDGLHNFWIKWFGRSHARLAAQYQVALESGSLPQFLTTGVTHLLHKSGSTAEPKNYRPIACLPTVYKVLTSILRNKINKHIDTNYIMSPSQNGCRNGSRGTKELLLIDMAISQQVRRSRKDLSTCWIDYKKAYDSVPHTWLMRVLELYKVEATLRTFLMSCMGQWRTVLRYPACRNTQRNSEPIRIERGIFQGDSLSPLWFCLALNPLSTLLEDSGLGYRLRRGGQVISHLLYMDDLKLFAPNNSQLMDLLKVTETFSSAIRMEFGVDKCAVMHVKRGEIVESVGTQLSDSINLRALSASETYKYLGMSEALGINGTDMKQSLKDRFFGRLKKVFNSLLSGGNKVRAFNGWVMPVLMYSFGILKWTQTELDALDRKVRTLLTANRMHHPRSSVMRLYIPRKCGGRGFLNAKTLHNREICSLREYFLEADVGMHRDVVTVDKGLTPLSLAKENWRKPLVLDTNDRMEVWQSKELHGRFFRALNGPDVDQLASVAWLRFGDLFGETEGFVCAIMDEVMMTNNYRRFIVKDGTVDICRACHRPGESIRHIISGCSRLANEEYLHRHNLVARIIHQQLALKYSLVESEVPYYRYVPDPVLDNGHITLYWDRSIITDRTIVANKPDIVMVDRLERRAMIVDIMVPHDGNLVKAEKDKQIKYLDLAGEVVDMWDVDSAIIVPIVVTANGLIAKSLDQHLRRLSLGSWIKGLIQKAVLLDTARIVRRFLSLEP

SEQ ID NO: 13201 - protein, 1198 aa, Griposia aprilina
MLTRSAARRARPPPPDSSLSSASLPPVSSPTVSAVTTPAAVVASSSSDEYFSPPTTPPPVRRRGGHRPPDGLGPRGPPASDRVPAPGGSVQRMRWTRSINENVMRSYYGATEGGNNLTAYRVRMLSLFQVLEPAVNVSAQRLSDQVRVIQRNHMLDDTVLDRLRNEMQSSHVIAPPSQTVVVLPQSNTSQADEESDDRATNVSTQCNDELRSALEDAIREYRFISPDLRPRLPRLPMHNKNRVLVAALDAQLSNYFDDCVDLTDTHSILYCAAVAVCRVAHVKFANDSRATRPKPAVPAWQCRIERRIGEARALIGKLICFTEGNTRPRVMRFVRRAFAGTNISPQDYMSCVTERIDFLKQKVYAWANRIRRYKRRVERYTQNRTFQRDERWVYRGWKRPDQGVADTCLPDDDAMCSFWRNIWSVPVSHTEGDWTREVERACDPIPEMGAITICPQDVTRAVRPLPNWKSPGPDGLHNFWIKWFGRSHARLAAQYQVALESGSLPQFLTTGVTHLLHKSGSTAEPKNYRPIACLPTVYKVLTSILRDKINKHIDTNYIMSPSQNGCRNGSRGTKELLLIDMTISQQVRRSRKDLSTCWIDYKKAYDSVPHTWLMRVLELYKVEATLRTFLMSCMGQWRTVLHYPACRNTQRNSEPIRIERGIFQGDSLSPLWFCLALNPLSTLLEYSGLGYRLRRGGQVISHLLYMDDLKLFAPNNSQLMDLLKVTETFSSAIRMEFGVDKCAAMHVKRGEIVESVGTQLSDSINLRALSASETYKYLGMSEALGINGTDMKQSLKDRFFGRLKKVFNSLLSGGNKVRAFNGWVMPVLMYSFGILKWTQTELDALDRKVRTLLTANRMHHPRSSVMRLYIPRKCGGRGFLNAKTLQNREICSLREYFLEADVGMHRDVVTVDKGLTPLSLAKENWRKPVVLDTNDRMEVWQSKELHGRFFRALHGPDVDQLASVAWLRFGDLFGETEGFVCAIMDEVMMTNNYRRFIVKDGTVDICRACHRPGESIRHIISGCSRLANEEYLHRHNLVARIIHQQLALKYSLVESEVPYYRYVPDPVLENGHITLYWDRSIITDRTIVANKPDIVVVDRLERHAMIVDITVPHDGNLVKAEKDKQIKYLDLAREVVDMWDVDSAIIVPIVVTANGLIAKSLDQHLRRLSLGSWIKGLIQKAVLLDTARIVRRFLSLEP

SEQ ID NO: 13202 - protein, 1197 aa, Griposia aprilina
MLTRSAALRARLPTPDSSLSSASPPPVSSPIVSAVTTPAAVVASSSSDEYFSPPTTPPPARRRGGHRPPDGLGPRGPPASDRVPAPGGSVQRIRWTQSINENVMRSYYGATEGGNNLTAYRVRMLSLFQMLEPAVNVSAQRLSDQVRVIQRNHMLDDTVLDRLRSEMQSSHVITPPSQTIVVLPQPITSHDEGSDDRATNVSTQCNEELRSALEGAIREYRFMSPELRPRLPRLPMHNKNRALVAALDSQLSNYFDDCVDLTDTHSILYCAAVAACRVAHVKFANDSRATRPKPAVPAWQCRIERRIGGARALIGKLICFREGNTRPRVMRFVRRAFAGTDVSPQDYISCVTERIDFLKQKVYAWASRIRRYKRRVERYTQNRTFQRDERWVYRDWERPDQGVADTYLPDDDAMFSFWHNIWSVPVSHTEGDWTREVERACEPIPEMGAITICPQDVARAVRPLPNWKSPGPDGLHNFWIKWFLRSHARLAAQFQAALESGSLPQFLTTGVTHLLHKSDSIAEPKNYRPITCLPTVYKVLTSILRAKINKHIDTNSIMSASQNGCRNGSRGTKELLLIDMAISQQVLRSRKDLSTCWIDYKKAYDSVPHTWLMRVLELYKVDATLRTFLKSCMGQWRTVLRYPTCRNTQRNSEPIRIERGIFQGDSLSPLWFCLALNPLSTLLEDSGLGYRLRRGGRVISHLLYMDDLKLFAPNNLQLIELLKVTETFSSAIRMEFGLDKCAVTHVKRGEIVESVGTQLSDSMNLRALSASETYKYLGMSEALGVNNTDMKQSLKERFFGRLKKVFNSLLSGGNKVRAFNGWVMPVLMYSFGILKWTQTELDTLDRRVRTLLTANRMHHPRSSVMRLYIPRKCGGRGFLNAKTLHNREICSLREYFLEADVGMHRDVVAVDKGLTPLSLAKEDWRKPVVLDTNDRMEVWQSKELHGRFFRALHGPDVDVQASVAWLRFGDLFGETEGFVCAIMDEVMMTNNYRRFIVKDGTVDICRACHRPGESIRHIISGCSRLANEEYLHRHNLVARIIHQQLALKYSFVESEVPYYRYVPDPVLENGTITLYWDRSIITDRTIIANKPDIVLVDRRERRAMIVDITIPHDGNLVKAEKDKQIKYLDLAREVVDMWDVDSAIIVPIVVTANGLIAKSLDQHLRRLSLGSWIKGLIQKAVLLDTARIVRRFLSLEP

SEQ ID NO: 13203 - protein, 1201 aa, Omphaloscelis lunosa
MLTRLAARRARLPPPDSPLSSASSPPVRSPTVNAVMTPAAAVASSSSDEYFSPPTTPPPARRRGRRRPPDGLGPRGPPASDRVPAPGGSVQRMRWTRSINENVMRSYYGATEGGNNLTAYRVRMLSLFQVLEPAVSVSAQRLSDQVRVIQRNHMLDDTVLDRLRSEMQSSHVIAPPLRSVIIPSQMSSVITSQADERIDDRATNVSTQCNEDLRSALEGAIQEYRFMSPELRPRLPRLPMHNKNKALVAVLDSQLSNYFDDCEDLTDTHSILYCAAVAVCRVAHLKFSNDSRATRPKPAAPAWQCRIERRIGGARTLIGKLICFREGNTRPRVMRFVRRAFLGTDISPQDYMTRVTERIDFLKQKVYAWANRIRRYKRRVERYTQNRTFQSDERWVYRAWERPDQGVADTHLPDDDAMCSFWRSIWSVPVSHTEGDWTREVERACDPIPEMGAITICPQDVARAVRPLPNWKSPGPDGVHNFWIKWFVRSHARLAAQYQTALESGSLPQFLTTGVTHLLYKSGSTAEPKNYRPITCLPTVYKVLTSILRAKINKHIDTNSIMSASQNGCRNGSRGTKELLLIDMAISQQVRRSRKDLSTCWIDYKKAYDSVPHTWLMRVLELYKVHTTLRTFLMSCMGQWRTVLRYPRCRNIQRNSEPIRIERGIFQGDSLSPLWFCLALNPLSTLLEDSGLGYRLRRGGQVISHLLYMDDLKLFAPNNLQLMELLKVTETFSSAIRMEFGVDKCAVMHVKRGEIMESVGTQLSDSINLRALSASETYKYLGMSEALGINVTDMKQSLKERFFGRLKKVLNSLLSGGNKVRAFNGWVMPVLMYSFGILKWTQTELDALDRRVRTLLTAYRMHHPRSSVMRLYIPRKCGGRGFLNAKTLHNREICSLREYFLGVDVGMHRDVVVVDKGLTPLSLAKENWRKPVVLDTKDRMEIWQSKELHGRYFRALHGPDVDLPASVTWLRFGDLFGETEGFVCAIMDEVMMTNNYRRFIVKDGTVDICRACHRPGESIRHIISGCSRLANEEYLHRHNLVARIIHQQLALKYSLVESEVPYYRYVPDPVLENGNITLYWDRSIITDRTIAANKPDIVVVDRGERRTMIIDITVPHDENLVKAEKDKQIKYLDLAREVVDMWDVDSAIIVPIVVTANGLIAKSLDQHLRRLSLGSWIKGLIQRAVLLDTARIVRRFLSLEP

SEQ ID NO: 13204 - protein, 918 aa, Omphaloscelis lunosa
MSNSPTVTELHDQNQLYQLGSAGLSVVSVRLEYFTGKLICFREGNTRPRVMRFVKRAFSGTDISFQDYLTRVTERIDFLKQKIYAWANRIRRYRRRVERYTQNRTFQSDERWVYRAWERPDQGVADTHLPDDDAMCSFWRSIWSVPVSHTEGDWTREVERACDPIPEMGAITICPQDVARAVRPLPNWKSPGPDGLHNFWIKWFQRSHARLASQFQSALESGSLPQFLTTGITHLLHKSGSTAEPKNYRPITCLPTVYKVFTSILRTKINKHIDTNSIMSASQNGCRNGSRGTKELLLIDMAINQQVRRSRRDLSTCWIDYKKAYDSVPHTWLMRVLELYKVNATLRTFLMSCMGQWRTVLRYPGCRQILRNSEPIRIERGIFQGDSLSPLWFCLALNPLSTLLEDSGLGYRLRRGGQVISHLLYMDDLKLFAPNNLQLLELLKVTETFSSAIRMEFGVDKCAVMHVKRGEIVESVGTQLSDSIQLRSLSSIETYKYLGMSEALGVNAADMKQSLKERFFNRLNKVLNSLLSGGNKVRTFNGWVMPVLMYSFGILKWTQTELNALDRRVRTLLTANRMHHPRSSVMRLYIPRKCGGRGFLNAKTLHNREVCSLREFFLEADVGMHRDVVTVDKGLTPLSLANENWRKPIVLDTNDRREVWQSKELHGRFYRALHGPDVDLLASVSWLRFGDLFGETEGFVFAIMDEFMMTNNYRKYIVKDGTVDICRACHRPGESIRHIISGCSRLANGDYLHRHNLVARIIHQQLALKYSLVESEVPYYRYVPDPVLENGNITLYWDRSIITDRTIVANKPDIVVIDRLERRTMIIDIAVPHDENLVKAEKDKQIKYLDLAREVVDMWDVDTAIIVPIVVTANGIIAKSLDQHLKRLSLGSWIKGLIQKAVLLDTARIVRRFLSQEP

SEQ ID NO: 13205 - protein, 1205 aa, Omphaloscelis lunosa
MLTRSRARKLIDTHPTSSGSSLSSASQLPDPAPDVSPVIPVAAVASSSSDEYFSPPTTPPPTRQRGRGRPPASLGLRGPPASDRVPAPGGSVQRMRWTQTVNENVMRAYFGATEGGSNLTAYRGRMLSLFQVLEPAVNVSAQRLSDQVRVIQRNHMLDDVVLDRLRLESRNNHVTPASPLVTVQLQNLPSSSPRSDRVGEEDDDGVISVSSQCNVRLRSALEDAFREYRSIPPGLRPQLPRLPMHKKNKALMCTLDSLLSNCFEGSKDLADTHSILYCAAVAACRVAHVKFPNSDRAPRPKPAVPAWQCRIERRIGEARVLIGKLICFREGNTRPRVMRFVKRAFSGTDISFQDYLTRVTERIDFLKQKIYAWANRIRRYRRRVERYTQNRTFQSDERWVYRAWERPDQGVADTHLPDDDAMCSFWRSIWSVPVSHTEGDWTREVERACDPIPEMGAITICPQDVARAVRPLPNWKSPGPDGLHNFWIKWFQRSHARLASQFQSALESGSLPQFLTTGITHLLHKSGSTAEPKNYRPITCLPTVYKVFTSILRTKINKHIDSNSIMSASQNGCRNGSRGTKELLLIDMAINQQVRRSRRDLSTCWIDYKKAYDSVPHTWLMRVLELYKVNATLRTFLMSCMGQWRTVLRYPGCRQILRNSDPIRIERGIFQGDSLSPLWFCLALNPLSTLLEDSGLGYRLRRGGQVISHLLYMDDLKLFAPNNLQLLELLKVTETFSSAIRMEFGVDKCAVMHVKRGEIVESVGTQLSDSIQLRSLSSIETYKYLGMSEALGVNAADMKQSLKERFFNRLNKVLNSLLSGGNKVRAFNGWVMPVLMYSFGILKWTQTELDALDRRVRTLLTANRMHHPRSSVMRLYIPRKCGGRGFLNAKTLHNREVCSLREYFLEADVGIHRDVVTVDKGLTPLSLANENWRKPIVLDTNDRREVWQSKELHGRFYRALHGPDVDLLASVSWLRFGDLFGETEGFVFAIMDEVMMTNNYRKYIVKDGTVDICRACHRPGESIRHIISGCSRLANGDYLHRHNLVARIIHQQLALKYSLVESEVPYYRYVPDPVLENGNITLYWDRSIITDRTIVANKPDIVVIDRLERRTMIIDIAVPHDENLVKAEKDKQIKYLDLAREVVDMWDVDTAIIVPIVVTANGIIAKSLDQHLKRLSLGSWIKGLIQKAVLLDTARIVRRFLSQEP

SEQ ID NO: 13206 - protein, 1102 aa, Omphaloscelis lunosa
MSCAHTLGLQRGGSNLTAYRGRMLSLFQVLEPAVNVSAQRLSDQVRVIQRNHMLDDVVLDRLRLESRNNHVTPASPLVTVQLQNLPSSSPRSDRVGEEDDDGVISVSSQCNVRLRSALEDAFREYRSIPPGLRPQLPRLPMHKKNKALMCTLDSLLSNCFDGSKDLADTHSILYCAAVAACRVAHVKFPNSDRAPRPKPAVPAWQCRIERRIGEARVLIGKLICFREGNTRPRVMRFVKRAFSGTDISFQDYLTRVTERIDFLKQKIYAWANRIRRYRRRVERYTQNRTFQSDERWVYRAWERPDQGVADTHLPDDDAMCSFWRSIWSVPVSHTEGDWTLEVERACDPIPEMGAITICPQDVARAVRPLPNWKSPGPDGLHNFWIKWFQRSHARLASQFQSALESGSLPQFLTTGITHLLHKSGSTAEPKNYRPITCLPTVYKVFTSILRTKINKHIDTNSIMSASQNGCRNGSRGTKELLLIDMAINQQVRRSRRDLSTCWIDYKKAYDSVPHTWLMRVLELYKVNATLRTFLMSCMGQWRTVLRYPGCRQILRNSEPIRIERGIFQGDSLSPLWFCLALNPLSTLLEDSGLGYRLRRGGQVISHLLYMDDLKLFAPNNLQLLELLKVTETFSSAIRMEFGVDKCAVMHVKRGEIVESVGTQLSDSIQLRSLSSIETYKYLGMSEALGVNAADMKQSLKERFFNRLNKVLNSLLSGGNKVRAFNGWVMPVLMYSFGILKWTQTELDALDRRVRTLLTANRMHHPRSSVMRLYIPRKCGGRGFLNAKTLHNREVCSLREYFLEADVGMHRDVVTVDKGLTPLSLANENWRKPIVLDTNDRREVWQSKELHGRFYRALHGPDVDLLASVSWLRFGDLFGETEGFVFAIMDEVMMTNNYRKYIVKDGTVDICRACHRPGESIRHIISGCSRLANGDYLHRHNLVARIIHQQLALKYSLVESEVPYYRYVPDPVLENGNITLYWDRSIITDRTIVANKPDIVVIDRLERRTMIIDIAVPHDENLVKAEKDKQIKYLDLAREVVDMWDVDTAIIVPIVVTANGIIAKSLDQHLKRLSLGSWIKGLIQKAVLLDTARIVRRFLSQEP

SEQ ID NO: 13207 - protein, 1197 aa, Sesamia nonagrioides
MLTRSAARRARPPSPDSLLGSASPPPVSSATASAVTTPAAAVASSSSDEYFSPPTTPPPARRRGGRRPPDRLGPRGPSASDRVPAPGGSVQRMRWTQSINENVMRSYYGATEGGNNLTAYRVRMLSLFQVLEPAVNVSAQRLSDQVRVIQRNHMLDDTVLDRLRNEMQSSRIIAHQSQTAEIPPQPTNYADEGSNDRATNVSTQCNEELINALEAAIREYRSTSAELRPRLPRLPMHNRNRALMAALDAQLSNYFDTCEDLTDTHSILYCAAVAACRVAHVKFPSDSRATRPRPVVPAWQHRIERRIGGARALIGKLICFREGNTRPRVMRFVRRAFAGTNISPQNYMARVTERIDFLKQKVYAWANRIRRYKRRVERYTQNRTFQSNERWVYRAWERSDQGVTDTCLPDDDATCSFWRNIWSVPVSHTEGSWTRVVERACDPVPEMGAITICPQDVAHAVRPLPNWKSPGPDGLHNFWIKWFSRSHARLASQFQTALESGSLPQFLTTGVTHLLHKSGSIAEPKNYRPITCLPTVYKVLTSILKSKINTHIDSNSIMSASQNGCRSGSRGTKELLLIDIAISQQVRRSRKDLSTCWIDYKKAYDSVPHTWLMRVLELYKVDATLRTFLMTCMRTWRTVLRYPGCRNIQRNSEPIRIERGIFQGDSLSPLWFCLALNPLSTLLEDSGLGYRLRRGGQVISHLLYMDDLKLFAHTDSQLKELLKITETFSSSIRMEFGVDKCAVMHVKRGEIMESVGTQLTSSINLRALSASETYKYLGMSEALGINVTDMKQSLKERFFGRLKKVLNSLLSGGNKVRAFNGWVMPVLMYSFGILKWTQTELDALDQRVRTLLTANRLHHPRSSVMRLYIPRKCGGRGFLNAKTLHNREVCSLREYFLETDVGMHRDVVAADKGLTPLSLAKENWRKPVVLDTNDRLEVWKSKELHGRFFRALHGPDVDFQASVAWLRFGDLFGETEGFVFAIMDEVMMTNNYRRFIVKDGTVDICRACHRPGESIRHIISGCSRLANGEYLHRHNLVARIIHQQLALKYNLVESEVPYYRYMPDPVLENGHITLYWDRSIITDRTIVANKPDIVLVDRSERRAMIVDITIPHDENLVKAEKDKQIKYLDLAHEVVDMWEVDSAIIVPIVVTANGLIAKSLDQHLRRLSLGSWIKGLIQKAVLLDTARIVRKFLSLEP

SEQ ID NO: 13208 - protein, 1197 aa, Sesamia nonagrioides
MLTRSAARRARPPSPDSLPSSASPPPASSTTVSAVTTPAATVASSSSDEYFSPPTTPPPVRRRGGRRPPDCLGPRGPSASDRVPAPGGSVQRMRWTQSINENVMRSYYGATEGGTNLTAYRVRMLSLFQVLEPAVNVSAQRLSDQVRVIQRNHMLDDTVLDRLRNEMQSSRIIAHQSQSAEIPPQPTNYADEGSNDRATNVSTQCNEELRNALEAAIREYRSISAELRPRLPRLPMHNRNRALMGALDAQLSNYFDTCEDLTDTHSILYCAAVAACRVAHVKFPSDSRATRPKPVVPAWQHRIERRIGGARALIGKLICFREGNTRPRVMRFVRRAFAGTNISPQNYMARVTERIDFLKQKVYAWANRIRRYKRRVERYTQNRTFQSNERWVYRDWERPEQGVADTCLPDDDAMCSFWRSIWSVPVSHTEGNWARDVERACDPIPEMGAITICPQDVARAVRPLPNWKSPGPDGLHNFWIKWFPRSHASLASQFQTALVSGSLPQFLTTGITHLLHKSGSTAEPKNYRPITCLPTVYKVLTSILKAKINNHIDSNSIMSVSQNGCRSGSRGTKELLLIDMAISQQVRRSRKDLSTCWIDYKKAYDSVPHTWLMRVLELYKVDATLRTFLMTCMGQWRTVLRYPGCRNIQRNSEPIRIERGIFQGDSLSPLWFCLALNPLSTLLEDSGLGYRLRRGGQVISHLLYMDDLKLFAPNNLQLKELLKITETFSSAIRMEFGVDKCAVMHIKRGEIVESVGTQLTSSINLRALSASETYKYLGMSEALGINVTDMKQSLKERFFGRLKKVLNSLLSGGNKVRAFNGWVMPVLMYSFGILKWTQTELDALDQRVRTLLTANRLHHPRSSVMRLYIPRKCGGRGFLNAKTLHNREICSLREYFLETDVGMHRDVVAVDKGLTPLSLVKENWRKPVVLDTNDRMEVWKSKELHGRFFRALHGPDVDLQASVAWLRFGDLFGETEGFVCAIMDEVMMTNNYRRFIVKDGTVDICRACHRPGESIRHIISGCSRLANGEYLHRHNLVARIIHQQLALKYNLVESEVPYYRYMPDPVLENGHITLYWDRSIITDRTIVANKPDIVMVDRSERRAMIVDITIPHDENLVKAEKDKQIKYLDLAHEVVDMWEVDSAIIVPIVVTANGLIAKSLDQHLRRLSLGSWIKGLIQKAVLLDTARIVRKFLSLEP

SEQ ID NO: 13209 - protein, 1200 aa, Sesamia nonagrioides
MLTRSAARRARPPSPDSLLGSASSPPVSSATASAVTTPAAAVASSSSDEYFSPPTTPPPARRRGGRRPPDRLGPRGPSASDRVPAPGGSVQRMRWTQSINENVMRSYYGATEGGNNLTAYRVRMLSLFQVLEPAVNVSAQRLSDQVRVIQRNHMLDDVVLDHLRLESRNSHVTPASSLVAVQLNSVSPRPNHVDEEDDDRAISVSPQCIEKLRSALEDAFCEYRSTPPELRPRLPRLPMHKKNKALVCALDSQLSYYLKDSKDLTDTHSILYCGAVAICRVAHVKFPDSDRATRPKSAVPAWQCRIERRIVETRALIGKLTSFREGNTRPRVMRFVRRAFSGTDASTRDYLFRVTERIDFFKQKIYAWANRIRRYKRRVERYYQNRNFQSDERRVYRAWERSDQGVTDTCLPDDDATCSFWRNIWSVPVSHTEGSWTRVVERACDPVPEMGAITICPQDVARAVRPLPNWKSPGPDGLHNFWIKWFSRSHARLASQFQTALESGSLPQFLTTGVTHLLHKSGSTAEPKNYRPITCLPTVYKVLTSILKSKINTHIDSNSIMSASQNGCRSGSRGTKELLLIDMAISQQVRRSRKDLSTCWIDYKKAYDSVPHTWLMRVLELYKVDATLRTFLMTCMRTWRTVLRYPGCRNIQRNSEPIRIERGIFQGDSLSPLWFCLALNPLSTLLEDSGLGYRLRRGGQVISHLLYMDDLKLFAHTDSQLKELLKITETFSSSIRMEFGVDKCAVMHVKRGEIMESVGTQLTSSINLRALSASETYKYLGMSEALGINVTDMKQSLKERFFGRLKKVLNSLLSGGNKVRAFNGWVMPVLMYSFGILKWTQTELDALDQRVRTLLTANRLHHPRSSVMRLYIPRKCGGRGFLNAKTLHNREVCSLREYFLETDVGMHRDVVAADKGLTPLSLAKENWRKPVVLDTNDRLEVWKSKELHGRFFRALHGPDIDFQASVAWLRFGDLFGETEGFVFAIMDEVMMTNNYRRFIVKDGTVDICRACHRPGESIRHIISGCSRLANGEYLHRHNLVARIIHQQLALKYNLVESEVPYYRYMPDPVLEHGHITLYWDRSIITDRTIVANKPDIVLVDRSERRAMIVDITIPHDENLVKAEKDKQIKYLDLAHEVVDMWEVDSAIIVPIVVTANGLIAKSLDQHLRRLSLGSWIKGLIQKAVLLDTARIVRKFLSLEP

SEQ ID NO: 13210 - protein, 1200 aa, Sesamia nonagrioides
MLTRSAARRARSPPPDSSPSSASPPPVSSPTVNAVMTPAAAVALSSSDEYFSPPTTPPPVRRRGGRRPPDCLGPRGPPASDRAPATGGNVQRMKWTQSINENVMRAYFGATEGGSNLTAYRGRMLSLFQVLEPAVNVSAQRLSDQVRVIQRNHMLDDVVLDRLRLESRNSHVTPASSLVAVQLNSVPSRPNLVDEEDDDEAISVTPQCNEKVRSALEDAFREYRSTPPELRPRLPRLPMHKKNKALVCALDSQLSNYLKDSKDLADTHSILYCGAVAICRVAHVKFPDSDRATRPKPAVPAWQCRIERRIGETRALIGKLISFREGNTRLRVMRFVRRAFSGTDVSTRDYLLRVTERIDFLKQKIYAWANRIRRYRRRVERYSQNRNFQSDERWVYRAWERSDQGVTDTCLPDDDATRSFWRNIWSVPVSHTEGGWTRDVERACDPVPEMGAITICPQDVARAVRPLPNWKSPGPDGLHNFWIKWFSGSHACLASQFQTALESGSLPQFLTTGITHLLHKSGSTAEPKNYRPITCLPTVYKVLTSILKAKINTHIDSNSIMSASQNGCRNGSRGTKELLLIDMAISQQVRRSRKDLSTCWIDYKKAYDSVPHTWLMRVLELYKVDATLRTFLMTCMSQWRTVLRYPGCRNIQRNSEPIRIERGIFQGDSLSPLWFCLALNPLSTLLEDSGLGYRLRRGGQVISHLLYMDDLKLFAHTNSQLKELLKITETFSSAIRMEFGVDKCAVMHVQRGEIVESVGTQLTGSINLRSLSASETYKYLGMSEALGINVTDMKQSLKERFFGRLKKVLNSLLSGGNKVRAFNGWVMPVLMYSFGILKWTQTELDALDQRVRTLLTANRLHHPRSSVMRLYIPRKCGGRGFLNAKTLHNREVCSFREYFLKTDVGMHRDVVAVDKGLTPLSLAKENWRKPVVLETNDRMEVWQSKELHGRFFRALRGPDVDFQASVAWLRYGDLFGETEGFVCAIMDEVMMTNNYRKFIVKDGTVDICRACHRPGESIRHIISGCSRLANGEYLHRHNLVARIIHQQLALKYNLVESEVPYYRYMPDPVLENGHITLYWDRSIITDRTIVANKPDIVMVDRSERRAMIVDITIPHDENLVKAEKDKQIKYLDLAHEVVDMWEVDSAIIVPIVVTANGLIAKSLDQHLRRLSLGGWIKGLIQKAVLLDTARIVRKFLSLEP

SEQ ID NO: 13211 - protein, 983 aa, Sesamia nonagrioides
MLSVSTALLRLNLDLVYLDCPCIKKNKALVCALDSQLSYYLKDSKDLTDTHSILYCGAVAICRVAHVKFPDSDRATRPKSAVPAWQCRIKRRIGETRALIGKLTSFREGNTRPRVMHFVKRAFSGTDTSTRDYLFRVTERIDFFKQKIYAWANRIRRYKRRIERYSQNRNFQSDERRVYRAWERSDQGVTDTCLPDDDAMCSFWRNIWSVPVSHTEGSWTRVVERACDPVPEMGAITICPQDVARAVRPLPNWKSPGPDGLHNFWIKWFSGSHARLASQFQTALESGSLPQFLTTGVTHLLHKSGSTAEPKNYRPITCLPTVYKVLTSIFKSKINTHIDSNSIMSASQNGCRSGSRGTKELLLIDMAISQQVRRSRKDLSTCWIDYKKAYDSVPHTWLMRVLELYKVDATLRTFLMTCMRTWRTVLRYPGCRNIQRNSEPIRIERGIFQGDSLSPLWFCLALNPLSTLLEDSGLGYRLRRGGQVISHLLYMDDLKLFAHTDSQLRELLKITETFSSSIRMEFGVDKCAVMHVKRGEIMESVGTQLTSSINLRALSPSETYKYLGMSEALGINVTDMKQSLKERFFGRLKKVFNSLLSGGNKVRAFNGWVMPVLMYSFGILKWTQTELDALDQRVRTLLTANRLHHPWSSVMRLYIPRNCGGRGFLNAKTLHNREVCSLREYFLETDVGMHRDVVAADKGLTPLSLAKENWRKPVVLDTNDRLEVWKSKELHGRFFRALHGPDVDFQASVAWLRFGDLFGETEGFVFAIMDEVMMTNNYRRFIVKDGTVDICRACHRPGESIRHIISGCSRLANGEYLHRHNLVARIIHQQLALKYNLVESEVPYYRYMPDPVLENGHITLYWDRSIITDRTIVANKPDIVLVDRSERRAMIVDITIPHDENLVKAEKDKQIKYLDLAHEVVDMWEVDSAIIVPIVVTANGLIAKSLDQHLRRLSLGSWIKGLIQKAVLLDTARIVRKFLSLEP

SEQ ID NO: 13212 - protein, 1168 aa, Sesamia nonagrioides
MLTRSAARRARPPSPDSLLSSASPPPASSTTVSAVTTPAAAVALSSSDEYFSPPTTPPPARRRGGRRPPDRLGPRGPSASDRVPAPGGSVQRMRWTQSINENVMRSYYGATEGGNNLTAYRVRMLSLFQVLEPAVNVSAQRLSDQVRVIQRNHMLDDTVLDRLRNEMQSTRIIAHQSQTAEIPPQPTNYADEGSNDRATNVSTQCNEELINALEAAIREYRFTPAEQRPRLPRLPMHNRNRALMTALDAQLSDYFDTCEDLTDTHSILYCAAVAACRVAHVKFPSDSRATRPKPVVPAWQRRIERRIGGARALIGKLICFREGNTRPRAMRFVRRAFAGTNISPQNYMARVTERIDFLKQKVYAWANRIRRYKRRVERYTQNRTFQSNERWVYRDWERPEQGVTDTCLPDDDAMCSFWRSIWSVPVSHTEGDWARDVERACDPIPEMGAITICPQDVACAVRPLPNWKSPGPDGLHNFWIKWFPRSHARLASQFQTALVSGSLPQFLTTGITHLLHKSGSTAEPKNYRPITCLPTVYKVLTSILKTKINKHIDSNSILSASQNGCRSGSCGTKELLLIDMAISQQVRRSRKDLSTCWIDYRKAYDSVPHTWLMRVLELYKVNATLRTFLMSCMKTWRTVLRYPGCRNIQRNSEPIRIERRIFQGDSLSPLWFCLALNPLSTLLEDSGLGYRLRRGGQVISHLLYMDDLKLFAPNNSQLRELLKITETFSSSIRMEFGVDKCAVMHVKRGEIMESVGTQLTDSINLRALSASETYKYLGMSETLGINVTDMKQSLKERFFGRLKKVLNSLLSGGNKVRAFNGWVMPVLMYSFGILKWTQTELDALDQRVRTLLTANRLHHPRSSVMRLYIPRKCGGRGFLNAKTLHNREVCSLRDYFLVTDVGMHRDVVAVDKGLTPLSLAKENWRKPVVLDTNDRMEVWKSKELHGRFFRALHGPDVDCQASVAWLRFSDLFGEAEGFVFAIMDVVTMTNNYRRFIVKDGTVDICRACHRPGESIRHIISGCSRLANGEYLHRHNHVARIIHQQLALKYNLVESEVPYYRYTPDPVLENGYITLYWDRPIITDRTIVANKPDIVMVDRSERRAMIVDITIPHDENPVKAEKDKQIKYLDLAHEVVDMWEVDSAIIVPIVVTANGLIAKSLDQHLRGSR

SEQ ID NO: 13213 - protein, 1197 aa, Sesamia nonagrioides
MLTRSAARLARPPSPDSLLSSALSPPVSSATVSAVTTPAAAVASSSSDEYISPPTTPPPVRRRGGRGPPDCLGPRGPPASDRVPAPGGSVQRMRWTQSINENVMRSYYGATEGGTNLTAYRVRMLSLFQVLEPAVNVSAQRLSDQVRVIQRNHMLDDTVLDRLRNEMQSSRIIAHQSQSAEIPPQPTIYADEGSNDRATNVSTQCNEELRNALEAAIREYRSISAELRPRLPRLPMHNRNRALMGALDAQLSNYFDTCEDLTDTHSILYCAAVAACRVAHVKFPSDSRATRPKPVIPAWQHRIERRIGGARALIGKLICFREGNTRPRVMRFVRRAFSGTNTSPQNYMARVTERIDFLKQKVYAWANRIRRYKRRVERYTQNRTFQSNERRVYRDWERPEQGVTDTCLPDDDAMCSFWRSIWSVPVSHTEGDWARDVERACDPIPEMGAITICPQDVACAVRPLPNWKSPGPDGLHNFWIKWFPRSHARLASQFQTALVSGSLPQFLTTGITHLLHKSGSTAEPKNYRPITCLPTVYKVLTSILKTKINKHIDSNSILSASQNGCRSGSRGTKELLLIDMAISQQVRRSRKDLSTCWIDYKKAYDSEPHTWLMRVLELYKVDATLRTFLMTCMRKWRTVLRYPGCRNIQRNSEPIRIERGIFQGDSLSPLWFCLALNPLSTLLEDSGLGYRLRRGSQVISHLLYMDDLKLFAPNNSQLNELLKITEIFSSSIRMEFGVDKCAVMHVKRGEIMEPVGTQLTSSINLRALSASETYKYLGMSEALGINVTDMKQSLKERFFGRLKKVLNSLLSGGNKVRAFNGWVMPVLMYSFGILKWTQTELDALDQRVRTLLTANRLHHPRSSVMRLYIPRKCGGRGLLNAKTLHNREICSLRDYFLETDVGMHRDVVAADKGLTPLSLTKENWRKPVVLDTNDRMEVWKSKELHGRFFRALHGPDVDFQASVAWLRFGDLFGETEGFVFAIMDEVMMTNNYRRFIVKDGTVDICRACHRPGESIRHIISGCSRLANGEYLHRHNLVARIIHQQLALKYKLVESEVPYYRYMPDPVLENGHITLYWDRSIITDRTIVANKPDIVLVDRSERRAMIVDITIPHDENLVKAEKDKQIKYLDLAHEVVDMWEVDSAIIVPIVVTANGLIAKSLDQHLRRLSLGSWIKGLIQKAVLLDTARIVRKFLSLEP

SEQ ID NO: 13214 - protein, 1197 aa, Sesamia nonagrioides
MLTRSAARRARPPSPDSLPSSASPPPASSTTVSAVTTPAAAVASSSSDEYFSPPTTPPPVRRRGGRRPPDCLGPRGPSASDRVPAPGGSVQRMGWTQSINENVMRSYYGATEGGNNLTAYRVRMLSLFQVLEPAVNVSAQRLSDQVRVIQRNHMLDDTVLDHLRNEMQSSRVITHQSQSAEIPPQPTNYADEGSNDRATNVSTQCNEELRSALEAAIREYRFMSAELRPRLPRLPMYNRNRALMAALDAQLSNYFDTCENLTDTHSILYCAAVAACRVAHVKFSSDSRATRPKPVVPAWQHRIERRIGGARAPIGKLICFREGNTRPRVMRFVRRAFSGTNTSPQNYMARITERIDFLKQKVYAWANRIHRYKRRVERYTQNRTFQSNQRWVYRDWERPEQGVADTCLPDDDAMCSFWRSIWSVPVSHTEGDWARDVERACDPIPEMGAITICPQDVARAVRPLPNWKSPGPDGLHNFWIKWFPRSHASLASQFQTALVSGSLPQFLTTGITHLLHKSGSTAEPKNYRPITCLPTVYKVLISILKAKINNHIDSNSIMSVSQNGCRSGSRGTKELLLIDMAISQQVRRSRKDLSTCWIDYKKAYDSVPHTWLMRVLELYKVDTTLRTFLMTCMGQCRTVLRYPGCRNIQRNSEPIRIERGIFQGDSLSPLWFCLALNPLSTLLEDSGLGYQLRRGGQVISHLLYMDDLKLFAANNLQLKELLKITETFSSAIRMEFGVDKCAVMHIKRGEIVESVGSQLTSSINLRALSASETYKYLGMSEALGINVTDMKQSLKERFFGRLKKVLNSLLSGGNKVRAFNGWVMPVLMYSFGILKWTQTELDALDRRVRTLLTANRLHHPRSSVMRLYIPRKCGGRGFLNAKTLHNREICSLREYFLETDVGMHRDVVAVDKDLTPLSLAKENWRKPVVLDTNDRMEVWKSKELHGRFFRALHGPDVDLQASVAWLRYGDLFGETEGFVCAIMDEVMMTNNYRRFIVKDGTFDICRACHRPGESIRHIISGCSRLANGEYLHRHNLVARIIHQQLALKYNLVESEVPYYRYMPDPVLENGHITLYWDRSIITDWTIVANKPDIVMVDRSERRAMIVDITIPHDENLVKAEKDKQIKYLDLAHEVVDMWEVDSAIIVPIVVTANGLIAKSLDQHLRRLSLGSWIKGLIQKAVLLDTARIVRKFLSLEP

SEQ ID NO: 13215 - protein, 868 aa, Sesamia nonagrioides
MRFVRRAFSGTDTSTRDYLFRVTERIDFFKQKIYAWANRIRRYKRRVERYSQNRNFQSDERRVYRAWERSDQGVTDTCLPDDDATCSFWRNIWSVPVSHTEGSWSRVVERACDPVPEMGAITICPQDVAHAVRPLPNWKSPGPDGLHNFWIKWFTRSHACLASQFQTALESGSLPQFLTTGVTHLLHKSGSTAEPKNYRPITCLPTVYKVLTSILKSKINTHIDSNSIMSASQNGCRSGSRGTKELLLIDMAISQQVRRSRKDLSTCWIDYKKAYDSVPHTWLMRVLELYKVDATLRTFLMTCMRTWRTVLRYPGCRNIQRNSEPIRIERGIFQGDSLSPLWFCLALNPLSTLLEDSGLGYRLRRGGQVISHLLYMDDLKLFAHTDSQLKELLKITETFSSSIRMEFGVDKCAVMHVKRGEIMESVGTQLTSSINLRALSASETYKYLGMSEALGINVTDMKQSLKERFFGRLKKVLNSLLSGGNKVRAFNGWVMPVLMYSFGILKWTQTELDALDRRVRTLLTANRLHHPRSSVMRLYIPRKCGGRGFLNAKTLHNREICSLREYFLTTDVGMHRDVVAVDKGLTPLSLAKENWRKPVVLDTNDRMEVWKSKELHGRFFTALHGPDVDLQASVAWLRFGDLFGETEGFVCAIMDEVMMTNNYRRFIVKDGTVDICRACHRPGESIRHIISGCSRLANGEYLHRHNLVARIIHQQLALKYNLVESEVPYYRYTPDPVLENDLITLYWDRSIITDRTIVANKPDIVLVDRSERRAMIVDITIPHDENLVKAEKDKQIKYLDLAHEVIDMWEVDSAIIVPIVVTANGLIAKSLDQHLRRLSLGSWIKGLIQKAVLLDTARIVRKFLSLEP

SEQ ID NO: 13216 - protein, 1231 aa, Sesamia nonagrioides
MLTRSAARRARSPPSDSSPSSASPPPVSSPTVNAVMTPAAAVALSSSDEYFSPPTTPPPVRRRGGRRPPDCLGPRGPPASDRAPATGGNVQRMKWTQTINENVMRAYFGATEGGSNLTAYRGRMLSLFQVLEPAVNVSAQRLSDQVRVIQRNHMLDDVVLDRLRLESRNSHVTPASSLVAVQFNSVPSRPNLVDEEDDDEAISVTPQCNEKVRSALEDAFREYRSTPPELRPRLPRLPMHKKNKALVCALDSQLSNYLKDSKDLADTHSILYCGAVAICRVAHVKFPDSDRATRPKPAVPAWQCRIERRIGETRALIGKLISFREGNTRPRVMRFVRRAFSGTDVSTRDYLLRVTERIDFLKQKIYAWANRIRRYRRRVERYSQNRNFQSDERWVYRAWERSDQGVTDTCLPDDDATRSFWRNIWSVPVSHTEGGWTRDVERACDPVPEMGAITICPQDVARAVRPLPNWKSPGPDGLHNFWIKWFSGSHACLASQFQTALESGSLPQFLTTGITHLLHKSGSTAEPKNYRPITCLPTVYKVLTSILKAKINTHIDSNSIMSASQNGCRNGSRGTKELLLIDMAISQQVRRSRKDLSTCWIDYKKAYDSVPHTWLMRVLELYKVDATLRTFLMTCMSQWRTVLRYPGCRNIQRNSEPIRIERGIFQGDSLSPLWFCLALNPLSTLLEDSGLGYRLRRGGQVISHLLYMDDLKLFAHTNSQLKELLKITETFSSAIRMEFGVDKCAVMHVQRGEIVESVGTQLTGSINLRSLSASETYKYLGMSEALGINVTDMKQSLKERFFGRLKKVLNSLLSGGNKVRAFNGWVMPVLMYSFGILKWTQTELDALDQRVRTLLTANRLHHPRSSVMRLYIPRKCGGRGFLNAKTLHNREVCSLREYFLKTDVGMHRDVVAVDKGLTPLSLAKENWRKPVVLETNDRMEVWQSKELHGRFFRALRGPDVDFQASVAWLRYGDLFGETEGFVCAIMDEVMMTNNYRKFIVKDGTVDICRACHRPGESIRHIISGCSRLANGEYLHRHNLVARIIHQQLALKYNLVESEVPYYRYMPDPVLENGHITLYWDRSIITDRTIVANKPDIVMVDRSERRAMIVDITIPHDENLVKAEKDKQIKYLDFGSRGCRHVGSGFSNHCTDSRDSQWLNSQEPRPTPQEALVRRLDQGLDSESGTAGHGSHCQEVPLSGALTAGSLDPVPDTGGLLFFIFLNVFVFFYTNI

SEQ ID NO: 13217 - protein, 975 aa, Apamea monoglypha
MSPELRPRLPRLPMHNKNRALVAVLDAQLSSHFDACEDLTDTHSILYCAAVAACRVAHVKFDSDSRATRPKPAIPAWQCRIERRIGGARALIGKLICFREGNTRPRVMRFVRRAFLGTDISSQDYLSRVTERIDFLKQKVYAWANRIRRYKRRVERYTQNRTFQSDERWVYRGWERPDQSVADTCLPDDDAMCSFWRSIWSAPVSHTEGDWTGKIERACELIPEMGAITICPQDVARAVRPLPNWKSPGPDGLHNFWIKWFQRSHAPLAAQFQSALESGLLPQFITTGITHLLHKSGSTADPKNYRPITCLPTIYKVLTSILRAKINKHIDSNSIMSVSQNGCRNGSRGTKELLLIDMAISQQVRRSRKDLSTCWIDYKKAYDSVPHTWLMRVLELYKVDTTLRTFLMTCMGQWRTVLRYPGCRNIQRNSEPIRIERGIFQGDSLSPLWFCLALNPLSTLLDDSGLGYRLRRGGQVISHLLYMDDLKLFAPNNLQLMKLLKITETFSSAIRMEFGVDKCAVMHVKRGEIVESVGTQLSDFTNLRALSAAETYKYLGMSEALGINVTDMKQSLKERFFGRLKKVFNSLLSGGNKVRAFNSWVMPVLMYSFGILKWTQTELEALDRRVRTLLTANRMHHPRSSVMRLYIPRKCGGRGFLNAKTLHNREICSLREYFLETDVGMHRDVVAVDKGLTPLSLAKENWRKPVVLDTNDRMEVWQSKELHGRFYRALHGPDVDLLASVAWLRFGDLFGETEGFVCAIMDEVMMTNNYRRYIVKDGTVDICRACHRPGESIRHIISGCSRLANGEYLHRHNLVARIIHQQLALKYSLVESEVPYYRYVPDPVLENGNITLYWDRSIITDRTIVANKPDIVVVDRSERRAMIVDITVPHDENLVKAEKDKQIKYLDLAHEVVDMWDVDSAIIVPIVVSANGLIAKSLDQHLRRLSLGSWIKGLIQKAVLLDTARIVRRFLSLEP

SEQ ID NO: 13218 - protein, 909 aa, Apamea monoglypha
MTETSHTTLAVQNIIERRIGGARALIGKLICFREGNTRPRVMRFVRRAFSGTDISSQDYLSRVTERIDFLKQKVYAWANRIRRYKRRVDRYTQNRTFQSDERWVYRGWERPDQGVADTGLPDDDAMCSFWRSIWSAPVSHTEGDWARDVERACDPIPEMEAITICPQDVARAVRPLPNWKSPGPDGLHNFWIKWFSRSHARLASQFQTALESGSLPQFLTTGVTHLLHKSGSTAEPKNYRPITCLPTVYKVLTSILRAKINNHIDTNSIMSASQNGCKNGSRGTKELLLIDMAISQQVRRSRKDLSTCWIDYKKAYDSVPHTWLMRVLDLYKVDATLRTFLMSCMRQWRTVLRYSGCRNIQRNSEPIRIERGIFQGDSLSPLWFCLVLNPLSTLLEDSGLGYRLRRGGQVISHLLYMDDLKLFAPNNLQLMEILKVTETFSSAIRMEFGVDKCAVMHVKRGEIVEFVGTQLSDSTNLRALSASETYKYLGMSEALGINVTDMKQSLKERFFGRLKKVLNSLLSGGNKVRAFNSWVMPVLMYSFGILKWTQTELDALDRRVRTLLTANRMHHPRSSVMRLYIPRKCGGRGFLNAKTLHNREICSLREYFLETDVGMHRDVVAVDKGLTPLSLAKENWRKPVVLDTNDRLEVWQSKELHGRFYRVLHGPDVDLLASVAWLRFGDLFGETEGFVSAIMDEVMMTNNYRRFIVKDGTVDICRACHRPGESIRHIISGCSRLANGEYLHRHNLVARIIHQQLALKYSLVESEVPYYRYVPDPVLENGNITLYWDRSIITDRTIVANKPDIVVVDRSERRAMIVDIIVPHDENLVKAEKDKQIKYLDLAREVVDMWDVDSAIIVPIVVTANGLIAKSLDQHLRRLSLGSWIKGLIQKAVLLDTARIVRRFLSLEP

SEQ ID NO: 13219 - protein, 1198 aa, Apamea monoglypha
MLTRSAARRARLPSPDSSLSSASPPPVPSPTVSAVTTPAAVVASSSSDEYFSPPTTPPPARRRGGRRPPDGLGPRGPLASDRVPAPGGSVQRMRWTRSINENVMRSYYGATEGGNNLTAYRVRLLSLFQVLEPAVNVSAQRLSDQVRVIQRNHMLDDTVLDRLRSEMQSSHVIAPQSQTAAVLPQSNTSHADEGSNDRATNVSIQCNEELRNALEGAIREYRFMSPELRPRLPRLPMHNKNRALVAVLDAQLSSHFDACEDLTDTHSILYCAAVAACRVAHVKFDSDSRATRPKPAIPAWQCRIERRIGGARALIGKLICFREGNTRPRVMRFVRRAFLGTDISSQDYLSRVTERIDFLKQKVYAWANRIRRYKRRVERYTQNRTFQSDERWVYRGWERPDQDVADTCLPDDDAMCSFWRSIWSAPVSHTEGDWAREVERACDPIPEMEAITICPQDVARAVRPLPNWKSPGPDGLHNFWVKWFTRSHARLASQFQTALESGSLPQFLTTGVTHLLHKSGSTAEPKNYRPITCLPTVYKVLTSILRAKINKHIDTNSIMSASQNGCKNGSRGTKELLLIDMAISQQVRRSRKDLSTCWIDYKKAYDSVPHTWLMRVLDLYKVDATLRTFLMSCMGQWRTVLRYPGCRNIQRNSEPIRIERGIFQGDSLSPLWFCLALNPLSTLLEDSGLGYRLRRGGQVISHLLYMDDLKLFAPNNLQLMELLKVTETFSSDIRMEFGVDKCAVMHVKRGEIVESVGTQLSDSTNLRALSVSETYKYLGMSEALGINVTDMKQSLKERFFGRLKKVLNSLLSGGNKVRAFNSWVMPVLMYSFGILKWTQTELDALDRKVRTLLTANRMHHPRSSVMRLYIPRKCGGRGFLNAKTLHNREICSLREYFLENDVGMHRDVVAVDKGLTPLSLAKENWRKPVVLDTNDRMEVWQSKELHGRFYRALHGPDVDLLASVAWLRFGDLFGETEGFVCAIMDEVMMTNNYRRFIVKDGTVDICRACHRPGESIRHIISGCSRLANGEYLHRHNLVARIIHQQLALKYNLVESEVPYYRYVPDPVLENGNITLYWDRSIITDRTIVANKPDIVVVDRSERRAMIVDITVPHDENLVKAEKDKQIKYLDLAREVVDMWDVDSTVIVPIVVTANGLIAKSLDQHLRRLSLGSWIKGLIQKAVLLDTARIVRRFLSLEP

SEQ ID NO: 13220 - protein, 962 aa, Furcula furcula
MHKRNRALVCALDSLLSSYFDSSEDLADAHSLLYCAAMTACRVARVKFPSTDAATRPRPAVPAWQFRIECRIGEARVLIGKLNCFREGNTRPRVMRFVRRAFSGTGIDPREYLSRVTERIDFLKQKVCAWANRIRRYKARVDRYSQSNMFQRDQRWVYRSWERSSQIEGDGRRPDDSAMTTFWRNIWSVPVTHSEGDWMRDVEQICEPLPEMGAITIRPQDVADAVRPMPNWKAPGPDGLHNFWLKWIRSSHICLASLFQSALESGSLPEFMTMGITHLLHKTSSTTDPKNYRPITCLPTVYKTLTSILRAKIYRHVEDNSIMSASQNGCRSGARGTKELLLIDMAICQQARRNRKDLSTCWIDYKKAYDSVPHTWLMRVLELYKVNPTLRTFLASCMRQWRTVLLYPGSRQILGNGDPIRIERGIFQGDSLSPLWFCLALNPLSTLLRGSGLGCRLRRGGQVISHLLYMDDLKLFAPTELQLMGLLKVTETFSNSISMEFGVDKCAVMHVKRGRMVESRSVQLLDTTDLRTLSATETYKYLGMSQALGINETDMKQSLRERFLGRLRKVLKSLLSGGNRVRAYNGWVMPVLMYSFGILKWTQTELDTLDRTVRTLLTTYRMHHPRSSVMRLYIPRKCGGRGFLNAKTLHNREICNLREYFLHCGGVMHTDVVAVDNGLTPLSLAKGNWRKPVVLTTGNREAVWQSKELHGRFYRALHGPDVDFSASVAWLRFGDLFGETEGFVCAIMDEVVMTNNYRKYILRDGTIDICRACHRPGESLRHIISGCSRLANGEYLHRHNQVARIIHQQLALKYRLVMSEVPYYRYVPEPVLEDGHITLYWDRSIITDRTIVANKPDIVLIDRNERRAMIVDVTVPHDENLVKAEKDKECKYLDLAHEVVDMWDIDRAIIVPIVVSAHGLMAKSLDKHLKRLTLGGWIKGQMQKAVLLETARIVRRFLSLEP

SEQ ID NO: 13221 - protein, 1196 aa, Furcula furcula
MLTRNKARMRPPGSPPRSASQSSRLNAEADGTPAAVASSESDEYFSPPTSPPPVCRRRGRPPRDMGRLGQPAPNRVLAPGGVVRRMKWTSSINESVMRAYYEATEGGTNLTAYRNRMLSLFQALEPAVNVSAQRLSDQVRAIQRGHMLDGPVLDRLRSEVQGSRVVPCIPSSQAVAPVVNTALVLRLAANSDDDRDDMTTDVSTNVSTQLRSTLEDVVREYRTMPQSLRPRLPRLPMHRRNRALVCALDSLLSSYFDSSEDLADAHALLYCAAITACRVARVKFPDAATRPKPAVPAWQYRIERRIGEARVLIGKLTCFREGNTRPRVMRFVRRAFSGTGIDPREYLSRVTERIDFLKQKVCAWASRVRRYRARVDRYSQNNMFQRDQRWVYRSWERPSQTVGEVQRPDDDAMIRFWRNIWSVPVAHSEGDWIGDVEEVCEPLPEMGPITIGPQDVADAVRPLPNWKAPGPDGLHNFWLKWLPSSHVCLASLFQSALESGSLPEFMTTGITHLLHKTDSTTNPKNYRPITCLPTVYKTLTSILRAKIYRHVEDNSIMSSSQNGCKSGARGTKELLLIDMAICQQARRNRKDLSTCWIDYKKAFDSVPHTWLMRVLELYKVNTTLRTFLASCMRQWRTVLLYPGSRQTLGNGDPIRIERGIFQGDSLSPLWFCLALNPLSTLLKSSGLGCRLRRGGQVISHLLYMDDLKLFAPTELQLTGLLKVTETFSNSIRMEFGVDKCAVMHVKRGRMVESRSVQLSDSTDLRTLSATETYKYLGMSQALNINETDMKQSLRERFLGRLRKVLKSLLSGGNKVRAYNGWVMPVLMYSFGILKWTQTELDALDRTVRTLLTTYRMHHPRSSVMRLYIPRKCGGRGFLNAKTLHNREIYNLREYFLHCGGEMHTDVVAVDNGLTPLSLAKGNWRKPVVLTTGDREAVWQSKELHGRFYRALHGPDVDFSASVAWLRFGDLFGETEGFVCAIMDEVVMTNNYRKYILRDGTIDICRACHRPGESLRHIISGCSRLANGEYLHRHNQVARIIHQQLALKYRLVTSEVPYYRYVPEPVLEDGHITLYWDRSIITDRTIVANKPDIVLIDRTERRAMIVDVTVPHDENLVKAEKDKQCKYLDLAHEVVDMWDIDNAIIVPIVVSAHGLMAKSLDKHLKRLTLDGWIKGQMQKAVLLETARIVRKFLSLEP

SEQ ID NO: 13222 - protein, 1200 aa, Furcula furcula
MLTRSRNKARLRPPDSSPRSASQSPQLNQEANGTPAPVASSESDEYFSPPTSPPPVRRRRGRPPRELGLLEQPAPNRVLAPGGVVRRMRWTSSINENVMRAYYEATEGGTSLTAYRNRMLSLFQALEPAVNVSAQRLSDQVRALQRSHMLDGAVLDRLRSEVQGSRVAPCTSSSQAVAPAVNTAPAPRLVAISDDDRDDITTNVSTNISTQLRSTLEDVVREYRTMPCGLRPRLPRLPMHKRNRALVCALDSLLSSYFDSSEDLADAHSLLYCAAMTACRVARVKLQNTDAATRPRPAVPAWQCRIERRIGEARVLIGKLTCFREGNTRPRVMRFVRRAFSGTGIDPREYLSRVAERIDFLKQKVCAWASRIRRYRARADRYFQNNMFQRDQRWVYRSWERPSQTEGDVRRPDDDAMATFWRNIWSVPVTHSEGDWIRDVEQVCEPLPEMGAITIWPQDVADAVRLLPNWKAPGPDGLHNFWLKSIRSSHICLASLFQSALESGSLPEFMTTGITHLLHKTNSTTDPKNYRPITCLPTVYKTLTSILRTKIYRHVEDNSIMSASQNGCRSGARGTKELLLIDMAICQQARRNRKDLSTCWIDYKKAYDSVPHTWLMRVLELYKVNATLRTFLASCMRQWRTVLRYPGSRQTLGDGEPIRIERGIFQGDSLSPLWFCLALNPLSTLLKSSGLGYRLRRGGQVISHLLYMDDLKLFAPTELQLMGLLRVTETFSNSIRMEFGVDKCAVMHVKRGRIVESRSVQLSDSTDLKTLSATETYKYLGMSQALGINETDMKQSLRDRFLGRLRKVLKSLLSGGNRVRAFNGWVMPVLMYAFGILKWTQTELDTLDRTVRTLLTTYRMHHPRSSVMRLYIPRKCGGRGFLNAKTLHNREIYNLREYFLHCGGEMHTDVVAVDNGLTPLSLAKGNWRKPVVLTTGDREAVWQSKELHGRFYRALHGPDVDFSASVAWLRFGDLFGETEGFVCAIMDEVVMTNNYRKYILRDGTIDICRACHRPGESLRHIISGCSRLANGEYLHRHNQVARIIHQQLALRYRLVTSEVPYYRYVPEPVLEDGHITLYWDRSIITDRTIVANRPDIVLIDRTERRAMIVDVTVPHDENLVKAEKDKECKYLDLAHEVVDMWDIDKAIIVPIVVSAHGLMAKSLDKHLKRLTLDGWIKGQIQKAVLLETARIVRRFLSLEP

SEQ ID NO: 13223 - protein, 1193 aa, Furcula furcula
MLTRSKAHLRPPDSSPHSASQPPGPSRDGSLAAVASSESDEYFSPPTSPPPVRRRRGQPPRELGLLEQPAPNRVLAPGGVVRRMRWTLSINENVMRAYYKATEGGTNLTAYRDRMLSLFRALEPAVNVSAQRLSDQVRAIQRGHMLDDAVLDRLRSEVQGSRVVPCIPSSQAVAQAVNTAPAPRPAANSGDDRDDMTTDVSTNVSSQLRSTLEDVVREYRTMPQGLRPRLPRLPMHKRNRALVCALDSLLSSYFDSSEDLADAHALLYCAAITACRVARVKFPDAATRPKPAVPAWQCRIERRIGEARVLIGKLTCFREGNMRPRVMRFVRRAFSGTGIDPREYLSRVTERIDFLKQKVCAWANRIRRYRARVDRYSQNNMFQRDQRWVYRSWERPSQIVGEVQRPDDAMIRFWRNIWSVPVTHSEGDWIGDVEEVCEPLPEMGPITIGPQDVADAVRPLPNWRAPGPDGLHNFWLKCIRSSHICLASLFQSAVESGSLPEFMTTGITHLLHKTDSTTNPKNYRPITCLPTVYKTLTSILRAKINRHVEDNSIMSSSQNGCRSGARGTKELLLIDMAICQQARRNRKDLSTCWIDYKKAFDSVPHTWLMRVLELYKVNTTLRTFLASCMRQWRTVLLYPGSRQTLGNGDPIRIERGIFQGDSLSPLWFCLALNPLSTLLKSSGLGCRLRRGGQVISHLLYMDDLKLFAPTELRLMGLLKVTETFSNSIRMEFGVDKCAVMHVKRGRMVESRSVQLSDSTDLRTLSETETYKYLGMSQALNINDTAMKQSLRERFLGRLRKVLKSLLSGGNKVRAYNGWVMPVLMYSFGILRWTQTELDTLDRTVRTLLTTYRMHHPRSSVMRLYIPRKCGGRGFLNAKALHNREICNLREYFLHCSGEMHTDVVAVDNGLTPLSLAKGNWRKPVVLTTGDREAVWQSKELHGRFYRALHGPDVDFTASVAWLRFGDLFGETEGFVCAIMDEVVMTNNYRRYILRDGTIDICRACRRPGESLRHIISGCSRLANGEYLHRHNQVARIIHQQLALKYRLVTSEVPYYRYAPEPVLEDGHITLYWDRSIITDRTIVANKPDIVLIDRTERRAMIVDITVPHDENLVKAEKDKQCKYLDLAHEVVDMWDIDDAIIVPIVVSAHGLMAKSLDKHLKRLSLDGWIKGQIQKAVLLETARIVRKFLSLEP

SEQ ID NO: 13224 - protein, 1196 aa, Furcula furcula
MLTRHKARLRPPDSSPRSASQPPAPSTGGPPAAVASSESDEYFSPPSSPPPVCRRRGRPPRDLGLLGQPAPNRVLVPGGVVRRMKWTLSINENVMRAYYEATEGGTNLTAYRDRMLSLFQTLEPAVNVSAQRLSDQVRAIQRGHMLDDAVLDRLRSEVQGSRVVPCIPSSQAVAPAVNTAPAPRLAATSGDDRDDMSTNISTNVSTQLRSTLEDVVREYRTMPQGLRPRLPRLPMHKRNRALVCALDSLLSSYFDSSEDLADAHSLLYCAAMTACRVARVKFPNSDAATRPRPAVPAWQCRIERRIGEARVLIGKLTCFREGNTRPRVMRFVRRAFSGTGIDPREYFSCVTERIDFLKQKVCAWANRIRRYRARVDRYSQNNMFQRDQRWVYRSWERPSQIGGEVQRPDDDAMIRFWRNIWSVPVTHSEGDWIRDVEQVCEPIPEMGAITIRPQDVADAVRPLPNWKAPGPDGLHNFWLKWLRSSHACLASLFQSAVESGSLPEFLTTGITHLLHKTNSTADPKNYRPITCLPTVYKTLTSILRAKIYRHVEGNSIMSASQNGCRSGARGTKELLLIDMAICQQACRNRRDLSTCWIDYKKAYDSVPHTWLVRVLELYKVNTTLRTFLASCMRQWRTVLLYPGSRQTLGDGEPIRIERGIFQGDSLSPLWFCLALNPLSTLLKSSGLGYRLRRGGQVISHLLYMDDLKLFAPTEVQLMGLLKVTETFSSSIRMEFGVDKCAVMHVKRGRLVESRSIQLSDSTDLRTLSATETYKYLGMSQALGINETDMKQSLRECFLGRLRKVLKSLLSGGNRVRAYNGWVMPVLMYSFGILKWTQTELDTLDRTVRTLLTAYRMHHPRSSVMRLYIPRKCGGRGFLNAKTLHNREIYNLREYFLHCGGEMHTDVVAVDSGLTPLSLAKGNWRRPVVLTTGDREAVWQSKELHGRFYRALHGPDVDFSASVAWLRFGDLFGETEGSVCAIMDEVVMTNNYRKYILRDGTIDICRACHRPGESLRHIISGCSRLANGEYLHRHNQVARIIHQQLALKYRLVTSEVPYYRYVPEPVLEDGHITLYWDRSIITDRSIVANRPDIVLIDRTERRAMIVDVTVPHDENLVKAEKDKECKYLDLAHEVVDLWDIDKAIIVPIVVSAHGLMAKSLDKHLKRLTLDGWIKGQMQKAVLLETARIVRKFLSLEP

SEQ ID NO: 13225 - protein, 868 aa, Arctia plantaginis
MRFVKQAFLGTTIGPQQYMSCVTERIDFLKQKIYAWANRIRRYKKRIDRYNQNRMFQRNEKWVYRKWEEPNPCVSHGHLPDENVTHTFWRNIWSVPVTHIEGDWLWDVRRSCESITPMEPVIIDKDDVSCAVRSLPNWKSPGLDGLHNFWLKWFRSSHACLASQFQAALNSGSLPQFLTTGITHLLYKSGSVMDPKIFRPITCLPTMYKLLTSILRLKITLHINNNSIMSVSQNGCRSGSRGTKDLLIIDRAISQQVRRNRKSLATCWIDYKKAYDSVPHTWLLRVLELYKIDTTLCTFLKSCMGQWRTVLRYPGCRQTTVIDAPIKIERGIFQGDSLSPLWFCLALNPLSTLLEGSGLGYRLQKDDQVISHLLYMDDLKLLAATKLQLSALLKVTENFSNSIKMEFGVDKCAVMYVKKGEIVESEGIELSDSTKLRSLSATETYKYLGISQSLGIPESDMKQTLQERFFVRLKKVLKSLLSRGNKVRACNGWVMPIVMYSFGILKWTQTELDALDRRVRTLLTAFRMHHPRSSVMRLYIPRKLGGRGLLNIKTLHNREICNLREYFLHTDVGMHRNVVAVDIGFTPLALAKENWRKPVVFSTNDRREVWKGKELHGRFYRALNRSDIDFKASTTWLRYGDLFGETEGFVCAIMDEVIMTNNYRKYILKDGTVDICRACHRPGESIRHIISGCSRLANGEYLHRHNQVARIVHQQLALKYHLVNLEVPYYRYVPDPVLENGRATLYWDRSIITDRTIVANKPDIVVIDRLERRAIIVDIAVPHDENLVKVEKEKQIKYLDLSHEIVDMWNVDSVIIVPIVVSAHGLIAKSLDQHLKRLTLDGWIKGLIQKAVLLDTARIVRRFLSLQS

SEQ ID NO: 13226 - protein, 1198 aa, Mamestra configurata
MLTRAAAQRARLPPPASSLSSASPPPEPSPTVSAVIPAVAVASSSSDEYFSPPTSPPPARRRRGRRPPDGLGPRGPPASDRVPAPGGSVQRMRWTQTINENVMRSYYGATEGGTNLTAYRGRMLSLFQVLEPAVNVSAQRLSDQVRVIQRNRMLDDAVLDRLRLESRNGRVSAASPPAAVQIQSSVSPRPNIVGEDDDDGAISVSTQCNERLRSALEDAFREYRSTPPELRPRLPRLPMHNKNRALVCALDSQLANCFDSSEDLADTHSILYCAAAAACRVAHVKFPNSDRATRPAVPAWQCRIERRIGEARALIGKLICFREGNTRRRVMRFVRRAFSGTDTSPRDYLTRVTERIDFLKQKIYAWANRIRRYKRRVERYTQNRTFQSNERWVYRAWERPDQGVTDTRLPDDDVMCSFWRNIWSVPVSHTEGDWTREVERACDPIPEMGAITISPQDVARAVRPLPNWKSPGPDGLHNFWIKWFKRSHARLASQFQSALESGSLPQFLTTGITHLLHKSGSTAEPKNYRPITCLPTVYKVLTSILRAKINQHIETNSIMSASQNGCRNRSRGTKELLLIDVAISQQVRRSRRDLSTCWIDYKKAYDSVPHTWLMRVLELYKVDAVLRTFLMSCMGQWRTVLRYPGCRQIQANSDPIRIERGIFQGDSLSPLWFCLALNPLSTLLEGSGQGYRLRRGGQVISHLLYMDDLKLFAPNNLQLMKLLKVTETFSSAISMEFGVDKCAVMHVKRGEIMESVGTQLSDSIHLRSLSSTETYKYLGMSEALGINANDVKQSLKERFFGRLNKVLNSLLSGGNKVRAFNGWVMPVLMYSFGILKWTQTELDALDRRVRSLLTANRMHHPRSSVMRLYIPRKCGGRGFLNAKTLHNREICSLREFFLEADVGMHRDVVAVDKGLTALSLANENWRKPVVLDTNDRREVWQSKELHGRFYRVLHGPDVDFLASVAWLRFGDLFGETEGFVCAIMDEVMMTNNYRKYIVKDGTVDICRACHRPGESIRHIISGCSSLANGDYLHRHNLVARIIHQQLALKYNLVESEVPYYRYVPDPVLENGNCTLYWDRSIITDRTIVANKPDIVVIDRLERRAMIFDISVPHDENLVKTEKDKQTKYLDLAREVVDMWDVNTAVIVPIVMTANGIIAKSLDQHLKRLSLSSWIKGLIQKPVLLDTARIVRRFLSQGP

SEQ ID NO: 13227 - protein, 1207 aa, Amphipyra berbera
MLTRSRAKAIAQNTRPRPSASSLGSASQPPDSSIVSDVTPAAAVASSSSDEYFSPPSTPPPPPPRRRGRGRPPASLGPRGPPASDRVPAPGGSVQRMRWTPTMNENCMRAYFGATEGGTNLTAYRGRMLSLFQVLEPAVNVSAQRLSDQVRVIQRDHRLTDDALDRLRSEVQSNCIISLQSQTAAQPQVPPMVPPQPIRADEESDDRVTIVSAQCNEQLRSALELAIREYRFTPPNLRPRIPRLPMNRQNRALMCALDSLLSNYFDNSEGLEDTHSILYCAAVAACRVAHVKFDNNDRATRPKPAVPAWQCRIERRINEARALIGKLICFREGNTRPRVMRFVRRAFSGTDINPREYMSRVTERIDFLKQKVYAWANRIRRYKRRVERYTQNRMFHSDERWVYRTWERPEHDVSDTHLPDNDVMNTFWRNIWSMPVTHTEGDWMQEVQRACEPIEEMGDIIIVPQDVTSAVRPMVNWKSPGPDGLHNFWLKWLRSSHARLASQFQSSLESGSLPPFLTTGITHLLHKSGSTVEPKNYRPITCLPTIYKLLTSILRAKINTHIINNSIMSASQNGCKNGSRGTKELLLIDMAISQQVRRSRKDLSTCWIDYKKAYDSVPHTWLMRVLELYKVNTTLCAFLTSCMGQWRTVLHYPGCRQIQGRGEPIRIERGIFQGDSLSPLWFCLALNPLSTLLEGSGLGYRLRRGGQVISHLLYMDDLKLFAPNNLQLMKLLKVTETFSNSIRMEFGVDKCAVMHVKRGGIMESVGTQLSDSIHLRSLSSTETYKYLGMSEALGINETDMKQSLRERFYGRLKKVLKSLLSGGNKVRAFNGWVMPVLMYSFGILKWTQTELDALDRRVRTLLTAYRMHHPRSSVMRLYIPRKCGGRGFLNAKTLHNREVCSLREYFLQADVGMHRDVVAVDKGFTPLSLAKENWRKPVVLDTNGRREVWQSKELHGRFYRALHGPDVDFLASVAWLRFGDLFGETEGFVCAIMDEVMMTNNYRKYIVKDGTVDICRACHCPGESIRHIISGCSRLANGEYLHRHNLVARIIHQQLALKYNLVDAEVPYYKYVPDPVLENGHITLYWDRSIITDRTIVANKPDIVVIDRTERLTMIVDITVPHDENLVKAEKDKEIKYQDLAHEVVDMWEVDSAVIVPIVVTANGLIAKSLDHHLTRLSLGSWVKGLIQKAVLLDTARIVRKFLSLRP

SEQ ID NO: 13228 - protein, 1203 aa, Amphipyra berbera
MLTRARARKQTAHPRSPDSSLSSASQPPESSPPVSAVTPAAAVASSSSDEYYSPPSSPPPVRRRGGARPPACLGPRGQPATNRVPAAGGNVSRMRWTQSINENVMRAYYGATEGGINLTAYRERMLFLFQVLEPAINISAQRLSDQVRVVQRNRRLDDTVLDRLRSEARNSQTVTFPVQAAVQMQPLAVPPRPIHVDGEGDGEAINVSNQCSEELRSALDDAILEFRTTPPEIRPRLPRLPMHGKNRALMCALDSLLSNYFDGSEDLADTHSILYCAAIAACRVAHVKFTENERATLPKPAVPAWQSRIERRIGGARVLIGKLICFREGNNRPRVMRFVRRAFSGTDISPRDYMSHVTERIDFLKQKVYAWANRIRRYKRRVERYTQNRIFQSDQRQVYRAWERPDFGGGDVRLPDDDALSSFWRSIWSVPIAHTEDGWMRDIEQACEPIAEMEPITITPQDVADAARPLPNWKSPGPDGLHNFWLKWLRSSHARLASQFQSSLESGSLPQFLTTGVTHLLYKSGSTAEPKNYRPITCLPTVYKLLTSILRVKITTHIDNNCIMSASQNGCRKGSRGTKELLLIDMAISQQVRRSQKDLSTCWIDYKKAYDSVPHSWLMRVLELYKINTTLRTFLMSCMRHWRTVLRYPGCRRIRGSGEQIRIERGIFQGDSLSPLWFCLALNPLSTLLEGTGLGYQLRRGGQVISHLLYMDDLKLFAPTDLQLMELLKVTENFSNSIRMEFGVDKCAVMHVKRGRIAESEGIQLPNSVQLRSLSPTETYKYLGMSEALGISETDMRQSLRERFFGRLNKLLKSLLSGGNKVRAFNGWVMPVLMYSFGTLKWTQADLDTLDRRVRALLTAHRMHHPRSSVMRLYIPRKCGGRGFLNAKTLHNREVYSLREYFLQAEGVMHRDVVAVDKGFTPLALARENWRKPAVLSTNDREVVWQSKELHGRYYRALHGPDVDFSASVSWLRSGNLFGETEGFVCAIMDEVMMTNNYRKYIVKDGTVDICRACHRPGESIRHIVSGCSRLANGEYLHRHNLVARIIHQQLALKYNLVESEVPYYRYVPDPVLENGHATLYWDRSIITDRTIVANKPDIVVIDRSERRTMIVDITVPHDENLVKAEKDKQIKYLDLAHEVVGMWDVDSAVIVPIVVTANGIIAKSLDIHLMRLSLGGWIKGLIQRAVLLDTARIVRRFLSLEP

SEQ ID NO: 13229 - protein, 1208 aa, Amphipyra berbera
MLTRSRTKTQDTRTRPRPSASSLSSASQPPDSSIVSDVTPAAAVASSSSDEFYSPPTSPPPPPRRGRRGRGRPPACMGPRGPPASDRVPAPGGSVQRMRWTLTMNENCMRAYFGATEGGTNLTAYRGRMLSLFQVLEPTVNVSAQRLSDQVRVIQRDHRLTDAALDRLRSEVQSNRIISLQSQTAAQPQTPTVVPPLPIHADEESDDRVTNVSTQCNEQLRSALELAIREYRFTPPNIRPRIPRLPMHRKNRALMCALDSLLSSYFDNSENLEDTHSILYCAAVAACRVAHAKFDNNDRATRPKPAVPAWQCRIERRINEARALIGKLICFREGNTRPRVMRFVRRAFSGTDINPRDYLSRVTERIDFLKQKVYAWANRIRRYKRRVERYTQNRMFHSDERWVYRTWERPDHDVSDTHLPDNDVMNTFWRNIWSMPVTHAEGDWMQEVQRACEPIEEMGDITIVPQDVTSAVRPMANWKSPGPDGLHNFWLKWLRSSHARLASQFQSSLESGSLPEFLTTGVTHLLHKSGSTAEPKNYRPITCLPTVYKLLTSILRAKINSHIINNSIMSVSQNGCKNGSRGTKELLLIDMAISQQVRRSRKDLSTCWIDYKKAYDSVPHTWLMRVLELYKVNTTLCAFLTSCMGQWRTVLHYPGCRQIQGRGEPIRIERGIFQGDSLSPLWFCLALNPLSTLLEGSGLGYRLRRGGQVISHLLYMDDLKLFAPNNLQLVKLLKVTETFSNSIRMEFGVDKCAVMHVKRGGIMESVGTQLSDSIHLRSLSSTETYKYLGMSEALGINETDMKQSLRERFYGRLKKVLKSLLSGGNKVRAFNGWVMPVLMYSFGILKWTQTELDALDRRVRTLLTAYRMHHPRSSVMRLYIPRKCGGRGFLNAKTLHNREVCSLREYFLHADVGMHRDVVAVDKGFTPLSLAKENWRKPVVLDTNGRREVWQSKELHGRFYRALHGPDVDFLASVAWLRFGDLFGETEGFVCAIMDEVILTNNYRKYIVKDGTVDICRACHCPGESIRHIISGCSRLANGEYLHRHNLVARIIHQQLALKYNLVDAEVPYYKYVPDPVLENGHITLYWDRSIITDRTIVANKPDIVVIDRSERLAMIVDITVPHDENLVKAEKDKEIKYQDLAHEVVDMWEVDSAVIVPIVVTANGLIAKSLDQHLTRLALGSWIKGLIQKAVLLDRARIVRKFLSLRP

SEQ ID NO: 13230 - protein, 1205 aa, Amphipyra berbera
MLTRSRAKALYETTRPRSSAPSLSSASQPPDSSIVSDVTPAAAVASSSSDEYFSPPTSPPPARRRGRGRPPDSLRPRGPLASDRVPAAGGSVQRMRWTPTMNENCMRAYFGATEGGTNLTAYRGRMLSLFQVLEPTVNVSAQRLSDQVRVIQRDHRLTDAALDRLRSEVQSNAIISLQSQTAAQPRTPTVVPLLPTHGNEESDDRVTNVSTQCNEQLRSALELAIQEYRFTPPNIRPRIPRLPMHRKNRALMCALDSLLSSYFDNSENLEDTHSILYCAAVAECRVAHAKFDNNDKATRPKPAVPAWQCRIERRINEARALIGKLICFREGNTRPRVMRFVRRAFSGTDINPRDYMSRVTERIDFLKQKVYAWANRIRRYKRRVERYTQNRMFHSDERWVYRTWERPDHDVNDTHPPDNDVMNTFWRNIWSMPVTHTEGDWMQEVQRACEPIEEMGDITIVPQDVTSAVRPMANWKSPGPDGLHNFWIKWLRSSHARLASQFQSSLESGSLPEFLTTGVTHLLHKSGSTAEPKNYRPITCLPTVYKLLTSILRARINSHIINNSIMSVSQNGCKNGSRGTKELLLIDIAISQQVRRSRKDLSTCWIDYKKAYDSVPHTWLMRVLELYKVNTTLCAFLTSCMGQWRTVLHYPGCQQIQGRGEPIRIERGIFQGDSLSPLWFCLALNPLSTLLEGSGLGYRLRRGGQVISHLLYMDDLKLFAPNNLQLVKLLKVTETFSNSIRMEFGVDKCAVMHVKRGRIMESVGTQLSDSIHLRSLSSTETYKYLGMSEALGINEADMKQSLRERFYGRLKKVLKSLLSGGNKVRAFNGWVMPVLMYSFGILKWTQTELDALDRRVRTLLTAYRMHHPRSSVMRLYIPRKCGGRGFLNAKTLHNREVCSLREYFLQADVGMHRDVVAVDKGFTPLSLAKENWRKPVVLDTNGRREVWQSKELHGRFYRALHGPDVDFLASVAWLRFGDLFGETEGFVCAIMDEVMMTNNYRKYIVKDGTVDICRACHCPGESIRHIISGCSRLANGEYLHRHNLVARIIHQQLALKYNLVDAEVPYYKYVPDPVLENGHITLYWDRSIITDRTIVANKPDIVVIDRSERLTMIVDITVPYDENLVKAEKDKEIKYQDFAHEVVDMWEVDSAVIVPIVVTANGLIAKSLDQHLTRLSLGSWVKGLIQKAVLLDTARIVRKFLSLRP

SEQ ID NO: 13231 - protein, 1205 aa, Amphipyra berbera
MLTRSRAKALTETTRPRSSAPSLSSASQPPDSSIVSDVTPAAAVASSSSDEYFSPPTSPPPARRRGRGRPPDSLRPRGPLASDRVPAAGGSVQRMRWTPTMNENCMRAYFGATEGGTNLTAYRGRMLSLFQVLEPTVNVSAQRLSDQVRVIQRDHRLTDAALDRLRSEVQSNAIISLQSQTAAQPRTPTVVPPLPTHGNEESDDRVTNVSTQCNEQLRSALELAIQEYRFTPPNIRPRIPRLPMHRKNRALMCALDSLLSSYFDNSENLEDTHSILYCAAVAACRVAHAKFDNSDKATRPKRAVPAWQCRIERRINEARALIGKLICFREGNTRPRVMRFVRRAFSGTDINPRDYMSRVTERIDFLKQKVYAWANRIRRYKRRVERYTQNRMFHSDERWVYRTWERPDHDVNDTHPPDNDVMNTFWRNIWSMPVTHTEGDWMQEVQRACEPIEEMGDITIVPQDVTSAVRPMANWKSPGPDGLHNFWIKWLRSSHARLASQFQSSLESGSLPEFLTTGVTHLLHKSGSTAEPKNYRPITCLPTVYKLLTSILRAKINSHIINNSIMSVSQNGCKNGSRGTKELLLIDMAISQQVRRSRKDLSTCWIDYKKAYDSVPHTWLMRVLELYKVNTTLCAFLTSCMGQWRTVLHYPGCRQIQGRGEPIRIERGIFQGDSLSPLWFCLALNPLSTLLEGSGLGYRLRRGGQVISHLLYMDDLKLFAPNNLQLMKLLKVTETFSNSIRMEFGVDKCAVMHVKRGGIMESVGTQLSDSIHLRSLSSTETYKYLGMSEALGINETDMKQSLRERFYGRLKKVLKSLLSGGNKVRAFNGWVMPVLMYSFGILKWTQTELDALDRRVRTLLTAYRMHHPRSSVMRLYIPRKCGGRGFLNAKTLHNREVCSLREYFLQADVGMHRDVVAVDKGFTPLSLAKENWRKPVVLDTNGRREVWQSKELHGRFYRALHGPDVDFLASVAWLRFGDLFGETEGFVCAIMDEVILTNNYRKYIVKDGTVDICRACHCPGESIRHIISGCSRLANGEYLHRHNLVARIIHQQLALKYNLVDAEVPYYKYVPDPVLENGHITLYWDRSIITDRTIVANKPDIVVIDRSERLAMIVDITVPHDENLVKAEKDKEIKYQDLAHEVVDMWEVDSAVIVPIVVTANGLIAKSLDQHLTRLALGSWIKGLMQKAVLLDTARIVRKFLSLRP

SEQ ID NO: 13232 - protein, 1209 aa, Amphipyra berbera
MQTRSRAKATVTQNTRPTPSVSSLSSASQPPDSSIVSDVTPAAAVASSSSDEFYSPPSSPPPSPPPRRRGRGRPPASLGPRGPPVSDRVPAPGGSVQRMRWTPTMNENCMRAYFGATEGGTNLTAYRGRMLSLFQALEPAVNVSAQRLSDQVRVIQRDHRLTDAALDRLRSEVQSNRIISLQSQNAAQPQVPCMVPPRPNHADEESDDRVTNVSTQCNEQLRSALEHAIREYRFTPPNLRPRIPRLPMNKKNRALMCALDSLLSSYFDNSEGLEDTHSILYCAAVAACRVAHAKFDNNDRDTRPKPAVPAWQCRVERRINEARALIGKLICFREGNTRPRVMRFVRRAFSGTDINPRDYMSRVTERIDFLKQKVYAWANRIRRYKWRVERYTQNRMFHSDERRVYRTWERPDHDVSDTHLPDSDVMNTFWRNIWSMLVTHTEGDWMQEVQRACEPIEEMGDVTIVPQDVTSAVRPMSNWKSPGPDGLHNFWLKWLRSSHARLASQFQSSLESGTLPQFLTTGVTHLLHKSGSTAEPKNYRPITCLPTVYKLLTSILRSKISTHITNNFIMSTSQNGCKNGSRGTKELLLIDMTISEQVRRSRKDLSTCWIDYKKAYDSVPHTWLMRVLELYKVNTTLCAFLTSCMGQWRTVLHYPGCRQIQGRGEPIRIKRGIFQGDSLSPLWFCLALNPLSTLLEGSGLGYRLRRGGQVISHLLYMDDLKLFAPNNLQLVKLLKVTETFSNSIRMEFGVDKCAVMHVKRGGIMESVGTQLSDSIHLRSLSSTETYKYLGMSEALGINVADMKQSLRERFYGRLKKVLKSLLSGGNKVRAFNGWVMPVLMYSFGILKWTQTELDALDRRVRTLLTAYRMHHPRSSVMRLYIPRKCGGRGFLNAKTLHNREVCNLREYFLQADVGMHRDVVAVDKGFTPLSLAKENWRKPVVLDTTGRRDVWQSKELHGRFYRALHGPDVDFLASVAWLRFGDLFGETEGFVCAIMDEVIMTNNYRKYIVKDGTVDICRACHCPGESIRHIISGCSRLANGEYLHRHNLVARIIHQQLALKYNLVDAEVPYYKYVPDPVLENGHITLYWDRSIITDRTIIANKPDIVVIDRSERLTMIVDITVPHDENLVKAEKDKEIKYQDLAHEVVDMWEVDSAVIVPIVVTANGLIAKSLDQHLMRLSLGSWVKGLIQKAVLLDTARIVRKFLSLRP

SEQ ID NO: 13233 - protein, 1197 aa, Noctua janthe
MLTRSAARRARLSPPDPSLSSASPPPESRPVVSAVTPAVAVASSSSDEYFSPPTTPPPVRRRGGRRPPDGLGPRGPSASDRVPAPGGSVPRMRWTQSINANVMRAYYGATEGGNNLTAYRVRMLSLFQVLEPAVNVSAQRLSDQVRVIQRNGMLDDTVLDRLRTEMQSSHVIATPPQTVVPPQSTIIPTHDNNVSNDMVTNVSTQCNEEMRCALEGTIREYRFMQPDLRPRVPRLPMHNKNRVLVAVLDSQLSNYFDNCEDLTDAHSVLYCAAVAACRVAHVKFSDDRATRTKPAVPSWQYRIERRIGEARALIGKLICFREGNTRPRVMRFVRRAFSGTDISPRDYMSRVTERIDFLKQKVYAWANRIRRYKRRVDRYTQNRTFQRDERWVYRAWERPDQGVADTRLPDDDAMCSFWRSIWSVPVSHTEGEWTREVERACDLVPEMGAITISPQDIVRAVRPLPNWKSPGPDGLHNFWIKWFTRSHARLAILFQSALESGSLPEFLTTGITHLLHKSGSTAEPKNYRPITCLPTVYKVLTSILRAKINKHIDDNSVMSASQNGCRNGSRGTKELLLIDMAISQQVRRSRRDLSTCWIDYKKAYDSVPHTWLMRVLELYKVDSTLRIFLMSCMGQWRTVLRYPGCRQIQRNSEPIRIERGIFQGDSLSPLWFCLALNPLSTLLEDSGLGYRLRRGGQVISHLLYMDDLKLFAPNDLQLMELLKVTETFSSAIRMEFGVDKCAVMHVKRGEIVESVGTQLSDSINLRSLSATETYKYLGMSEALGINVADMKQSLKERFFGRLKKVFNSLLSGGNKVRAFNGWVMPVLMYSFGILKWTQTELDALDRRVRTLLTAYRMHHPRSSVMRLYIPRRCGGRGFLNAKTLHNREICSLREYFLETDVGMHRDVVAVDKGLTPLSLAKENWRKPVVLDTNDRMEVWQSKELHGRFFRALHGPDVDLPASVAWLRSGDLFGETEGFVCAIMDEVMMTNNYRRFIVKDGTVDICRACHRPGESIRHIISGCSRLANGEYLHRHNLVARIIHQQLALKYNLVESEVPYYKYVPDPVLENGSITLYWDRSIVTDRTIVANKPDIVVVDRSERRAMIVDITVPHDGNLVKAEKDKQIKYLDLAHEVVDMWDVDSAIIVPIVVSAHGLIAKSLDQYLRRLSLGSWIKGLIQKAVLLDTARIVRRFLSLEP

SEQ ID NO: 13234 - protein, 935 aa, Noctua janthe
MLTQSCMYCAAVAACRVAHVKFSDDRATRPKPAVPSWQYRIERRIGEARALIGKLICFREGNTRPRVMRFVRRAFSGTDISARDYMSRVTERIDFLKQKVYAWANRIRRYKRRVDRYTQNRTFQRDERWVYRAWERPDQGVADTRLPDDDAMCSFWRSIWSVPVSHTEGEWTREVERACDLVPEMGAITISPQDVVRAVRPLPNWKSPGPDGVHNFWIKWFTRSHARLAILFQSALESGSLPEFLTTGITHLLHKSGSTAEPKNYRPITCLPTVYKVLTSILRAKINKHIDDNSVMSASQNGCRNGSRGTKELLLIDMAISQQVRRSRKDLSTCWIDYKKAYDSVPHTWLMRVLELYKIDATLRTFLMACMGQWRTVLRYPGRRQIQRNSEPIRIERGIFQGDSLSPLWFCLALNPLSTLLEDSGLGYRLRRGGQVISHLLNMDDLKLFAPNDLQLMELLKVTETFSSAIRMEFGVDKCAVMHVKRGEIVESVGTQLSDSINLRSLSATETYKYLGMSEALGINVADMKQSLKERFFGRLKKVFNSLLSGGNKVRAFNGWVMPVLMYSFGILKWTQTELDALDRRVRTLLTAYRMHHPRSSVMRLYIPRRCGGRGFLNAKTLHNREICSLREYFLETDVGMHRDVVAVDKGLTPLSLAKENWRKPVVLDTNDRMEVWQSKELHGRFFRALHGPDVDLSASVAWLRSGDLFGETEGFVCAIMDEVMMTNNYRRFIVKDGTVDICRACHRPGESIRHIISGCSRLANGEYLHRHNLVARIIHQQLALKYNLVESEVPYYKYVPDPVLENGSITLYWDRSIITDRTIVANKPDIVVVDRSERRAMIVDITVPHDENLVKAEKDKQIKYLDLAREVVDMWDVDSAIIVPIVVSAHGLIAKSLDQYLRRLSLGSWIKGLIQKAVLLDTARIVRRFLSLEP

SEQ ID NO: 13235 - protein, 974 aa, Noctua janthe
MQPDLRPRVPRLPMHNKNRVLVAVLDSQLSNYFDNCEDLTDAHSVLYCAAVAACRVAHVKFSDDRATRSKPAVPSWQYRIERRIGEARALIGKLICFREGNTRPRVMRFVRRAFSGTDISARDYMSRVTERIDFLKQKVYAWANRIRRYKRRVDRYTQNRTFQRDERWVYRAWERPDQGVADTRLPDDDAMCSFWRSIWSVPVSHTEGEWTREVERACDLVPEMGAITISPQDVVRAVRPLPNWKSPGPDGLHNFWIKWFTRSHARLAILFQSALESGSLPEFLTTGITHLLHKSGSTAEPKNYRPITCLPTVYKVLTSILRAKINKHIDDNSVMSASQNGCRNGSRGTKELLLIDMAISQQVRRSQKDLSTCWIDYKKAYDSVPHTWLMRVLELYKIDATLRTFLMSCMGQWRTVLRYPGCRQIQRNSEPIRIERGIFQGDSLSPLWFCLALNPLSTLLEDSGLGYRLRRGGQVISHLLYMDDLKLFAPNDLQLMELLKVTETFSSAIRMEFGVDKCAVMHVKRGEIVESVGTQLSDSINLRSLSATETYKYLGMSEALGINVADMKQSLKERFFGRLKKVFNSLLSGGNKVRAFNGWVMPVLMYSFGILKWTQTELDALDRRVRTLLTAYRMHHPRSSVMRLYIPRRCVGRGFLNAKTLHNREICSLREYFLETDVGMHRDVVAVDKGLTPLSLAKENWRKPVVLDTNDRMEVWQSKELHGRFFRALHGPDVDLSASVAWLRSGDLFGETEGFVCAIMDEVMMTNNYRRFIVKDGTVDICRACHRPGESIRHIISGCSRLANGEYLHRHNLVARIIHQQLALKYNLVESEVPYYKYVPDPVLENGSITLYWDRSIITDRTIVANKPDIVVVDRSERRAMIVDITVPHDENLVKAEKDKQIKYLDLAREVVDMWDVDSAIIVPIVVSAHGLIAKSLDQYLRRLSLGSWIKGLIQKAVLLDTARIVRRFLSLEP

SEQ ID NO: 13236 - protein, 977 aa, Noctua janthe
MSPDLRPRLPRLPMNKKNRALVCALDALLPNFIESSTNLCDTHSILYCTAVAACRVANVKFPNTDSPTRPKSAVPAWQCRIERRINEARALIGKLICFREGNTRPRVMRFVRRAFSGTDISPREYMSRVTERIDFLKQKVYAWANRIRRYRRRVDRYTQNRMFQSDERWVYRTWERPVTIQGVTDAHLPDNDAMNAFWRSIWSVPVGHTEGDWMRVVERACDSIPEMEAISISPLDVACAVRPLPNWKSPGPDGLHNFWIKWLQRSHACLASQFQSSLETGSLPPFFTTGVTHLLYKSGSTVEPKNYRPITCLPTVYKVLTSILRAKIVRHIDSNSIMSVSQNGCKNGSRGTKELLLIDMAISQQVRRSRRDLSTCWIDYKKAYDSVPHTWLMRVLELYKIDATLRTFLMSCMGQWRTVLLYPGCRQVLGNDEPIRIERGIFQGDSLSPLWFCLALNPLSTLLEDSGLGYRLRRGGQVISHLLYMDDLKIFAPSSLQLMELLKVTETFSSAIRMEFGLDKCAVIHVKRGEIMESVGTQLSDSIFLRSLSSTETYKYLGMSEALGINAADMKQSLKERFFGRLNKVLNSLLSGGNKVRAFNGWVMPVLMYSYGILKWTQTELDALDRKVRTLLTANRMHHPRSSVMRLYIPRKCGGRGFLNAKTLHNREVCSLREYFLETDVGMHRDVVSVDKSFTPLSLANQNWRKPVVLDTNNRREVWQSKELHGRFFRALHGPDVDFLASVSWLRFGDLFGETEGFVCAIMDEVIMTNNYRKYIIKDGTVDICRACHRPGESIRHIVSGCSRLANGEYLHRHNLVAKIIHQQLALQYNLVSSEVPYYKYVPDPVLENGHATLYWDRSIITDRTILANKPDIVVIDRRERRAMIVDITVPHDENLVKAENDKKIKYLDLAHEVVDMWDVDSAIIVPIVVTVNGLIAESLDQHLRRLSLRGWVKSLIQKAVLLDTARIVRRFLSLEP

SEQ ID NO: 13237 - protein, 1197 aa, Noctua janthe
MLTRSAARRARLSPPDPSLSSASPPPESRPVVSAVTPAVAVASSSSDEYFSPPTTPPPVRRRGGHRPPDGLGPRGPSASDRVPAPGGSVPRMRWTQSINANVMRAYYGATEGGNNLTAYRVRMLSLFQVLEPAVNVSAQRLSDQVRVIQRNGMLDDTVLDRLRTEMQSSHVIATPPQTVVPPQSTIIPTHDNNVSNDMVTNVSTQCNEEMRCALEGAIREYRFMQPDLRPRVPRLPMHNKNRVLVAVLDSQLSNYFDNCEDLTDAHSVLYCAAVAACRVAHVKFSDDRATRTKPAVPSWQYRIERRIGEARALIGKLICFREGNTRPRVMRFVRRAFSGTDISPRDYMSRVTERIDFLKQKVYAWANRIRRYKRRVDRYTQNRTFQRDERWVYRAWERPDQGVADTRLPDDDAMCSFWRSIWSVPVSHTEGEWTREVERACDLVPEMGAITISPQDIVRAVRPLPNWKSPGPDGLHNFWIKWFTRSHARLAILFQSALESGSLPEFLTTGITHLLHKSGSTAEPKNYRPITCLPTVSKVLTSILRAKINKHIDDNSVMSASQNGCRNGSRGTKELLLIDMAISQQVRRSRRDLSTCWIDYKKAYDSVPHTWLMRVLELYKVDSTLRIFLMSCMGQWRTVLRYPGCRQIQRNSEPIRIERGIFQGDSLSPLWFCLALNPLSTLLEDSGLGYRLRRGGQVISHLLYMDDLKLFAPNDLQLMELLKVTETFSSAIRMEFGVDKCAVMHVKRGEIVESVGTQLSDSINLRSLSATETYKYLGMSEALGINVADMKQSLKERFFGRLKKVFNSLLSGGNKVRAFNGWVMPVLMYSFGILKWTQTELDALDRRVRTLLTAYRMHHPRSSVMRLYIPRRCGGRGFLNAKTLHNREICSLREYFLETDVGMHRDVVAVDKGLTPLSLAKENWRKPVVLDTNDRMEVWQSKELHGRFFRALHGPDVDLPASVAWLRSGDLFGETEGFVCAIMDEVMMTNNYRRFIVKDGTVDICRACHRPGESIRHIISGCSRLANGEYLHRHNLVARIIHQQLALKYNLVESEVPYYKYVPDPVLENGSITLYWDRSIVTDRTIVANKPDIVVMDRSERRAMIVDITVPHDGNLVKAEKDKQIKYLDLAQEVVDMWDVDSAIIVPIVVSAHGLIAKSLDQYLRRLSLGSWIKGLIQKAVLLDTARIVRRFLSLEP

SEQ ID NO: 13238 - protein, 1023 aa, Noctua janthe
MINKVVPPQSTIIPTHDNNVSNDMVTNVSTQCNEEMRCALEGAIREYRFMQPDLRPRVPRLPMHNKNRVLVAVLDSQLSNYFDNCEDLTDAHSVLYCAAVAACRVAHVKFSDDRATRPKPAVPSWQYRIERRIGEARALIGKLICFREGNTRPRVMRFVRRAFSGTDISARDYMSRVTERIDFLKQKVYAWANRIRRYKRRVDRYTQNRTFQRDERWVYRAWERPDQGVADTRLPDDDAMCSFWRSIWSVPVSHTEGEWTREVERACDLVPEMGAITISPQDVVRAVRPLPNWKSPGPDGLHNFWIKWFTRSHARLAILFQSALESGSLPEFLTTGITHLLHKSGSTAEPKNYRPITCLPTVYKVLTSILRAKINKHIDDNSVMSASQNGCRNGSHGTKELLLIDMAISQQVRRSRKDLSTCWIDYKKAYDSVPHTWLMRVLELYKIDATLRTFLMSCMGQWRTVLRYPGCRQIQRNSEPIRIERGIFQGDSLSPLWFCLALNPLSTLLEDSGLGYRLRRGGQVISHLLYMDDLKLFAPNDLQLMELLKVTETFSSAIRMEFGVDKCAVMHVKRGEIVESVGTQLSDSINLRSLSATETYKYLGMSEALGINVADMKQSLKERFFGRLKKVFNSFLSGGNKVRAFNGWVMPVLMYSFGILKWTQTELDALDRRVRTLLTAYRMHHPRSSVMRLYIPRRCGGRGFLNAKTLHNREICSLREYFLETDVGMHRVVVAVDKGLTPLSLAKENWRKPVVLDTNDRMEVWQSKELHGRFFRALHGPDVDLSASVAWLRSGDLFGETEGFVCAIMDEVMMTNNYRRFIVKDGTVDICRACHRPGESIRHIISGCSRLANGEYLHRHNLVARIIHQQLALKYNLVESEVPYYKYVPDPVLENGSITLYWDRSIITDRTIVANKPDIVVIDRSERRAMIVDITVPHDENLVKAEKDKQIKYLDLAREVVDMWDVDSAIIVPIVVSAHGLIAKSLDQYLRRLSLGSWIKGLIQKAVLLDTARIVRRFLSLEP

SEQ ID NO: 13239 - protein, 1200 aa, Mythimna ferrago
MLTRSRARSQIAQPTSSGSSFSSASQPPGPAPAVSPEIPVAAVASSSSDEYFSPPTTPPPARRRGRGRPPACLGPRGPPASDRVLAAGGSVQRMRWTQSINENVMRSYFGATEGGTNLTAYRGRMLSLFQVLEPAVNVSAQRLSDQVRVIQRNRMLDDAVLDRLRLESRNGRVSPISPPAAVQRQPSISPRPDHVGEDDDDEAISVSTQCNARLRSALEDAFREYRSIPPELRPRLPRLPMHRKNRALVCALDSQLSNCFDSSEDLSDTHSILYCAAAAACRVAHVKIPNNDRATRPAKPAWQCRIERRIGEARALIGKLICFREGNTRPRVMRFVRRAFSGTDISPRDYLPRITERIDFLKQKVYAWANRIRRYKRRVERYTQNHTFQSNERWVYRAWERPDQSVIDTRLPDDDAMYSFWRSIWSVPVNHTEGDWTREIERECELIPEMGAINISPQDVARAVRPLPNWKSPGPDGLHNFWLKWFQSSHARLASQFQSTLESGSLPQFLTTGITHLLHKSGSTAEPKNYRPITCLPTVYKVLTSILRAKINNHIETNSIMSASQNGCRNGSRGTKELLLIDVAISQQVRRSRRDLSTCWIDYKKAYDSVPHTWLMRVLELYKVDATLRAFLMSCMGQWRTVLHYPGCRRVSENSEPLRIERGIFQGDSLSPLWFCLALNPLSTLLEGSGLGYRLRREGQVISHLLYMDDLKLFASNNLQLMELLKVTETFSSAIRMEFGLDKCAVMHVKRGEIMESVGTQLSDSIHLRSLCSTETYKYLGMSEALGINAADVKQSLRERFFGRLNKVLNSLLSGGNKVRAFNGWVMPVLMYSFGILKWTQTELDALDRRVRTLLTANRMHHPRSSVMRLYIPRKCGGRGFLNAKTLHNREVCSLREYFLETDVGMHRDVVAVDKGLTPLSLANENWRKPIVMDTNERKEVWKGKELHGRFYRALHGPDVDLLASVSWLRFGNLFGETEGFVFAIMDEVMMTNNYRKYIVKDGTVDICRACHRPGESIRHIISGCSHLANGDYLHRHNLVARIIHQQLALKYNLVESEVPYYKYVPDPVLENGSVTLYWDRSIITDRTIVANKPDIVVIDRLERRTMIVDIAVPHDENLVKAEKDKQTKYLDLAREVVDMWEVDRAIIVPIVVTANGLIAKSLDQHLRRLSLGSWIKGLIQKAVLLDTARIVRRFLSQEP

SEQ ID NO: 13240 - protein, 1075 aa, Mythimna ferrago
MLSLFQVLETAVNVSAQRLSDQVRVIQRNRMLDDAVLDRLRLESRNGCVSPVSPPAAVQRQPSVSPRPDHVGEDDDDGAISVSTQCNVRLRSALEDAFREYRSIPPELRPRLPRLPMHRKNRALVCALDSQLSNCFDSSEDLTDTHSILYCAAAAACRVAHVKIPNSDRATRPAKPAWQCRIERRIGEARALIGKLICFREGNTRPRVMRFVRRAFSGTDISPRDYLPRITERIDFLRQKVYAWANRIRWYKRRVERYTQNRAFQSNKRWVYRAWERPDQSVIDTRLPDDDAMYSFWRSIWSVPVNHTEGDWTRKVERECELLPEMGAVTISPQDVARAVRPLPNWKSPGPDGLHNFWLKWFKSSHARLASQFQSALESGSLPQFLTTGITHLHKSGSTAEPKNYRPITCLPTVYKVLTSILRAKINSHIETNSIMSASQNGCRNGSRGTKELLLIDVAISQQVRRSRRDLSTCWIDYKKAYDSVPHTWLMRVLELYKIDVTLRTFLMSCMGQWRTVLHYPGCRRVSENSEPLRIERGIFQGDSLSPLWFCLALNPLSTLLEGSGVGYRLRREGQVISHLLYMDDLKLFASNNLQLMELLKVTETFSSAIRMEFGLDKCAVMHVKRGEIMESVGTQLSDSIHLRSLCSTETYKYLGMSEALGINAADVKQSLRERFFGRLNKVLKSLLSGGNKVRAFNGWVMPVLMYSFGILKWTQTELDALDRRVRTLLTANRMHHPRSSVMRLYIPRKCGGRGFLNAKTLHNREVCSLREYFLETDVGMHRDVVAVDKGLTPLSLANENWRKPIVMDTNERKEVWKGKELHGRFYRALHGPDVDLLASVSWLRFGDLFGETEGFVFAIMDEVMMTNNYRKYIVKDGTVDICRACHRPGESIRHIISGCSHLANGDYLHRHNLVARIIHQQLALKYNLVESEVPYYRYVPDPVLENGSVTLYWDRSIITDRTIVANKPDIVVIDRLERRTMIVDIAVPHDENLVKAEKDKQTKYLDLAREVVDMWEVDRAIIVPIVVTANGLIAKSLDQHLRRLSLGSWIKGLIQKAVLLDTARIVRRFLSQEP

SEQ ID NO: 13241 - protein, 1200 aa, Mythimna ferrago
MLTRSRARSQIAQPTSSGSSLSSASQPPGPAPAVSPEIPAAAVASSSSDEYFSPPTTLPPARRRGRGRPPACLGLRGPPASDRVPAAGGSVQRMRWTESINENVMRSYFGATEGGTNLTAYRGRMLSLFQVLEPAVNVSAQRLSDQVRVIQRNRMLDDAVLDRLRLESRNGRVTPISPPAAVQRQPSVSPRPDHVGEDDDDGAISVSTQCNARLRSALEDAFREYRSIPPELRPRLPRLPMHRKNRALVCALDSQLSNCFDSSKDLTDTHSILYCAAAAACRVAHVKIPNSDRATRPATPAWQCRIERRIGEARALIGKLICFREGNTRPRVMRFVRRAFSGTDISPRDYLPRITERIDFLRQKVYAWANRIRRYKRRVERYTQNRAFQSNERWVYRAWERPDQSVIDTRLPDDDAMYSFWRSIWSVPVSHTEGDWTREVERECELIPEMGAITISPQDVARAVRPLPNWKSPGPDGLHNFWLKWFKSSHARLASQFQSALESGSLPQFLTTGITHLLHKSGSIAEPKNYRPITCLPTVYKVLTSILRAKINSHIETNSIMSASQNGCRNGSRGTKELLLIDVAISQQVRRSRRDLSTCWIDYKKAYDSVPHTWLMRVLELYKIDVTLRAFLMSCMGRWRTVLHYPGCRRVSENSEPLRIKRGIFQGDSLSPLWFCLALNPLSTLLEGSGLGYRLRREGQVISHLFYMDDLKLFASNNLQLMELLKVTETFSSAIRMEFGLDKCAVMHVKRGEIMESVGSQLSDSIHLRSLSSTETYKYLGMSEALGINAADVKQSLRERFFGRLNKVLKSLLSGGNKVRAFNGWVMPVLMYSFGILKWTQTELDALDRRVRTLLTANRMHHPRSSVMRLYIPRKCGGRGFLNAKTLHNREVCSLREYFLETDVGMHRDVVAVDKGLTPLSLANENWRKPIVMDTNERKEVWKGKELHGRFYRALHGPDVDLLASVSWLRFGDLFGETEGFVFAIMDEVMMTNNYRKYIVKDGTVDICRACHRPGESIRHIISGCSHLASGDYLHRHNLVARIIHQQLALKYNLVESEVPYYRYVPDPVLENGSVTLYWDRSIITDRTIVANKPDIVVIDRLERRTMIVDIAVPHDENLVKAEKDKQTKYLDLAREVVDMWEVDRAIIVPIVVTANGLIAKSLDQHLRRLSLGSWIKGLIQKAVLLDTARIVRRFLSQEP

SEQ ID NO: 13242 - protein, 1200 aa, Mythimna ferrago
MLTRAAARRARPPPLASSLSSASLPPEPSLTVSAVTPAAAAASSSSDEYYSPPTTPPPARRRGGRRPPACLGPRGPPVSDRVPAAGGSVPRMRWTQSTNENVMRAYYGATEGGNNLTAYRVRMLSLFQVLEPAVNVSAQRLSDQVRVIQRNNMLDDTVLDRLRTEMSNRVITPPSQPVVPVVVPQSSHISLHTDEVSTDTVTNVSTQCNNELRSALECAIREYRNMPLELRPRLPRLPMHNKNKALVAVLDSQLSNYFDDCEDLTDTHSIMYCAAVAACRVAHVKFPNSDVATRPKLAVPAWQYRIERRIGGARALIGKLICFREGNTRPRVMRFVRRAFSGTDISPRDYMSRVTERIDFLKQKLYAWANRIRRYKRRVERYIQNSTFRSNERWVYRAWERPDQGVTDTRPPDDDAMCSFWRNIWSVPVSHTEGGWTREVERACESVTEMGAITISPQDVARAVRPLPNWKSPGPDGLHNFWIKWLQRSHARLASQYQAALESGSLPEFLTTGVTHLLHKSGSTAEPKNYRPITCLPTVYKVLTSILRAKINHHVDNNAIMSASQNGCRNGSRGTKELLLIDMAISQQVRRSRKDLSTCWIDYKKAYDSVPHTWLMRVLELYKVDATLRTFLMSCMRQWRTVLRYPGCRNIQRNSEPVRIERGIFQGDSLSPLWFCLALNPLSTLLENSGLGYRLKRGGQVISHLLYMDDLKLFAPNNLQLMELLKVTETFSSAIRMEFGVDKCAVMHIKRGEIVESVGIQLSDSIHLRSLSPTETYKYLGMSEALGINATDMKQSLRERFFGRLKKVLNSLLSGGNKVRAFNGWVMPVLMYAFGVLKWTQTELDALDRRVRTLLTAYRMHHPRSSVMRLYIPRKCGGRGFLNAKSLHNREVCSLREYFLAADGGMHRDVVAVDKGLTPLSLANENWRKPVVLDTNVRREVWQSKELHGRFFRALHGPDVDQLASVAWLRVGDLFGETEGFVCAIMDEVIMTNNYRRFIVKDGTVDICRACHRPGESIRHIISGCSRLANGEYLHRHNLVARIIHQQLALKYSLVESEVPYYRYVPDPVLDSGDITLYWDRSIITDRTIVANKPDIVVVDRSERRAMIVDISVPHDENLAKAEKDKQIKYIDLAREVVDMWEVDSAIIVPIVVSANGLIAKSLDQHLRRLSLGDWIKGLIQKAVLLDTARIVRRFLSLEP

SEQ ID NO: 13243 - protein, 1200 aa, Mythimna ferrago
MLTRSRARQQQTHPTSSDSSFSSASQPPGPAPAVSPVIPVAAVASSSSDEYFSPPTTPPPARRRGRGRPPACLGPRGPPASGGVPAAGGSVQRMRWTQSINENVMRSYFGATEGGTNLTAYRGRMLSLFQVLEPAVNVSAQRLSDQVRVIQRNRMLDDAVLDRLRLESRNGRVSPVSPPAAVQLQPSVSPRPDHVGEDDDDGAISVSTQCNARLRSALEDAFREYRSIPPELRPRLPRLPMHRKNRALVCALDSQLSNCFDSSEDLTDTHSILYCAAAAACRVAHVKIPNSDRATRPAKPAWQCRIERRIGEARALIGKLICFREGNTRPRVMRFVRRAFSGTDVSPRDYLPRITERIDFLRQKVYAWANRIRRYKRRVERYTQNRAFQSNERWVYRAWERPDQSVIDTRLPEDDAMYSFWRSIWSVPVSHTEGDWTRTVERECELIPEMGAITISPQDVARAVRPLPNWKSPGPDGLHNFWLKWFKSSHARLASQFQSALESGSLPQFLTTGITHLLHKSGSTAEPKNYRPITCLPTIYKVLTSILRAKINSHIETNSIMSASQNGCRNGSRGTKELLLIDVAISQQVRRSRRDLSTCWIDYKKAYDSVPHTWLMRVLELYKIDVTLRTFLMSCMGQWRTVLHYPGCRRVSENSEPLRIERGIFQGDSLSPLWFCLALNPLSTLLEGSGLGYRLRREGQVISHLLYMDDLKLFASNNLQLMELLKVTETFSSAIRMEFGLDKCAVMHVKRGEIMESVGTQLSDSIHLRSLSSTETYKYLGMSEALGINAADVKQSLRERFFCRLNKVLKSLLSGGNKVRAFNGWVMPVLMYSFGILKWTQTELDALDRRVRTLLTANRMHHPRSSVMRLYIPRKCGGRGFLNAKTLHNREVCSLREYFLETDVGMHRDVVAVDKGLTPLSLASENWRKPIVMDTNERKEVWKGKELHGRFYRALHGPDVDLLASVSWLRFGNLFGETEGFVFAIMDEVMMTNNYRKYIVKDGTVDICRACHRPGESIRHIISGCSHLANGDYLHRHNLVARIIHQQLALKYNLVESEVPYYRYVPDPVLENGSVTLYWDRSIITDRTIVANKPDIVVIDRLERRTMIVDIAVPHDENLVKAEKDKQTKYLDLAREVVDMWEVDRAIIVPIVVTANGLIAKSLDQHLRRLSLGSWIKGLIQKAVLLDTARIVRRFLSQEP

SEQ ID NO: 13244 - protein, 1200 aa, Mythimna ferrago
MLTRSRAQQLNTHLTTSGSSLSSASQPPGPAPAVSPEIPVAAVASSSSDEYFSPPTTPPPTRRRGRGRPPACLGPRGPPASDRVPAAGGSVQRMRWTQSINENVMRSYFGATEGGTNLTAYRGRMLSLFQVLEPAVNVSAQRLSDQVRVIQRNRMLDDAVLDRLRLESRNGRVSPVSPPAAVQRQLSVSPRPDHVGEDDDDGAISVSSQCNARLRSALEDAFREYRSIPPELRPRLPRLPMHRKNRALVCALDSQLSNCFDSSEDLTDTHSILYCAAAAACRVAHVKIPNSDRATRPAKPAWQCRIERRIGEARALIGKLICFREGNTRPRVMRFVRRAFSGTDISPRDYLPRITERIDFLRQKVYAWANRIRRYKRRVERYTQNRAFQSNERWVYRAWERPDQSVIDTHLPDDDAMYSFWRSIWSVPVNHTEGDWTREVERECELIPEMGAITISPQDVARAVRPLPNWKSPGPEGLHNFWLKWFKSSHARLASQFQSALESGSLPQFLTTGITHLLYKSGSTAEPKNYRPITCLPTVYKVLTSILRAKINSHIETNSIMSASQNGCRNGSRGTKELLLIDVAISQQVRRSRRDLSICWIDYKKAYDSVPHTWLMRVLELYKIDVTLRTFLMSCMGQWRTVLHYPGCRRVSENSEPLWIERGIFQGDSLSPLWFCLALNPLSTLLEGSGLGYRLRREGQVISHLLYMDDLKLFASNNLQLMELLKVTETFSSAIRMEFGLDKCAVMHVKRGEIMESVGTQLSDSIHLRSLCSTETYKYLGMSEALGINAADVKQSLRERFFGRLNKVLKSLLSGGNKVRAFNDWVMPVLMYSFGILKWTQTELDALDRRVRTLLTANRMHHPRSSVMRLYIPRKCGGRGFLNAKTLHNREVCSLREYFLETDVGMHRDVVAVDKGLTPLSLANENWRKPIVMDTNERKEVWKGKELHGRFYRALHGPDVDLLASVSWLRFGDLFGETEGFVFAIMDEVMMTNNYRKYIVKDGTVDICRACHRPGESIRHIISGCSHLANGDYLHRHNLVARIIHQQLALKYNLVESEVPYYRYVPDPVLENGSVTLYWDRSIITDRTIVANKPDIVVIDRLERRTMIVDIAVPHDENLVKAEKDKQTKYLDLAREVVDMWEVDRAIIVPIVVTANGLIAKSLDQHLRRLSLDSWIKGLIQKAVLLDTARIVRRFLSQEP

SEQ ID NO: 13245 - protein, 1195 aa, Eilema sororculum
MITRAKTKLLQDAHLTPTDSSCSSASQAPEITSPRQTPAEASSSDEYFSPPTSPTPVRRPGRGRPPTCLGPRRPPASNRAPATGGDVHRMRWTTSINENVMRAYFAATEGGTNLSAYRSRILPLFQALEPSVNTSAQRLSDQVRVIQRNRMLNETVLETLRLECLRNTCVTPAPAPAPASTTAINEESYVTRDDTPIPVSIQYNEEIKEALECALREYRSMPIHVRPRLPRLPIHRRNIALVSALDSLLPKYLENSENLGDTHSILYCTAVAACRMAGAKFPIKDPAIRPKPAIPAWQCRIERRVAEARVLIGKLICFRSGNTRPRVMRYVTRAFAGTNISPQDYTSRVTERIDFLKQKVCAWANRIRRYKKRVDRYTVNRMFQRDQRWVYRSWERIDESVDDVRRPDAEATNAFWRSIWSVPVSHTEGDWMREVERACETIPAMEEIYIDATDVDCAVRSLSNWKSPGPDGLHNFWLKWLRSSHVVLASQFQSAVESGTLPTFMTTGVTHLLHKTGSTLEPNNYRPITCLPTVYKLLTSILRAKINNHISNNSIMCASQNGCRNGARGTKELLLIDMTISQQARRNRKDLAACWIDYKKAFDSVPHTWLLRVLELYKVNTTLCTFLRSCMGQWRTVLFYPGCRQALGSDEPITIERGIFQGDSLSPLWFCLALNPLSTLLVNSGLGYRLRREGQMVSHLFYMDDLKLFAHTNPQLMALLKVTETFSNSIKMAFGVDKCAVIHVKRGRVVESEGIQLSDSTNLRSLLVTETYKYLGMSQALCINEADMKQMLQDRFFGRLKKVLNSLLSGGNKVRACNSWVMPLLMYSFGILKWTQTELDTIDRKVRAQLTAFRMHHPRSSVMRLYIPRKCGGRGFLNAKTLHNREVCNLRDYFLKSNVDMHRDVVNVDTGLTPLGLAKENWRRPTIVSTDSRREVWQSKELHGRFYRALHRPEVDLLASVSWLRFSDLFGETEGFVCAIADEVIKTNNYRKYIMRDGTIDICRACHQPGESLRHITSSCSRLANGEYLHRHNQVARIIHQRLALKYNLVDVEVPYYRYVPEPVLENSHITLYWDRSIITDRTVIANKPDIVVIDRSERRALIVDVTIPHDENLVKAEKDKQVKYLDLAHEVVDMWNVDSAIIVPIVVSVNGLIAKSLEQHLKRLGLDGWVKGQMQKAVLLDTARIVRKFLSLEP

SEQ ID NO: 13246 - protein, 1045 aa, Eilema sororculum
MLNETVLETLRLECLRNICVTPAPVPVPASTVELNDDTCVAPDDTPIPVSIQYNEEIKEALECALREYRSMPVHVRPRLPRLPIHRRNIALVSALDSLLPRYLENSENLGDTHSILYCTAVAACRMAGAKFLIKDPAIRPKSAIPAWQCRIERRVTEARVLIGKLICFRSGNTRPRVMRYVTRAFAGTDISPQDYTSRVTERIDFLKQKVYAWANRIRRYKKRVDRYTVNRMFQRDQRWVYRSWERTEESVDDVRRPDAEVTNAFWRSIWSVPVSHTEGDWMHEVKRACETIPEMEEINIDAIDVDCAVRSLSNWKSPGPDGLHNFWLKWLRSSHVVLASQFQSAVESGTLPAFMTTGVTHLLHKTGSTLEPNNYRPITCLPTVYKLLTSILRAKINNHINNNSIMCASQNGCRNGARGTKELLLIDMAISQQARRNRKDLTACWIDYKKAFDSVPHTWLLRVLELYKVNTTLCTFLRSCMGQWRTVLFYPGCRQALGGGVPITIERGIFQGDSLSPLWFCLALNPLSTLLVNSGLGYRLRREGQMVSHLFYMDDLKLFAHTNPQLITLLKITETFSNSIKMAFGVDKCAVIHVKRGRVVESEGIQLSDSTNLRSLLVTETYKYLGMSQALCINEVDMKQMLQERFFGRLKKVLNSLLSGGNKVRACNSWVMPLLMYSFGILKWTQTELDTIDRKVRTQLTAFRMHHPRSSVMRLYIPRKCGGRGFLNAKTLHNREVCNLRDYFLKSNVDLHRDVVNVDTGLTPLGLAKENWRRPTIVSTDSRREVWQSKELHGRFYRALHMPEVDLLASVSWLRFSDLFGETEGFVCAIADEVIKTNNYRKYIMRDGTIDICRACHQPGESLRHITSGCSRLANGEYLHRHNQVARIIHQRLALKYNLVEFEVPYYRYVPEPVLENTHITLYWDRSIITDRTVVANKPDIVVIDRSERRALIVDVTIPHDENLVKAEKDKQVKYLDLAHEVVDMWNVDSAIIVPIVVSVNGLIAKSLDQHLKRLGLDGWVKGQMQKAVLLDTARIVRKFLSLEP

SEQ ID NO: 13247 - protein, 1162 aa, Eilema sororculum
MEPAASSSSSSDEFFSPPTSPTPVRRPGRGRPPTCLGPRRPPASNRAPAAGGNVHRMRWTNSINENVMRAYFAATEGGTNLSAYRTRMLPLFQALEPSINTSAQRLSDQVRVIQRNRMLNETVLETLRQECLRNICVTPAPAPAPASTAEINNDTCVAPDDTPIPVSIQYNEEIKEALECALREYRSVPVHVRPRLPRLPIHRRNIALVSALDSLLPRYLENSENLGDTHSILYCTAVAACRMAGAKFPIKDPAIRPKSAIPAWQCRIERRVTEARVLIGKLICFRSGNTRPRVMRYVTRAFAGTDISPQDYTSRVTERIDFLKQKVYAWANRIRRYKRRVDRYTVNHMFQRDQRWVYRSWERTDESVDDVRRPDAEATNAFWRSIWSVPVSHTEGDWMREVERACETIPEMEEIYIDATDVDCAVRSLSNWKSPGPDGLHNFWLKWLRSSHVVLASQFQSAIESGTLPAFMTTGVTHLLHKTGSTLEPNNYRPITCLPTVYKLLTSILRAKINNHINNNSIMCASQNGCRNGARGTKELLLIDMAISQQARRNRKDLTACWIDYKKAFDSVPHTWLLRVLELYKVNTTLCTFLRSCMGQWRTVLFYPGCRQALGGGVPITIERGIFQGDSLSPLWFCLALNPLSTLLVNSGLGYRLRREGQMVSHLFYMDDLKLFAHTNPQLIALLKVTETFSNSIKMAFGVDKCAVIHVKRGRVVESEGIQLSDSTNLRSLLVTETYKYLGMSQALCINEVDMKQMLQERFFGRLKKVLNSLLSGGNKVRACNSWVMPLLMYSFGILRWTQTELDTIDRKVRTQLTAFRMHHPRSSVMRLYIPRKCGGRGFLNAKTLHNREVCNLRDYFLKSNVDMHRDVVNVDTGLTPLGLAKENWRRPTIVSTDSRREVWQSKELHGRFYRALHRPEVDLLASVSWLRFSDLFGETEGFVCAIADEVIKTNNYRKYIMRDGTIDICRACHQPGESLRHITSGCSRLANGEYLHRHNQVARIIHQRLALKYNLVEVEVPYYKYVPEPVLQNSHITLYWDRSIITDRTVVANKPDIVVIDRSERRALIVDVTIPHDENLVKAEKDKQVKYLDLAHEVVDMWNVDSAIIVPIVVSVNGLIAKSLDQHLKRLGLDGWVKGQMQKAVLLDTARIVRKFLSLEP

SEQ ID NO: 13248 - protein, 868 aa, Eilema sororculum
MRYVTRAFAGTDISPHDYTSRVTERIDFLKQKVYAWANRIRRYKKRVDRYTLNCMFQRDQRWVYRSWERTEESVDDVRRPDAEATNAFWRSIWSVPVSHTEGDWMREVERACETIPEMEEINIDAIDVDCAVRPLSNWKSPGPDGLHNFFLKWLRSSHVVLASQFQSAVESGTLLAFMTTGVTHLLHKTGSTLEPNNYRPITCLPTVYKLLTSILRAKINNHINNNSIMCASQNGCRNGARGTKELLLIDMTISQQARRNRKDLAACWIDYKKAFDSVPHTWLLRVLELYKVNTTLCTFLRSCMGQWRTVLFYPGCRQALGSGEPIIIKRGIFQGDSLSPLWFCLALNPLSTLLVNSGLGYRLRREGQMVSHLFYMDNLKLFAHTNPQLIALLKVTETFSNSIKMAFGVDKCAVIHVKRGRVVESEGIQLSDSTNLRSLLVTETYKYLGMSQTLCINEADMKQMLQDRFFGRLKKVLNSLLSGGNKVRACNSWVMPLLMYSFGILKWTQTELDTIDRKVRAQLTAFRMHHPRSSVMRLYIPRKCGGRGFLNAKTLHNREVCNLRDYFLKSNVDMHRDVVNVDTGLTPLGLAKENWRRPTIVSTDSRREVWQSKELHGRFYRALHRPEVDLLASVSWLRFSDLFGETEGFVCAIADEVIKTNNYRKYIMRDGTIDICRACHQPGESLRHITSGCSRLANGEYLHRHNQVARIIHQRLALKYNLVEVEVPYYRYVPEPVLENSHITLYWDRSIITDRTVVANKPDIVVIDRSERRALIVDVTIPHDENLVKAEKDKQVKYLNLAHEVVDMWNVDSAIIVPIVVSVNRLIAKSLDQHLKRLGLDGWVKGQMQKAVLLDTARIVRKFLSLEP

SEQ ID NO: 13249 - protein, 1192 aa, Eilema sororculum
MLTRAQAKRHRNAPTTSPDSSLSSAAQPPAVEPAASSSSSSDEFFSPPTSPTPVRRPGRGRPPTCLGPRRPPASSGAPATGGDVHRMRWTTSINENVMRAYFAATEGGTNLSAYRTRMLPLFQALEPSINTSAQRLSDQVRVIQRNRMLNETVLETLRLECLRNICVTPAPAPAPASTAEINDDTCVAPDDTPIPVSIQYNEEIKEALECALREYRSMPVHVRPRLPRLPIHRRNIALVSALDSLLPRYLENSENLGDTHSILYCTAVAACRMAGAKFPIKDPAIRPKFTIPAWQCRIERRVAEARVLIGKLICFRSGNTRPRVMRYVTRAFAGTDISPQDYTSRVTERIDFLKQKVCAWANRIRRYKKRVDRYTVNRMFQRDQRWVYRSWERTDESVDDVRRPDAEATNAFWRSIWSVPVSHTEGDWMREVERACETIPEMEEIYIDATDVDCAVRSLSNWKSPGPDGLHNFWLKWLRSSHVVLASQFQSAIESGTLPAFMTTGVTHLLHKTGSTLEPNNYRPITCLPTVYKLLTSILRAKINNHINNNSIMCASQNGCRNGARGTKELLLIDMAISQQARRNRKDLTACWIDYKKAFDSVPHTWLLRVLELYKVNTTLCTFLRSCMRQWRTVLLYPGCRQALGGGVPITIERGIFQGDSLSPLWFCLALNPLSALLVNSGLGYRLRREGQVVSHLFYMDDLKLFTHTNPQLIALLKVTETFSNSIKMAFGVDKCAVIHVKRGRVVESEGIQLSDSTNLRSLLVTETYKYLGMSQALCINEVDMKQLLQERFFGRLKKVLNSLLSGGNKVRACNSWVMPLLMYSFGILKWTQTELDTTDRKVRTQLTAFRMHHPRSSVMRLYIPRKCGGRGFLNAKTLHNREVCNLRDYFLKSNVDMHRDVVNVDTGLTPLGLAKENWRRPTIVSTDSRREVWQSKELHGRFYRALHRPEVDLLASVAWLRFSDLFGETEGFVCAIADEVIKTNNYRKYIMRDGTIDICRACHQPGESLRHITSGCSRLANGEYLHRHNQVARIIHQRLALKYNLVEVEVPYYRYVPEPVLENSHITLYWDRSIITDRTVIANKPDIVVIDRSERRALIVDVTIPHDENLVKAEKDKQVKYLDLAHEVVDMWNVDSAIIVPIVVSVNGLIAKSLDQHLKRLGLDGWVKGQMQKAVLLDTARIVRKFLSLEP

SEQ ID NO: 13250 - protein, 1192 aa, Eilema sororculum
MLTRAQAKRNGSAPITSPDSSLSSAAQPPAVEPAASSSSSSDEFFSPPTSPTPVRRPGRGRPPTCLGPRRPPASNGAPATGGDVHRMRWTNSINENVMRAYFAATEGGTNLSAYRTRMLPLFQALEPSINVSAQRLSDQVRVIQRNRMLNETVLETLRLECLRNICVTPAPVPVPASTVELNDDTCVAPDDTPIPVSIQYNEEIKEALECALREYRSMPVHVRPRLPRLPIHRRNIALVSALDSLLPRYLENSENLGDTHSILYCTAVAACRMAGAKFPIKDPAIRPKSAIPAWQCRIERRVTEARVLIGKLICFRSGNTRPRVMRYVTRAFAGTDISPQDYTSRVTERIDFLKQKVYAWANRIRRYKKRVDRYTVNRMFQRDQRWVYRSWERTEESVDDVRRPDAEVTNAFWRSIWSVPVSHTEGDWMHEVKRACETIPEMEEINIDAIDVDCAVRSLSNWKSPGPDGLHNFWLKWLRSSHVVLASQFQSAVESGTLPAFMTTGVTHLLHKTGSTLEPNNYRPITCLPTVYKLLTSILRAKINNHINNNSIMCASQNGCRNGARGTKELLLIDMAISQQARRNRKDLTACWIDYKKAFDSVPHTWLLRVLELYKVNTTLCTFLRSCMGQWRTVLFYPGCRQALGGGVPITIERGIFQGDSLSPLWFCLALNPLSTLLVNSGLGYRLRREGQMVSHLFYMDDLKLFAHTNPQLITLLKITETFSNSIKMAFGVDKCAVIHVKRGRVVESEGIQLSDSTNLRSLLVTETYKYLGMSQALCINEVDMKQMLQERFFGRLKKVLNSLLSGGNKVRACNSWVMPLLMYSFGILKWTQTELDTIDRKVRTQLTAFRMHHPRSSVMRLYIPRKCGGRGFLNAKTLHNREVCNLRDYFLKSNVDMHRDVVNVDTGLTPLGLAKENWRRPTIVGTDSRREVWQSKELHGRFYRALHRPEVDLLASVSWLRFSDLFGETEGFVCAIADEVIKTNNYRKYIMRDGTIDICRACHQPGESLRHITSGCSRLANGEYLHRHNQVARIIHQRLALKYNLVEFEVPYYRYVPEPVLENTHITLYWDRAIITDRTVVANKPDIVVIDRSERRALIVDVTIPHDENLVKAEKDKQVKYLDLAHEVVDMWNVDSAIIVPIVVSVNGLIAKSLDQHLKRLGLDGWVKGQMQKAVLLDTARIVRKFLSLEP

SEQ ID NO: 13251 - protein, 1037 aa, Eilema sororculum
MTETSTDTNSFVFRSKPPVPASTVELNDDTCVAPDDTPIPVSIQYNEEIKEALECALREYRSMPVHVRPRLPRLPIHRRNIALVSALDSLLPRYLENSENLGDTHSILYCTAVAACRMAGAKFPIKDPAIRPKSAIPAWQCRIERRVTEARVLIGKLICFRSGNTRPRVMRYVTRAFAGTDISPQDYTSRVTERIDYLKQKVYAWANRIRRYKKRVDRYTVNRMFQRDQRWVYRSWERTEESVDDVRRPDAEVTNAFWRSIWSVPVSHTEGDWMHEVERACETIPEMEEINIDAIDVDCAVRSLSNWKSPGPDGLHNFWLKWLRSSHVVLASQFQSAVESGTLPAFMTTGVTHLLHKTGSTLEPNNYRPITCLPTVYKLLTSILRAKINNHINNNSIMCASQNGCRNGARGTKELLLIDMAISQQARRNRKDLTACWIDYKKAFDSVPHTWLLRVLELYKVNTTLCTFLRSCMGQWRTVLFYPGCRQALGGGVPITIERGIFQGDSLSPLWFCLALNPLSTLLVNSGLGYRLRREGQMVSHLFYMDDLKLFAHTNPQLITLLKITETFSNSIKMAFGVDKCAVIHVKRGRVVESEGIQLSDSTNLRSLLVTETYKYLGMSQALCINEVDMKQMLQERFFGRLKKVLNSLLSGGNKVRACNSWVMPLLMYSFGILKWTQTELDIIDRKVRTQLTAFRMHHPRSSVMRLYIPRKCGGRGFLNAKTLHNREVCNLRDYFLKSNVDMHRDVVNVDTGLTPLGLAKENWRRPTIVSTDSRREVWQSKELHGRFYRALHRPEVDLLASVSWLRFSDLFGETEGFVCAIADEVIKTNNYRKYIMRDGTIDICRACHQPGESLRHITSGCSRLANGEYLHRHNQVARIIHQRLALKYNLVEFEVPYYRYVPEPVLENTHITLYWDRSIITDRTVVANKPDIVVIDRSERRALIVDITIPHDENLVKAEKDKQVKYLDLAHEVVDMWNVDSAIIVPIVVSVNGLIAKSLDQHLKRLGLDGWVKGQMQKAVLLDTARIVRKFLSLEP

SEQ ID NO: 13252 - protein, 1212 aa, Ptilodon capucinus
MTDAPRRNPRRLCRQRTVNEPNAQSTPPDPSPRSASPSPASIIRTSVTAVASSESDEYFSPPTSPPPVRQQRGRPPGHLGLLGQPAPNRVLVPSGVVRRMRWTSSINENVMRAYYEATEGGTNLTAYRNRMLPLFQSLEPAVNVSAQRLSDQVRVIQRGNMLADTLLDRLRSEMQSRRVVPVASSQPAAQPVASATVTSRLAADSDVDRDNAPINVSNQYNELLRSTLEDVVRVYRSMPNHLRPRIPRLPMHKGNRALVGALDSLLSIYFDSSDNLADTHSILYCAAITVCRVARVKVFNTDTATRPKPAVPAWQCRIERRISEARALIGKLSCFREGNTRPRVMRFVKRAFAGTDVSPREYISRVTERIDFLKQKIYAWANRIRRYKVRVDRYSQNSMFQRDQRWVYRSWERPSEPVSELQRPDDNATTTFWRDIWSVPVTHYEGDWIGDVERMCEPIKEMEAISIGPLDVTNAVRSLPNWKAPGPDGLHNFWLKWLRSSHVRLASQFQSALQSGSLPEFITTGVTHLLHKTGSTTDPKNYRPITCLPTIYKTLTSILRAKIARHVEDNSIMSASQNGCRSGSRGTKELLLIDMTICQQARRNRKDLSTCWIDYKKAYDSVPHTWLVRVLELYKIDTTLRTFLESCMRQWKTVLLCPGSRQILGNGEPIRIERGIFQGDSLSPLWFCLALNPLSTLLEESGFGFRLRRGGQVISHLLYMDDLKLFAPTALQLTGLLKVTETFSNSIRMEFGVDKCAVMHAKQGRLVESEGIQLSDSIQLRSLAATETYKYLGMSQGLGISETDMKQLLRDRFLGRLKKVLKSLLSGGNKVRAYNGWVMPVLMYSFGILKWTQTELDTLDRTVRTTLTSYRMHHPRSSVMRLYIPRKCGGRGFLNVKTLHNREICSLREYFLRADGEMHVDVVAVDNGLTPLSLAKENWRKPVVLTTDDRRLVWQGKELHGRYYRALHGPDVDLAASVAWLRFGDLFGETEGFVCAIMDEVVMTNNYRKYILRDGTIDICRACHRPGESLRHIISGCSRLANGQYLHRHNQVARIIHQQLALKYRLVTSEVPYYRYEPQPVLEEGHISLYWDRSIITDRTIVANKPDIVLIDRQERRAMIVDITVPHDENLVKAEKDKESKYLDLAHEVVDMWDIDAAIIVPIVVSAHGLLAKSLDKHLKRLALGGWIKGQIQKAVLLETARIVRKFLSLEP

SEQ ID NO: 13253 - protein, 868 aa, Ptilodon capucinus
MRFVKRAFAGTDVSPREYISRVTERIDFLKQKIYAWANRIRRYKARVDRYSQNSMFQRDQRWVYRSWERPNEPVSELQRPDDNAMTTFWRDIWSVPVTHYEGNWIGDVERMCEPIKEMEAISIGPLDVANAVRSLPNWKAPGPDGLHNFWLKWLRSSHVRLASQFQSALQSGSLPEFITTGVTHLLHKTGSTTDPKNYRPITCLPTIYKTLTSILRAKIARHVEDNSIMSASQNGCRSGSRGTKELLLIDMAICQQARRNRKDLSTCWIDYKKAYDSVPHTWLVRVLELYKIDTTLRTFLESCMRQWKTVLLCPGSRQILGNGEPIRIERGIFQGDSLSPLWFCLALNPLSTLLEESGFGFRLRRGGQVISHLLYMDDLKLFAPTALRLSGLLKVTETFSNSIRMEFGVDKCAVMHAKQGRMVESEGIQLSDSIQLRSLAATETYKYLGMSQGLGISETDMKQLLRDRFLGRLKKVLKSLLSGGNKVRAYNGWVMPVLMYSFGILKWTQTELDALDRTVRTTLTAYRMHHPRSSVMRLYIPRKCGGRGFLNVKTLHNREICSLREYFLRADGEMHVDVVAVDNGLTPLSLAKENWRKPVVLTTDDRRVVWQGKELHGRYYRALHGPDVDLAASVAWLRFGDLFGETEGFVCAIMDEVVMTNNYRRYILRDGTIDICRACHRPGESLRHIISGCSRLANGQYLHRHNQVARIVHQQLALKYRLVTSEVPYYRYEPQPVLEEGHITLYWDRSIITDRTIVANKPDIVLIDRQERRAMIIDITVPHDENLVKAEKDKESKYLDLAHEVVDMWDIDAAIIVPIVVSAHGLLAKSLDKHLKRLALGSWIKGQIQKAVLLGTARIVRKFLSLEP

SEQ ID NO: 13254 - protein, 1212 aa, Ptilodon capucinus
MTDAPRRNPRRQCRQRSAVRHYAQSTPPDQSPRSASPSPASIIRTSETAVASSESDEYFSPPTSPPPVRRQRGRPPGHLGLLGQPAPNRVLVPSGVVRRMRWTSSMNENVMRAYYEATEGGTNLTAYRDRMLPLFQSLEPAVNVSAQRLSDQVRVIQRGNMLADTVLDRLRSEVQSRRVVPVASSQPAAQPVASATVTSRLAADSDVDRDNAPIDVSTQYNDLLRSTLEDVVREYRSMPNHLRPRIPRLPMHKGNRALVGALDSLLSIYFDSSDDLVDTHSILYCAAITVCRVARVKVFNTDTATRPKPAVPAWQCRIERRISEARALIGKLSCFREGNTRPRVMRFVKRAFAGTDVSPREYISRVTERIDFLKQKIYAWANRIRRYKARVDRYSLNSMFQRDQRWVYRSWERPNEPVSELQRPDDNAMTTFWRDIWSVPVTHYEGNWIGDVERMCEPIKEMEAISIGPLDVANAVRFLPNWKAPGPDGLHNFWLKWLRSSHVRLASQFQSALQSGSLPEFITTGVTHLLHKTGSTTDPKNYRPITCLPTIYKTLTSILRAKIARHVEDNSIMSASQNGCRSGSRGTKELLLIDMTICQQARRNRKDLSTCWIDYKKAYDSVPHTWLVRVLELYKIDTTLRTFLESCMRQWKTVLLCPGSRQILGNGEPIRIERGIFQGDSLSPLWFCLALNPLSALLEESGFGFRLRRGGQVISHLLYMDDLKLFAPTALQLSGLLKVTETFSNSIRMEFGVDKCAVMHAKQGRMVESEGIQLSDSIQLRSLAATETYKYLGMSQGLGISETDMKQLLRDRFLGRLKKVLRSLLSGGNKVRAYNGWVMPVLMYSFGILKWTQTELDTLDRTVRTTLTAYRMHHPRSSVMRLYIPRKCGGRGFLNVKTLHNREICSLREYFLRADGEMHVDVVAVDNGLTPLSLAKENWRKPVVLTTDDRRVVWQGKELHGRYYRALHGPDVDLAASVAWLRFGDLFGETEGFVCAIMDEVVMTNNYRRYILRDGTIDICRACHRPGESLRHIISGCSRLANGQYLHRHNQVARIVHQQLALKYRLVTSEVPYYRYEPQPVLEEGHITLYWDRSIITDRTIVANKPDIVLIDRQERRAMIIDITVPHDENLVKAEKDKESKYLDLAHEVVDMWDIDAAIIVPIVVSAHGLLAKSLDKHLKRLALGSWIKGQIQKAVLLETARIVRKFLSLEP

SEQ ID NO: 13255 - protein, 1212 aa, Ptilodon capucinus
MTDAPRRNPRRLCRQRTVNEPNAQSTPPDPSPRSASPSPASIIRTSVTAVASSESDEYFSPPTSPPPVRQQRGRPPGHLGLLGQPAPNRVLVPSGVVRRMRWTSSINENVMRAYYEATEGGTNLTAYRNRMLPLFQSLEPAVNVSAQRLSDQVRVIQRGNMLADTVLDRLRSEMQSRRVVPVASSQPAAQPVASATVTSRLAANSDVDRDNAPINVSNQYNELLRSTLEDVVRVYRSMPNHLRPRIPRLPMHKGNRALVGALDSLLSIYFDSSDNLADTHSILYCAAITVCRVARVKVFNTDTATRPKPAVPAWQCRIERRISEARALIGKLSCFREGNTRPRVMRFVKRAFAETDVSPREYISRVTERIDFLKQKIYAWANRIRRYKVRVDRYSQNSMFQRDQRWVYRSWERPSEPVSELQRPDDNATTTFWRDIWSVPVTHYEGDWIGDVERMCEPIKEMEAISIGPLDVANAVRSLPNWKAPGPDGLHNFWLKWLRSSHVRLASQFQSALQSGSLPEFITTGVTHLLHKTGSTTDPKNYRPITCLPTIYKTLTSILRAKIARHVEDNSIMSASQNGCRSGSRGTKELLLIDMTICQQARRNRKDLSTCWIDYKKAYDYVPHTWLVRVLELYKIDTTLRTFLESCMRQWKTVLLCPASRQILGNGEPIRIERGIFQGDSLSPLWFCLALNPLSTLLEESGFGFRLRRGGQVISHLLYMDDLKLFAPTALQLTGLLKVTETFSNSIRMEFGVDKCAVMHAKQGRLVESEGIQLSDSIQLRSLAATETYKYLGMSQGLGISETDMKQLLRDRFLGRLKKVLKSLLSGGNKVRAYNGWVMPVLMYSFGILKWTQTELDTLDRTVRTTLTSYRMHHPRSSVMRLYIPRKCGGRGFLNVKTLHNREICSLREYFLRADGEMHVDVVAVDNGLTPLSLAKENWRKPVVLTTDDRRLVWQGKELHGRYYRALHGPDVDLAASVAWLRFGDLFGETEGFVCAIMDEVVMTNNYRKYILRDGTIDICRACHRPGESLRLIISGCSRLANGQYLHRHNQVARIIHQQLALKYRLVTSEVPYYRYEPQPVLEEGHISLYWDRSIITDRTIVANKPDIVLIDRQERRAMIVDITVPHDENLVKAEKDKESKYLDLAHEVVDMWDIDAAIIVPIVVSAHGLLAKSLDKHLKRLALDGWIKGQIQKAVLLETARIVRKFLSLKP

SEQ ID NO: 13256 - protein, 1102 aa, Hydraecia micacea
MKLYFVLVVYLQKAKFMNTIGAFINNNNNNNFFLLEPAVNVSAQRLSDQVRVIQRNHMLDDTVLDRLRNEIQSSHAIAPQSQTAVILPQSNTSHADEGSNDRATNVSTQCNEELRSALEDAIQEYRSMSPELRPRLPRLPMHNKNRALVAVLNSQLSKYFDDCEDLTDTHSILYCAAVAACRVAHVKFTNDSRATRPKPAVPAWQCRIERRIGGARALIGKLICFREGNTRPRVMRFVRRAFLGTDISPQAYTSCVTERIDFLKQKVYAWANRIRRYKRRVERYAQNRTFQSDERWVYRDWERPDQSVADTCLPDDDAMCSFWRSIWSVPVSHTEGDWARDVERACDPIPEMEAITICPQDVARAVRPLPNWKSPGPDGLHNFWIKWFSRSHARLASQFQTALESGSLPQFLTTGITHLLHKSGSTAEPKNYRPITCLPTVYKVLTSILRAKINKHIDTNFIMSASQNGCRNGSRGTKELLLIDMTISQQVRRFRKDLSTCWIDYKKAYDSVPHTWLMRVLELYKVDTTLRTFLMSCMGQWRTVLRYPGCRNIQRNSEPIRIERGIFQGDSLSPLWFCLALNPLSTLLEDSGLGYRLRRGGQVISHLLYMDDLKLFAPNNLQLMELLKVTQTFSNAIRMEFGVDKCAVMHVKRGEIVESVGNQLSDSTNLRALSASETYKYLGMSEALGINVTDMKQSLKERFFGRLKKVLNSLLSGGNKVRAFNGWVMPVLMYSFGILKWTQTELDALDRRVRTLLTANRMHHPRSSVMRLYIPRKCGGRGFLNSKTLHNREICSLREYFLETDVGMHRDVVMVDKGLTPLSLAKENWRKPVVLDTNDRMEVWQSKELHGRFFRALHGPDVDLLASVAWLRFGDLFGETEGFVCAIMDEVMMTNNYRRFIVKDGTVDICRACHRPGESIRHIISGCSRLANGEYLHRHNLVARIIHQQLALKYSLVESEVPYYRYVPDPVLENGNITLYWDRSIITDRTIIANKPDIVVVDRSERRAMIVDITVPHDENLVKAEKDKQIKYLDLAREVVDMWDVDSAIIVPIVVTANGLIAKSLDQHLRRLSLGSWIKGLIQKAVLLDTARIVRRFLSLEP

SEQ ID NO: 13257 - protein, 1201 aa, Amphipyra tragopoginis
MLTRARTREARPPPPDSPLSSASQPPESSPTVSAVTPAAAVASSSSDEYFSPPTSPTPVRRQGRRRPPNSLGPRGPPAPSRVLATGGCVQRMKWTQNINENVMRAYYGSTEGGTNLTAYRVRMLTLFQELEPAINVSAQRLSDQVRVIQRNHRLDDAALDRLRLEVQNSHVTPVPSQTAVHHININVVPPRSDCVDGDVDDRAVTVSSQYNDRLRSALEDAIREYRANPELRPRLPRLPMHNKNRALVCALDSLLSSYFESSEDLVDTHSILYCAAVAACRVANVKFNNSERATRPKPAIPAWQCRIERRIDGARALIGKLICFREGNTRPRVMRFVRRAFSGTGISPREYMSQVTERIDFLKQKVCAWASRIRRYKRRVERYAQNRMFQCDQRWVYRAWERPDQGVSDGRLPDDDAMSSFWRSIWSVPVTHTEGDWTRDIERACEPIEEMGEILISPQDVASAARPLPNWKSPGPDGLHNFWIKWLRSSHARLASQFQSSLESGSLPQFLTTGVTHLLHKSGSTAEPKNYRPITCLPTVYKLLTSILRTKINTHVENNSIMSPSQNGCRNGSRGTKELLLIDMAISQQVRRSRKNLSTCWIDYKKAYDSVPHTWLMRVLELYKINTTLRTFLTSCMRQWRTVLRYPGCRPILGSGEPISIERGIFQGDSLSPLWFCLALNPLSTLLEGSGLGCPLRRGGQVVSHLLYMDDLKLFAPTKLQLVELLKVTETFSNSIRMEFGVDKCAVMHVRRGGIMESEGLQLSDSIHLRSLSANDTYKYLGMSEGLGISEAGMKQSLRERFFGRLKKVLKSLLSGGNKVRAFNGWVMPVLMYSFGILKWTQTELDALDRRVRTLLTANRMHHPRSSVMRLYIPRKCGGRGLLNAKTLHNREVCSLREYFLHADAGMHRDVVAVDKGLTPLNLAKENWRKPVVLSTNDRREVWQSKELHGRFYRALHGPDVDFLASVSWLRFGDLFGETEGFVCAIMDEVIMTNNYRKYIVKDGTVDICRACHCPGESLRHIISGCSRLANGEYLHRHNQVARIIHQQLALKYNLVESEVPYYKYVPDPVLENGHITLYWDRSIITDRTIVANKPDIVVIDRSERRTMIVDVTIPHDENLVKADKDKQIKYLDLAHEVVDMWDVDSATIVPIVVTANGLMAKSLDQHLKRLSLGGWIKGLIQKAVLLDTARIVRRFLSLEP

SEQ ID NO: 13258 - protein, 1202 aa, Amphipyra tragopoginis
MMLTRSQARARNYYAHPPPPDSSPSSASQQQELDSAPPAAAVASSSSDEYFSPPSSPPPVRRRGGARPPACLGPRGQPAPNRVPAAGGNVSRMRWTQSINENVMRAYYGTTEGGINLTAYRDRMLSLFQVLEPAINVSTQRLSDQVRVIQRNRRLDDTVLERLRSEVQNNRTVTTPLQAAEQPQLPAVSPRPIHVDEAGDGEVIVVSNQCSDELRSALEGAILEYRATPPELKPRLPRLPMHKKNRALVCALDSLLSNYFDGSEDLGDTHSILYCAAIAACRVAHVKPTQNERATRPKPAVPAWQCRIERRIDGARALIGKLICFREGNTRPRVMRFVRRAFSGTDISPRDYMSRVTERIDFLKQKVYAWANRIRRYKRRVERYTRNRTFQSDQRRVYRTWERPVPGVSDMRLPDDDAMSSFWRSIWSVPVAHTEGDWMRDIERACETIPEMGEIVISPQDVATAARPLPNWKSPGPDGLHNFWIKWLRSLHACLASQFQSSLESGSLPQFLTTGVTHLLYKSGSTAEPKNYRPITCLPTVYKLFTSILRVKISNHIDNNYILSPSQNGCRSGSRGTKELLLIDMAISQQVRRSRKDLSTCWIDYKKAYDSVPHTWLMRVMELYKINTTLRTLLMSCMRQWRTVLRYPGCREILGRGEPIRIERGIFQGDSLSPLWFCLALNPLSTLLEGTRLGYRLRREGQVISHLLYMDDLKLFAPTDLQLMELLKVTENFSNSIRMEFGVDKCAVMHVKRGRIVESEGIQLSNSIQLRSLSPTETYKYLGMSEALGISEADMRQSLRERFFGRLNKVLKSLLSGGNKVRAFNGWVMPVLMYSFGILKWTQTDLDALDRRVRALLTVHRMHHPRSSVMRLYIPRKCGGRGFLNAKTLHNREVCSLREYFLQAEGEMHRDVVAVDRGLTPLALAKENWRKPVVLSTNDREEVWQSKELHGRFYRALHGPDVDFLASVSWLRFGDLFGETEGFVCAIMDEVMMTNNYRKYIVKDGTVDICRACHRPGESIRHIISGCSRLANGEYLHRHNLVARIIHQQLALKYNLVESEVPYYRYVPDPVLENGHATLYWDRSIITDRTIVANKPDIVVIDRSERRTMIVDITVPHDENLVKAEKDKQLKYLDLAHEVVAMWDVDSAVIVPIVVTANGLIAKSLDQHLKRLSLDGWIKGLIQKAVLLDTARIVRRFLSLEP

SEQ ID NO: 13259 - protein, 1206 aa, Amphipyra tragopoginis
MLTRSRAKAQNTRPPSSASSLSSASQPPEPASIVSDVTPAAAVASSSSDEYFSPATSPSPPPARRRGRGRPPTCLGPRGPPASDRVPAPGGSVQRMRWTQSMNENCMRAYFGATEGGTNLTAYRGRMLSLFQALEPAVNVSAQRLSDQVRVIQRDHRLDDAALDRLRSEMQNSHAAPLPSQIRTQTLVPPAVPLESNYADEEGEDRAISAGTQYSEKMRSVLEDALREFRSTPPELRPRLPRLPMHNKNRALVCALDSLLPNVFESSEDLGDTQSILYCAAVAACRVAHVKFPNDNRATRPKSAVPAWQCRIERRIDEARVLIGKLTCFREGNRRPRVMRFVRRAFSGTDIGPGEYASRVTERIDFLKQKVYAWANRIRRYRRRVDRYTQNRIFQSDQRWVYRTWERPDQGVSDTHLPDNDVMNAFWRNIWSVPVTHTEGDWMQEVQRACEPIQEMGAVTIGPQDVTSAVRPMPNWKSPGPDGLHNFWIKWLRSSHARLASQFQSSLESGSLPAFLTTGITHLLFKSGSTAEPKNYRPITCLPTVYKLLTSILRAKLNHHIDSNAIMCATQNGCKNGSRGTKELLLIDMAISQQVRRSRKDLSTCWIDYKKAYDSVPHTWLMRVMELYKVNATLRTFLMSCMGQWRTVLHYPGCRQIQGNGELIRIERGIFQGDSLSPLWFCLALNPLSTLLEGSGLGYRLRRGGQVISHLLYMDDLKLFAPNNLQLVELLKVTETFSNSIRMEFGVDKCAVMHVKRGRIMESVGTQLSDSIHLRSLSSTETYKYLGMSEALGINEADMKQSLRERFFGRLIKVLKSLLSGGNKVRAFNGWVMPVLMYSFGILRWTQTELDALDRRVRTLLTAYRMHHPRSSVMRLYIPRKCGGRGFLNAKTLHNREVCSLREYFSQADVGMHRDVVAVDKGLTPLSLAKENWRKPVVLDAKGRMEVWRSKELHGRFYRALHGPDVDFLASVAWLRFGDLFGETEGFVCAIMDEVMMTNNYRKYIVKDGTVDICRACHCPGESIRHIVSGCSRLANGEYLHRHNLVARIIHQQLALKYNLVDTEVPYYKYVPDPVLENGHVTLYWDRSIITDRTIVANKPDIVVIDRLERRTMIVDITVPHDENLLKAENDKKIKYLDLAHEVVDMWDVDSAVIVPIVVTANGLIAKSLDQHLMRLSLGSWIKGLIQKAVLLDTARIVRKFLSLEP

SEQ ID NO: 13260 - protein, 962 aa, Amphipyra tragopoginis
MHKKNRALVCALDSLLSNYFDGSEDLADTHSILYCAAIAACRVAHVKFTESDRATRPKPVVPAWQCRIERRIGGARALIGKLICFREGNTRPRVMRFVRRAFSGTDISPRDYMSRITERIDFLKQKVYAWANRIRRYKRRVERYTRNRTFQSDQRWVFRTWERPDPSGSDVRLPDDEAMGSFWRSIWSVPIAHTEGDWMRDIERACEPIPEMGAIIISPQDVAGAARPLPNWKSPGPDGLHNFWLKWLRSSHACLASQFQSSLESGSLPQFLTTGATHLLYKSGSTAEPKNYRPITCLPTVYKLLTSILRVKISNHIDNNSILSPSQNGCRSGSRGTKELLLIDMTISQQVRRSRKDLSTCWIDYKKAYDSVPHTWLMRVLELYKINTTLRTFLMSCMRQWRTVLRYPGCREIRGRGEPIRIERGIFQGDSLSPLWFCLALNPLSTLLEGTRLGYRLRREGQVISHLLYMDDLKLFAPTDLRLMELLKVTENFSSSIRMEFGVDKCAVMHVKRGGIVESEGIQISNSIQLRSLSPTETYKYLGMSEALGISEADMRQSLRERFFGRLNKVLRSLLSGGNKVRAFNGWVMPVLMYSFGILKWTQTDLEALDRRVRALLTVHRMHHPRSSVMKLYIPRKCGGRGFLNAKTLHNREVCSLREYFLQAEGEMHRDVVAVDKGLTPLALAKENWRKPAVLSTNDREEVWQSKELHGRFYRALHGPDVDFPASVSWLRFGDLFGETEGFVCAIMDEVMMTNNYRKYIVKDGTVDICRACHRPGESIRHIISGCSRLANGEYLHRHNLVARIIHQQLALKYNLVESEVPYYRYVPDPVLENGHATLYWDRSIITDRTIVANKPDIVIIDRSERRTMIVDITVPHDENLVKAEKDKQIKYLDLAHEVVGMWDVDSAVVVPIVVTANGLIAKSLDQHLKRLSLGGWIKGLLQKAVLLDTARIVRRFLSLEP

SEQ ID NO: 13261 - protein, 1205 aa, Amphipyra tragopoginis
MLTRSRAKTQQSTHLPPSASSLSSASQPPEPASIVSDVTPAAAVASSSSDEYFSPATTPPPARRRGRGRPPACLGPRGPPASDRVPAPGGSVQRMRWTQSMNENCMRAYFGATEGGTNLTAYRGRMLSLFQALEPAVNVSAQRLSDQVRVIQRDHRLDDAALDRLRNEMQNSHVTPLPAQIRTQPLVPPAVPLEPNHGDGEEEDRAISAGTQCSELMRSALEDALREFRSTPPELRPRLPRLPMHNKNRALVCALDLLLSNVFESSEDLGDTHSVLYCAAVAACRVAHVKFPNDNRATQPKSAVPAWQCRIERRIDEARVLIGKLTCFREGNRRPRVMRFVRRAFSGTDIGPGEYVSRITERIDFLKQKVYAWANRIRRYRRRVDRYTQNRIFQSDQRWVYRTWERPDQGVSDAHLPDNDVMNAFWRNIWSVPVTHTEGDWMQEVQRACEPIQEMGAVTIGPQDVASAVRPMPNWKSPGSDGLHNFWIKWLRSSHARLASQFQSSLESGSLPSFLTTGVTHLLFKSGSTAEPKNYRPITCLPTVYKLLTSILRAKLNHHIDSNAIMCATQNGCKNGSRGTKELLLIDMAISQQVRRSRKDLSTCWIDYKKAYDSVPHTWLMRVLELYKINATLRTFLMSCMGQWRTVLHYPGCRQIQGNGELIRIERGIFQGDSLSPLWFCLALNPLSTLLEGSGLGYRLRRGGQVISHLLYMDDLKLFAPNNLQLLELLKVTETFSNSIRMEFGVDKCAVMHVKRGRIMESVGTQLSDFIHLRSLSSTETYKYLGMSEALGINEADMKQSLRERFFGRLIKVLKSLLSGGNRVRAFNGWVMPVLMYSFGILRWTQTELDALDRRVRTLLTAYRMHHPRSSVMRLYIPRKCGGRGFLNAKTLHNREVCSLREYFSQADVGMHRDVVAVDKGLTPLSLAKENWRKPVVLDTNGRRDVWRSKELHGRFYRALHGPDVDFLASVAWLRFGDLFGETEGFVCAIMDEVMMTNNYRKYIVKDGTVDICRACHCPGESIRHIVSGCSRLANGEYLHRHNLVARIIHQQLALKYNLVDTEVPYYRYVPDPVLENGHVTLYWDRSIITDRTIVANKPDIVVIDRLERRTMIVDITVPHDENLVKAENDKKIKYLDLAREVVEMWDVDSAVIVPIVVTVNGLIAKSLDQHLMRLSLGSWIKGLIQKAVLLDTARIVRKFLSLEP

SEQ ID NO: 13262 - protein, 962 aa, Amphipyra tragopoginis
MHKKNRALVCALDSLLSNYFDGSEDLGDTHSILYCAAIAACRVAHVKLTQNERATRPKPAVPAWQCRIERRIDGARALIGKLICFREGNTRPRVMRFVRRAFSGTDISPRDYMSRVTERIDFLKQKVHAWANRIRRYKRRVERYTRNRTFQSDQRRVYRTWERPVPGVSDMRLPDDDAMSSFWRSIWSVPVAHTEGDWMRDIERACETIPEMGEIVISPQDVATAARPLPNWKSPGPDGLHNFWIKWLRSSHACLASQFQSSLESGSLPQFLTTGVTHLLYKSGSTAEPKNYRPITCLPTVYKLFTSILRVKISNHIDNNYILSPSQNGCRSGSRGTKELLLIDMAISQQVRRSRKDLSTCWIDYKKAYDSVPHTWLMRVMELYKINTTLRTLLMSCMRQWRTVLRYPGCREILGRGEPIRIERGIFQGDSLSPLWFCLALNPLSTLLEGTRLGYRLRREGQVISHLLYMDDLKLFAPTDLQLMELLKVTENFSNSIRMEFGVDKCAVMHVKRGGIVESEGIQLSNSIQLRSLSPTETYKYLGMSEALGINEAVMRQSLRERFFGRLNKVLKSVLSGGNKVRAFNGWVMPVLMYSFGILKWTQTDLDALDRRVRALLTVHRMHHPRSSVMRLYIPRKCGGRGFLNAKTLHNREVYSLREYFLQAEGEMHRDVVAVDRGLTPLALAKENWRKPVVLSTNDREEVWQSKELHGRFYRALHGPDVDFSASVSWLRFGDLFGETEGFVCAIMDEVMMTNNYRKYIVKDGTVDICRACHRPGESIRHIVSGCSRLANGEYLHRHNLVARIIHQQLALKYNLVESEVPYYRYVPDPVLENGHATLYWDRSIITDRTIVANKPDIVVIDRSERRTMIVDITVPHDENLVKAEKDKQLKYLDLAHEVVAMWDVDSAVIVPIVVTANGLIAKSLDQHLKRLSLDGWIKGLIQRAVLLDTARIVRRFLSLEP

SEQ ID NO: 13263 - protein, 1205 aa, Amphipyra tragopoginis
MLTRSRAKTQQSTHLPPAASSLSSASQPPEPASIVSDVTPAAAVASSSSDEYFSPATTPPPARRRGRGRPPACLGPRGPPASDRVPASGGSVQRMRWTQSMNENCMRAYFGATEGGTNLTAYRGRMLSLFQALEPAVNVSAQRLSDQVRVIQRDHRLDDAALDRLRNEMQNSHVTPLPAQIRTQPLVPPAVPLEPNHGDEEEEDRAISAGTQCSELMRSALEDALREFRSTPPELRPRLPRLPMHNKNRALVCALDLLLPNVFESSEDLGDTHSILYCAAVAACRVAHVKFPNDNRATRPKSAVPAWQCRIERRIDEARVLIGKLTCFREGNRRPRVMRFVRRAFSGTDIGPGEYVSRITERIDFLKQKVYAWANRIRRYRRRVDRYTQNRIFQSDQRWVYRTWERPDQGVSDAHLPDNDVMNAFWRNIWSVPVTHTEGDWMQEVQRACEPIQEMGAVTIGPQDVASAVRPMPNWKSPGPDGLHNFWIKWLRSSHARLASQFQSSLESGSLPSFLTTGVTHLLFKSGSTAEPKNYRPITCLPTVYKLLTSILRAKLNHHIDSNAIMCATQNGCKNGSRGTKELLLIDMAISQQVRRSRKDLSTCWIDYKKAYDSVPHTWLMRVLELYKINATLRTFLMSCMGQWRTVLHYPGCRQIQGNGELIRIERGIFQGDSLSPLWFCLALNPLSTLLEGSGLGYRLRRGGQVISHLLYMDDLKLFAPNNLQLLELLKVTETFSNSIRMEFGVDKCAVMHVKRGRIMESVGTQLSDFIHLRSLSSTETYKYLGMSEALGINEADMKQSLRERFFGRLIKVLKSLLSGGNRVRAFNGWVMPVLMYSFGILRWTQTELDALDRRVRTLLTAYRMHHPRSSVMRLYIPRKCGGRGFLNAKTLHNREVCSLREYFSQADVGMHRDVVAVDKGLTPLSLAKENWRKPVVLDTNGRRDVWRSKELHGRFYRALHGPDVDFLASVAWLRFGDLFGETEGFVCAIMDEVMMTNNYRKYIVKDGTVDICRACHCPGESIRHIVSGCSRLANGEYLHRHNLVARIIHQQLALKYNLVDTEVPYYRYVPDPVLENGHVTLYWDRSIITDRTIVANKPDIVVIDRLERRTMIVDITVPHDENLVKAENDKKIKYLDLAHEVVDMWDVDSAVIVPIVVTANGLIAKSLDQHLMRLSLGSWIKGLIQKAVLLDTARIVRKFLSLKP

SEQ ID NO: 13264 - protein, 1206 aa, Noctua pronuba
MLTRLRAKQLAHPPSPGSSLSSASQPPGRATSVSTLSPVAAVASSSSDEFFSPPSTPPPPPPQRRRGRGRPPAGLGPRGQQAPNRVPAAGGNVSRMRWTQSINEQVMRAYYGATEGGSNLTAYRGRMLSLFQVLEPAVSVSAQRLSDQVRVIQRNHMLDDTVLDRLRSESRSNPVTPASPMIAVQLQSATSASPRSDHGGEEDDSEVISVSTQCNAQLRSALEGAFREYRSTPPELRPRLPRLPMHKKNKALMCALDSQLSNYFDSSKDLADTHSMLYCGAVAACRVAHVKFPNNDRATRPKLAVPAWQCRIERRIGEARALIGKLICFREGNTRPRVMRFVRRAFSGTDISFRDYLARVTERIDFLKQKICAWASRIRRYKRRVERYTQNRTFQSDERWVYRAWERPDQGVTDTHLPDDDAICSFWRSIWSVPVSHIEGDWTREVERACDPIPQMGAINISPQDVACAVRPLPNWKSPGPDGLHNFWIKWFQRSHVRLASQFQSALESGSLPQFLTTGITHLLHKSGSTAEPKNYRPITCLPTVYKVLTSILRAKINHHIDSNSIMSASQNGCRNGSRGTKELLLIDMAISQQVRRSRKNLSTCWIDYKKAYDSVPHTWLMRVLELYKVDATLRTFLMSCMGHWRTVLRYPGCRQIQGNSEPIRIERGIFQGDSLSPLWFCLALNPLSTLLEGSGLGYRLRRGGQVISHLLYMDDLKLFAPNNLQLMKLLKVTETFSSAISMEFGVDKCAVMHVKRGEIMESVGTQLSDSIQLRSLSSTDTYKYLGMSEALGINTADMKQSLRERFFGRLNKVLSSLLSGGNKVRAFNGWVMPVLMYSFGILKWTQSELDALDRRVRALLTANRMHHPRSSVMRLYIPRKCGGRGFLNAKTLHNREVCSLREYFLEADVGMHRDVVSVDKGLTPLSLANENWRKPRVLDTNDRKEVWQGKELHGRFYRALHGPDVDFLASVSWLRFGDLFGETEGFVCAIMDEVMMTNNYRKYIVKDGTVDICRACHRPGESIRHIISGCSRLANGEYLHRHNLVARIIHQQLALKYNLVESEVPYYKYAPDPVLDNGNITLYWDRSIITDRTIVANKPDIVVIDRLERRAMIVDITVPHDENLVKAEKDKQFKYLDLAREVVDMWDVNTAVIVPIVVSANGLIAKSLDQHLRRLALGSWIKGLIQKAVLLDTARIVRRFLSQEP

SEQ ID NO: 13265 - protein, 1197 aa, Noctua pronuba
MLTRAAARRARLSPPDPSLSSASPLPESSPIVSAVTPAVAVASSSSDEYFSPPTTPPPVRRRRGRRPPDGLGPRGPPASDRVPALGGSVQRMRWTQSINENVMRSYYGATEGGNNRTAYRVRMLSLFQVLEPAVNVSAQRLSDQVRVIQRNRMLDDTVLDRLRTEMQSSHIITPSAQAVVLPQSNTIPNRANDESNDMVTNVSTQCNEEIRSALEGAIREYRSMQPDLRPRIPRLPMHNKNRALVAVLDSQLSNYFDNCEDLIDAHSILYCAAVAACRVAHVKFSDDRATRPKPAVPAWQYRIERRIGGARALIGKLICFREGNTRPRVMRFVRRAFSGTDISPRDYMSRVTERIDFLKQKVYAWANRIRRYKRRVDRYTQNRTFQRDERWVYRAWERPDQGVADTRLPDDDAMCSFWRSIWSVPVSHTEDEWTREVERACDPVQEMGAITISPQDVVCAVRPLPNWKSPGPDGLHNFWIKWFTRSHARLATLFQSALESGSLPEFLTTGITHLLHKSGSTAEPKNYRPITCLPTVYKVLTSILRTKISKHINDNSIMSPSQNGCRNGSRGTKELLLIDMAISQQVRRFRRDLSTCWIDYKKAYDSVPHTWLMRVLELYKVDTTLRTFLMSCMGQWRTVLRYPGCRQIQRDSEPIRIERGIFQGDSLSPLWFCLALNPLSTLLEDSGLGYRLRRGGQVISHLLYMDDLKLFAPNDLQLMELLKVTETFSSAIRMEFGVDKCAVMHVKRGEIVESVRTQLSDSINLRSLSATETYKYLGMSEALGINVTDMKQSLKERFFGRLKKVFNSLLSGGNKVRAFNGWVMPVLMYSFGILKWTQTELDALDRRVRTLLTTYRMHHPRSSVMRLYIPRRCGGRGFLNAKTLHNREICSLREYFLETDVGMHRDVVAVDKGLTPLSLAKENWRKPVVLDTNDRREVWQSKELHGRFFRALHGPDVDLSASVAWLCSGDLFGETEGFVCAIMDEVMMTNNYRRFIVKDGTVDICRACHRPGESIRHIISGCSRLANGEYLHRHNLVARIIHQQLALKYNLVESEVPYYKYVPDPVLENGCVTLYWDRSIITDRTIVANKPDIVVVDRSERRAMIVDITVPHDENLVKAEKDKQIKYLDLAHEVVDLWDVDSAIIVPIVVSAHGLIAKSFDQHLRRLSLGSWIKGLIQKAVLLDTARIVRRFLSLEP

SEQ ID NO: 13266 - protein, 922 aa, Noctua pronuba
MIIKNNNNNSDDRATRPKPAVPAWQYRIERRIGGARALIGKLICFREGNTRPRVMRFVRRAFSGTDISPRDYMSRVTERIDFLKQKVYAWANRIRRYKRRVDRYTQNRTFQRDERWVYRAWERPDQGVADTRLPDDDAMCSFWRSIWSVPVSHTEDEWTREVERACDPVQEMGAITISPQDVVCAVRSLPNWKSPGPDGLHNFWIKWFTRSHARLATLFQSALESGSLPEFLTTGITHLLHKSGSTAEPKNYRPITCLPTVYKVLTSILRTKISKHINDNSIMSPSQNGCRNGSCGTKELLLIDMAISQQVRRFRRDLSTCWIDYKKAYDSVPHTWLMRVLELYKVDTTLRTFLMSCMGQWRTVLRYPGCRQIQRDSEPIRIERGIFQGDSLSPLWFCLALNPLSTLLEDSGLGYRLRRGGQVISHLLYMDDLKLFAPNDLQLMELLKVTETFSSAIRMEFGVDKCAVMHVKRGEIVESVRTQLSDSINLRSLSATETYKYLGMSEALGINVADMKQSLKERFFGRLKKVFNSLLSGGNKVRAFNGWVMPVLMYSFGILKWTQTELDALDRRVRTLLTAYRMHHPRSSVMRLYIPRRCGGRGFLNAKTLHNREICSLREYFLETDVGMHRDVVAVDKGLTPLSLAKENWRKPVVLDTNDRREVWQSKELHGRFFRALHGPDVDLSASVAWLRSGDLFGETEGFVCAIMDEVMMTNNYRRFIVKDGTVDICRACHRPGESIRHIISGCSRLANGEYLHRHNLVARIIHQQLALKYNLVESEVPYYKYVPDPVLENGCVTLYWDRSIITDRTIVANKPDIVVVDRSERRAMIVDITVPHDENLVKAEKDKQIKYLDLAHEVVDLWDVDSAIIVPIVVSAHGLIAKSFDQHLRRLSLGSWIKGLIQKAVLLDTARIVRRFLSLEP

SEQ ID NO: 13267 - protein, 960 aa, Tinea trinotella
MHKKNRALVCALDSQLVNHFKSSKDLADTHSILYCAAVAVCRVAHVKFPNNDRAARLAVPAWQCRIERRIGEARALIGKLISFREGNTRPRVMRFVRRAFSGTDISSRDYQTRVTERIDFLKQKIYAWANRIRRYKRRVERYTQNRTFQSNERWVYRAWERPDQDVSDMCLPDDDAMSLFWRNIWSVPVGHTEGEWTREVERACDFIPEMGAIIISPQDVACAVRPLSNWKSPGLDGLHNFWIKCFQRSHARLAAQFQSALELGSLPQFLTTGITHLLHKSGSTAEPKNYRPITCLPTVYKVLTSILRAKIDKHIDTNCIMSASQNGCRSGSRGTKELLLIDVAISQQVRRSRRDLSTCWIDYKKAYDSVPHTWLMRVLELYKVDAALRTFLVSCMGQWRTVLHYPGCRRILGNGEPIKIERGIFQGDSLSPLWFCLALNPLSTLLDGSGQGYRLRRDGQVISHLLYMDDLKLFAPNNLQLMKLLKVTETFSSAISMEFGVDKCAIMHVKRGEIMESVGTQLSDSIHLRSLCSTETYKYLGMSETLGINAVDVKQSLRDRFFGRLNKVLNSLLSGGNKVRAFNGWVMPVLMYSFGILKWTQTELDALDRRVRTLLTANRMHHPRSSVMRLYIPRKCGGRGFLNAKTLHNREVCSLREYFLKTDVGMHRDVVAVDKGLTSLSLANENWRKPVVLDANDRREVWQSKELHGRFYRALHGPDVDFLASVSWLRFGDLFGETEGFVCAIMDEVMMTNNYRKYIVKDGTVDICRACHRPGESIRHIISGCSRLANGDYLHRHNLVARIIHQQLALKYNLVESEVPYYRYVPDPVLENGNITLYWDRSIITDRTIVANKPDIVVIDRLERRTIIVDVAVPHDENLVKAEKDKQIKYLDLAREVVDMWEVDTAIIVPIVVTANGLIAKSLDEHLKRLSLGSWIKRLIQKAVLLDTARIVRRFLSQEP

SEQ ID NO: 13268 - protein, 1199 aa, Spilosoma lubricipeda
MLTRARSRAQLLTPDSSLRSALPSSDARTEVPTGAEASSSSSSDEFFSPPTSPTPVRRQERYRPPDSLGPRGPLTSNRAPAAGGNVRRMKWTHSINENVMRAYFRATELGTNLTAYRVRLVSLFQELEPAVNVSAQRLSDQVRAIQRCHLLDDAVLERIRSDIRNSLAVPSSSHVVDTIVNTTSQLPRSEYIDELVDSEIISVSTQCNDTIRSTLEDAIREYRYVDSNNRPRLSRLPIHKRNLALVSALDSLLPDYFNNSEDLSDTHSILYCAAIAVCRVAGVNFVECKTATRPKNTVPAWQCRIERRIAGTRTLIGKLISFRSGNTRPKVMRFVKQAFLGTTVSPQQYMSCVTERIDFLKQKVYAWANRIRRYRKRTDRYNQNRTFQRNEKWVYQKWEKLSPCMSDEHLPDKNATNYFWRNIWSTPVTHTEGHWRRDVERSCESITPMEPVRIDKEDVSCAVRSLANWKAPGPDGLHNFWLKWFRSSHAYLASQFQTALDSGSLPQFLTTGITHLLHKSGSTMDPKNFRPITCLPTLYKLLTSILRLKITTHINNNSIISVSQNGCRSGTRGTKELLIIDMTISQQVRRNRKSLATCWIDYKKAYDSVPHTWLLRVLELYKIDTTLCTFLKSCMGQWRTVLRYPGCRQSTMNDVLIKIERGIFQGDSLSPLWFCLALNPLSTLLEGSGIGYRLQKDDRAISHLLYMDDLKLLAPTKLQLTALLKVTENFSNSIKMEFGVDKCAVMYVKKGLIVESEGVELSDSTKLRSLSATETYKYLGFSQSLGIPESDVKQMLRERFFGRLKKVLKSLLSGGNKVRAYNSWVMPVLMYSFGILRWTQTELDAFDRRVRTLLTAFRMHHPRSSVMRLYIPRKFGGRGLLNIKTLHNREIYNLREYFLHTDVEMHRNVVAVDTGLTPLALAKENWRKPVVLSTNDRREVWKGKELHGRFYRALNGPDIDFKASTSWLRYGDLFGETEGFVCAIMDEVIMTNNYRKYILKDGTVDICRACHRPGESIRHIISGCSRLANGEYLHRHNQVARIVHQQLALKYHLVNSEVPYYRYVPDPVLENGRATLYWDRSIITDRTIVANKPDIVVIDRLERRAMIVDIAVPHDENLVKAEKAKQIKYLDLSHEIVDMWNVDSAIIVPIVVSAHGLIARSLDQHLKRLTLDGWIKGLMQKAVLLDTARIVRRFLSLEP

SEQ ID NO: 13269 - protein, 1194 aa, Autographa pulchrina
MLTRSRSRRPARPPSPDSSPSSASQLPDHVPAPAPAVASSSSDEYYSPPTSPTPVRRQGRRRPPSSLVPSGQPASNRAPAPGGDVRRMKWTQGINENVMRAYYGATEGGTNLTAYRARMLSLFQSLEPDVNVSAQRLSDQVRVIQRNHRLDDITLDRLRSEVQRSPAASTPSPAVVPVIGSPPTNPADGEEEDGAITVSTQCSEHIRSTLEDTIREFRSTPPGLRPRLPRLPMHNRNKAIMGVLDSLLLVYFGSSEDLSDTHSILYCAALTACRVSNVKINNINLDTRPKPAVPAWQCRIERRVAEARALIGKLIAFKDGNSRPRVMRFVRRAFTGTNISPSEYTARVTERIDFFKQKVCAWASRIRRYKCRVDRFHQNRMFQRDQRWVFRTWERPVLGMDDRRLPDEDATNSFWRNIWSVPVSHSEGDWMRDVEESCEPIQEMGAITISPQDVANAIRPMSNWKAPGPDGLQNFWLKWFRSSHGCLASQFQYAIESDALPQFFTTGSTHLLHKTGSTTDPKNYRPITCLPTIYKLLTSILRVKINEHIDSHSIMSASQNGCRNGSRGTKELLLIDMTICQQVRRSKKNLSTCWIDYKKAYDSVPHSWLMRVLELYKINTTLRAFLSSCMRRWTTVLRYPGCRDIQQSGEPIRIERGIFQGDSLSPLWFCLALNPLSTLLENSRLGYSLRRGSQVISHLLYMDDLKLFASNELQLMGLLKITESFSNSIRMEFGVDKCAVMHVKQGGIVESQGIQLSDSINLRSLSAADTYKYLGMSEALGINVADMKQSLLTRFFGRLNKVLKSLLSGGNRVRAFNGWVMPVLMYSFGILKWTQTELDALDRRVRTLLTANRMHHPRSSVMRLYIPRKCGGRGFLNAKTLHNREVCNLREYFLQVDVGMHRDVVAVDKGFTPLSLGKENWHKPVVLSVKDRRDVWQSKELHGRFYRSLHGPDVDFLASVAWLRFGDLFGETEGFVCAIMDEVIMTNNYRKYIIKDGTVDICRACHCPGESIRHIISGCSRLANGEYLHRHNQVARIIHQQLALRYKLVEAEVPYYRYVPDPVLDNGHVTLYWDRSIITDRTIVANKPDIVVIDRSERRAMIVDVTIPHDENLVKAEKEKQMKYLDLAHEVVDMWEVDSAIIVPIVITANGIIAKSLDQHLKRLSLDIWVKGLIQKAVLLDTARIVRRFLSLEP

SEQ ID NO: 13270 - protein, 1189 aa, Ochropleura plecta
MKMITRSAARRDARLPPPGPSLSSASPPPEPSLVVSAVTSAVAVASSSSDEYFSPPTTPPPARRRGGRRPPDGLGLRGPPASDRVPAPGGSVQRMRWTSSINENVMRSYYGATEGGNNLTAYRVRMLSLFQVLEPAVNVSAQRLSDQVRVIQRNRMLDDTVLDRLRTEMQSSQVITSSSQAVVPPQSHQLVSRADEVSNDMATNVSTQCSEEMRSALEGAIREYRYMSPELRPRLPRLPMHNKNRALVAVLDSQLSNYFDNCENLTDAHSILYCAAVAACRVAHVKFPDDGATRPKPAVPFWQCRIERRIGVARALIGKLICFKEGNTRPRVMRFVRRAFAGTDISPPDYMSRITERIDFLKQKVYAWANRIRRYKRRVERYTLNRTFQSDERWVYRAWERPDQGVSDTHLPDDDAMCLFWRNIWSVPVSHTEGEWTREVERACDPIPEMGALTISPQDVACAIRPLPNWKSPGPDGLHNFWIKSIQRSHTCLATLFQTALESGSLPKFLTTGITHLLHKSGSTAEPKNYRPITCLPTLYKVLTSILRAKITKHIDDNSIMSASQNGCRNGSRGTKELLLIDMAISQQVRRSRRHLSTCWIDYKKAYDSVPHTWLMRVLEMYKVDATLRTFLISCMRQWSTVLRYPGCRQIQRNSEPIRIERGIFQGDSLSPLWFCLALNPLSTLLENSGLGYRLRRGGQVISHLLYMDDLKLFAPNDLQLMELLKVTETFSSAIRMEFGVDKCAVMHVKRGEIMESVGTQLSDSTNLRSLSATETYKYLGMSEALGINVADMKQSLKERFFGRLRKVFNSLLSGGNKVRAFNGWVMPVLMYSFGILKWTQTELDALDRKVRTLLTAFRMHHPRSSVMRLYIPRSCGGRGFLNAKTLHNREICSLREYFLETDVGMHRDVVAVDKGLTPLSLAKENWHKPVVLDTNDRKEVWQSKELHGRFFRALHGPDVDQSASVAWLRSGDLFGETCAIMDEVMMTNNYRRFIVKDGTVDICRACHRPGESIRHIISGCSRLANGEYLHRHNLVARIIHQQLALKYNLVESEVPYYRYEPDPVLEHGNITLYWDRSIITDRTIVANKPDIVVVDRSERRAMIVDITVPHDENLVKAEKDKQIKYIDLAREVVDMWDVDSAIIVPIVVSANGLIAKSLDQHLRRLSLGSWIKGLIQKAVPTPRHGSYC

SEQ ID NO: 13271 - protein, 1092 aa, Ochropleura plecta
MRSYYGATEGGNNLTGTVLSLFQVLEPAVNVSAQRLSDQVRVIQRNRMLDDTVLDRLRTEMQNSHVITSSSQAVVPPQSHQLVSRADEVSNDMATNVSTQCSEEMRSALEGAIREYRYISPELRPRLPRLPMHNKNRMLVAVLDSQLSNYFDNCENLTDAHSLLYCAAVAACRVAHVKFPDDRATRPKPTVPVWQYRIERRIGVARALIGKLICFREGNTRPRVMRFVRRAFAETDISPSDYMSRITERIDFLKQKVYAWANRIRRYKRRVERYTLNRTFQSDERWVYRAWERPDQDVSDMRLPDDDAMCSFWRSIWSVPVSHTEGEWTREVERVCDPIPEIGAITISPQDVTCAVRPLPNWKSPGPDGLHNFWLKWIQRSHARLATLFQTALESGSLPKFLTTGITHLLHKSGSTAEPKNYRPITCLPTIYKVLTSILRAKITKHIDDNSIMSASQNGCRNGSRGTKELLLIDMAISQQVRRSQRDLSTCWIDYKKAYDSVPHTWLMKVLELYKVDATLRTFLSLCMRQWNTVLRYPGCRQIQRNSELIRIERGIFQGDSLSPLWFCLALNPLSTLLEDSGLGYRLRRGGRVISHLLYMDDLKLFAPNDSQLMELLKVTETFSSAISMEFGVDKCAVMHVKRGEIVESVGTQLLDSIHLRSLSANETYKYLGMSEALGINVADMKQSLKERFFGRLRKVFNSLLSGGNKVRAFNGWVMPVLMYSFGILKWTQTKLDALDRKVRTLLTAYRMHHPRSSVMRLYIPRSCGGRGFLNAKTLHNREICSLREYFLETDVGMHRDVVTVDKGFTPLSLAKENWHKPVVLDTNDRKEVWQSKELHGRFFRALHGPDVDQSASVAWLRSGDLFGETEGFVCAIMDEVMMTNNYRRFIVKDGTVDICRACHRPGESIRHIISGCSRLANGEYLHRHNLVARIIHQQLALKYSLVESEVPYYRYEPDPVLENGNITLYWDRSIITDRTVVANKPDIVVVDRSERCAMIIDITVPHDENLVKAEKDKQIKYIDLAREVVDMWDVDSAIIVPIVVSANGLIAKSLDQYLRRLSLGSWIKGLIQKAVLLDTARIVRRFLSLEP

SEQ ID NO: 13272 - protein, 1200 aa, Ochropleura plecta
MKMITRSAARRDARLPPPGPSLSSASPPPEPSLVVSAVTSAVAVASSSSDEYFSPPTTPPPARRRGGRRPPDGLGLRGPPASDRVPAPGGSVQRMRWTSSINENVMRSYYGATEGGNNLTAYRVRMLSLFQVLEPAVNVSAQRLSDQVRVIQRNRMLDDIVLDRLRTEMQSSQVITSSSQAVVPPQSHQLVSRADEVSNDMATNVSTQCSEEMRSALEGAIREYRYMSPELRPRLPRLPMHNKNRALVAVLDSQLSNYFDNCENFTDAHSILYCAAVAACRVAHVKFPDDGATRPKPAVPFWQCRIERRIGVARALIGKLICFKEGNTRPRVMRFVRRAFAGTDISPPDYMSRITERIDFLKQKVYAWANRIRRYKRRVERYTLNRTFQSDERWVYRAWERPDQGVSDTHLPDDDAMCLFWRSIWSVPVSHTEGEWTREVERACDPIPEMGALTISPQDVACAIRPLPNWKSPGPDGLHNFWIKSIQRSHTCLATLFQTALESGSLPKFLTTGITHLLHKSGSTAEPKNYRPITCLPTLYKVLTSILRAKITKHIDDNSIMSASQNGCRNGSRGTKELLLIDMAISQQVRRSRRHLSTCWIDYKKAYDSVPHTWLMRVLEMYKVDATLRTFLISCMRQWSTVLRYPGCRQIQRNSEPIRIERGIFQGDSLSPLWFCLALNPLSTLLENSGLGYRLRRGGQVISHLLYMDDLKLFAPNDLQLMELLKVTETFSSAIRMEFGVDKCAVMHVKRGEIMESVGTQLSDSTNLRSLSATETYKYLGMSEALGINVADMKQSLKERFFGRLRKVFNSLLSGGNKVRAFNGWVMPVLMYSFGILKWTQTELDALDRKVRTLLTAFRMHHPRSSVMRLYIPRSCGGRGFLNAKTLHNREICSLREYFLETDVGMHRDVVAVDKGLTPLSLAKENWHKPVVLDTNDRKEVWQSKELHGRFFRALHGPDVDQSASVAWLRSGDLFGETEGFVCAIMDEVMMTNNYRRFIVKDGTVDICRACHRPGESIRHIISGCSRLANGEYLHRHNLVARIIHQQLALKYNLVESEVPYYRYEPDPVLEHGNITLYWDRSIITDRTIVANKPDIVVVDRSERRAMIVDITVPHDENLVKAEKDKQIKYIDLAREVVDMWDVDSAIIVPIVVSANGLIAKSLDQHLRRLSLGSWIKGLIQKAVLLDTARIVRRFLFLEP

SEQ ID NO: 13273 - protein, 868 aa, Ochropleura plecta
MRFVRRAFAGTDISPPDYMSHITERIDFLKQKVYAWANRIRRYKRRVERYTLNRTFQSDERWVYRAWERPDQGVSDTHLPDDDAMCLFWRNIWSVPVSHTEGEWTREVERACDPIPEMGALTISPQDVACAVRPLPNWKSPGPDGLHNFWLKWIQRSHARLATLFQTALESGSLPKFLTTGITHLLHKSGSTTEPKNYRPITCLPTIYKVLTSILRAKITKHIDDNSIMSASQNGCRNGSRGTKELLLIDMAISQQVRRSRRHLSTCWIDYKKAYDSVPHTWLMKVLELYKVDATLRTFLSSCMRQWNTVLRYPGCRQIQRNSEPIRIERGIFQGDSLSPLWFCLALNPLSTLLEDSGLGYRLRRGGRVISHLLYMDDLKLFAPNDSQLMELLKVTETFSSAISMEFGVDKCAVMHVKRGEIVESVGTQLSDSIHLRSLSANETYKYLGMSEALGINVADMKQSLKERFFGRLRKVFNSLLSGGNKVRAFNGWVMPVLMYSFGILKWTQTELDALDRKVRTLLTAYRMHHPRSSVMRLYIPRSCGGRGFLNAKTLHNREICSLREYFLEADVGMHRDVVTVDKGFTPLSLAKENWRKPVVLDTNDRKEVWQSKELHGRFFRALHGPDVDQSASVAWLRSGDLFGETEGFVCAIMDEVMMTNNYRRFIVKDGTVDICRACHRPGESIRHIISGCSRLANGEYLHRHNLVARIIHQQLALKYNLVESEVPYYRYEPDPVLEHGNITLYWDRSIITDRTVVANKPDIVVVDRSERRAMIIDITVPHDENLVKAEKDKQIKYIDLAREVVDMWDVDSAIIVPIVVSANGLIAKSLDQYLRRLSLGSWIKGLIQKAVLLDTARIVRRFLSLEP

SEQ ID NO: 13274 - protein, 960 aa, Hecatera dysodea
MHNKNRALVCALDSQLENCFNSSKDLADTHSILYCAAAAACRVAHVKFPNSDRATRPAVPAWQCRIERRIGEARALIGKLICFREGNTRRRVMRFVRRAFSGTDISPRDYLTRVTERIDFLKQKVYAWASRIRRYKRRVERYTQNRTFQSNERWVYRAWERPDQVVTDTHLPDDDAMCSFWRSIWSVPVSHTEGDWTREVERTCDPIPEMGAITISPQDVARAVRPLPNWKSPGPDGLHNFWIKWFTRSHVRLASQFQSALESRSLPQFLTTGITHLLHKSGSTAEPKNYRPITCLPTVYKVLTSILRAKINDHIESNSIMSTSQNGCRNGARGTKELLLIDVAISQQVRRSRKDLSTCWIDYKKAYDSVPHTWLMRVLELYKVDAVLRAFLMSCMGQWRTVLHYPGCRQTQANSEPIRIERGIFQGDSLSPLWFCLALNPLSTLLEGSGQGYRLRRGGQVISHLLYMDDLKLFAPNNLQLMKLLKVTETFSSDISMEFGVDKCAVMHVKRGEIMESVGTQLSDSIHLRSLCSTETYKYLGMSEALGINATSVKQSLKERFFGRLNKVLNSLLSGGNKVRAFNGWVMPVLMYSFGILKWTQTELDALDRRVRSLLTANRMHHPRSSVMRLYIPRKCGGRGFLNAKTLHNREVCSLREYFLEADVGMHRDVVAVDKGLTPLSLANENWRKPVVLDTNDRREVWQSKELHGRFYRVLHGPDVDFLASVAWLRFGDLFGETEGFICAITDEVMMTNNYRKYIVKDGTVDICRACHRPGESIRHIISGCSSLANGDYLHRHNLVARIIHQQLALKYNLVESEVPYYRYVPDPVLENGNCTLYWDRSIITDRTIVANKPDIVVIDRLERRAMIVDIAVPHDENLVKAEKDKQSKYLDLAREVVDMWNVNTAVIVPIVVTANGIIAKSLDQHLKRLSLGSWIKGLIQKAVLLDTARIVRRFLSREP

SEQ ID NO: 13275 - protein, 1105 aa, Hecatera dysodea
MRWTQTINENVMRSYYGATEGGTNLTAYRGRMLSLFQVLEPAVNVSAQRLSDQVRVIQRNRMLDDSVLDRLRTEICSHVIVPSPQTVAPPQLTQIPCHADEENNDRVTNVSTQCNDELRSALESAIREYLYVSPELRPRIPRLPMHNKNRALVAALDSQLSNYFDNCEDLTDAHSIMYCAAVAACRVAHVKMPSDRVTRPKVAVPAWQCRIERRIGGARALIGKLICFREGNTRPRVMRFVRRAFSGTDISPSDYLSRVTERIDFLKQKVYAWANRIRRYKRRVERYTQNRTFRSNERWVYKAWERPDQDVTDMHPPDDDAMFSFWRNIWSVPVSHTEGDWIREVERACDPLPEMGAIIISPQDVARAVRPLPNWKSPGPDGLHNFWIKWFKGSHACLASRYQAALESGSLPEFFMTGVTHLLHKSGSTAEPKNYRTITCLPTVYKVLTSILRDKINQHINSNNIMSTSQNGCRNGSRGTKELLLIDMVISQQVRRSRKDLSTCWIDYKKAYDSVPHSWLMRVLELYKIDTTLRTFLMSCMGQWRTVLRYPGCRNIQRNSEPVRIERGIFQGDSLSPLWFCLALNPLSTLLENSGLGYRLRRGGQVISHLLYMDDLKLFAPTNLQLMELLKVTETFSNAIRMEFGVDKCAVMHVKRGEIMESVGTQLSDSINLRSLSSTETYKYLGMSEALGINVTDMKQSLRERFFGRLKKVLNSLLSGGNKVRAFNGWVMPVLMYSFGVLKWTQTELDALDRRVRTLLTAYRMHHPRSSVMRLYIPRKCGGRGFLNAKTLHNREICSLRVYFLAVDVGMHRDVVAVDKGLTPLSLANENWRKPAVLDTNDRRAVWQSKELHGCFFRALHGPDVDQLASVAWLRFGDLFGETEGFVCAILDEVIMTRNYRRFIVKDGTVDICRACHRPGESIRHIVSGCSSLANGEYLHRHNLVARIIHQQLALKYSLVESEVPYYRYVPDPVLDNGNITLYWDRSIITDRTIVANKPDIVVVDRIVRRAMIVDITVPHDENLVKAEKDKQIKYLDLAREVVDMWDVDSAIIVPIVVSVNGLIAKSLDQHLRRLTLGGWIKGLIQKAVLLDTARIVRRFLSLEP

SEQ ID NO: 13276 - protein, 1200 aa, Hecatera dysodea
MLTRSRTRCQNTRLTPSDSSLSSASQPPGPTPAVSPEIPVAAVASSSSDEYFSPPTTPPPARRRGRGRPPTSLGPRGPPASDRVPAIGGSVQRMRWTHSINENVMRSYFGATEGGTNLTAYRGRMLSLFQVLEPAVNVSAQRLSDQVRVIQRNRMLDDAVLDRLRLESRSSRVSPASPPAAVQIQPSISPRPDHVSEDVDDGTISVSTQCNERLRSALEDAFREYRSTPPELRPRLPRLPMHNKNRALVCALDSQLSIYFDSSENLTDTHSILYCGAAAACRVAHVKLPNSDRVARPAVPAWQCRIERRIAEARALIGKLICFREGNTRRRVMRFVRRAFSGTDISPRDYLTRVTERIDFLKQKVYAWANRIRRYKRRVERYTQNRIFQNNERWVYRAWERPDQGVTDTRLPDDEAMLSFWRNIWSVPVSHTEGDWTREVERACDSIPEMGAINISPQDVARAVRPLPNWKSPGPDGLHNFWIKWLTRSHARLASQFQSALESRSLPQFFTTGITHLLHKSGSTAEPKNYRPITCLPTVYKVLTSILRAKINDHIESNSIMSTSQNGCRSGARGTKELLLIDVAISQQVRRSRKDLSTCWIDYKKAYDSVPHTWLMRVLELYKVDAVLRAFLMSCMGQWRTVLHYPGCRQTQVNSEPIRIERGIFQGDSLSPLWFCLALNPLSTLLEGSGQGYRLRRGGQVISHLLYMDDLKLFAPNNLQLMKLLKVTETFSSDISMEFGVDKCAVMHVKRGEIMESVGTQLSDSIHLRSLCSTETYKYLGMSEALGINATSVKQSLKERFFGRLNKVLNSLLSGGNKVRAFNGWVMPVLMYSFGILKWTQTELDALDRRVRSLLTANRMHHPRSSVMRLYIPRKCGGRGFLNAKTLHNREVCSLREYFLEADVGMHRDVVAVDKGFTPLSLANENWRKPVVLDTNDRREVWQSKELHGRFYRVLHGPDVDFLASVAWLRFGDLFGETEGFICAITDEVMMTNNYRKYIVKDGTVDICRACHRPGESIRHIISGCSSLANGDYLHRHNLVARIIHQQLALKYNLVESEVPYYRYAPDPVLENGNCTLYWDRSIITDRTIVANKPDIVVIDRLERRAMIVDIAVPHDENLVKAEKDKQSKYLDLAREVVDMWDVNTAVIVPIVVTANGIIAKSLDQHLKRLSLGSWIKGLIQKAVLLDTARIVRRFLSWEP

SEQ ID NO: 13277 - protein, 1200 aa, Hecatera dysodea
MLTRSRTRAQTTQSTSSGSSLSSASQPPGPTPAVSPEIPVAAVASSSSDEYFSPPTTPPPARRRGRGRPPTSLGPRGPPASDRVPAIGGSVQRMRWTQSINENVMRSYFGATEGGTNLTAYRGRMLSLFQVLEPAVNVSAQRLSDQVRVIQRNRMLDDAVLDRLRLESRSSRVSPASPPAAVQIQPSISPRPDHVSEDVDDGAITVSTQCNERLRSALEDAFREYRSTPPELRPRLPRLPMHNKNRALVCALDSQLENCFNSSKDLADTHSILYCAAAAACRVAHVKFPNSDRATRPAVPAWQCRIERRIGEARALIGKLICFREGNTRRRVMRFVRRAFSGTDISPRDYLTRVTERIDFLKQKVYAWASRIRRYKRRVERYTQNRTFQSNERWVYRAWERPDQVVTDTHLPDDDAMCSFWRSIWSVPVSHTEGDWTREVERTCDPIPEMGAITISPQDVARAFRPLPNWKSPGPDGLHNFWIKWFTRSHVRLASQFQSALESRSLPQFLTTGITHLLHKSGSTAEPKNYRTITCLPTVYKVLTSILRAKINDHIESNSIMSTSQNGCRNGARGTKELLLIDVAISQQVRRSRKDLSTCWIDYKKAYDSVPHTWLMRVLELYKVDAVLRAFLMSCMGQWRTVLHYPGCRQTQANSEPIRIERGIFQGDSLSPLWFCLALNPLSTLLEGSGQGYRLRRGGQVISHLLYMDDLKLFAPNNLQLMKLLKVTETFSSDISMEFGVDKCAVMHVKRGEIMESVGTQLSDSIHLRSLCSTETYKYLGMSEALGINATSVKQSLKERFFGRLNKVLNSLLSGGNKVRAFNGWVMPVLMYSFGILKWTQTELDALDRRVRSLLTANRMHHPRSSVMRLYIPRKCGGRGFLNAKTLHNREVCSLREYFLEADVGMHRDVVAVDKGLTPLSLANENWRKPVVLDTNDRREVWQSKELHGRFYRVLHGPDVDFLASVAWLRFGDLFGETEGFICAITDEVMMTNNYRKYIVKDGTVDICRACHRPGESIRHIISGCSSLANGDYLHRHNLVARIIHQQLALKYNLVESEVPYYRYVPDPVLENGNCTLYWDRSIITDRTIVANKPDIVVIDRLERRAMIVDIAVPHDENLVKAEKDKQSKYLDLAREVVDMWNVNTAVIVPIVVTANGIIAKSLDQHLKRLSLGSWIKGLIQKAVLLDTARIVRRFLSREP

SEQ ID NO: 13278 - protein, 1161 aa, Hecatera dysodea
MLTRAAARRARLPSPGSSLSSASPPPEPSPTVSAATPAVAVASSSSDEYFSPPTSPPPARRRRGRRPPDGLGPRGPPVSDRVPAPGGSVQRMRWTQTINENVMRSYYGATEGGTNLTAYRGRMLSLFQVLEPAVNVSAQRLSDQVRVIQRNRMLDDSVLDRLRTEICSHVIVPSPQTVAPPQLTQIPCHADEENNDRVTNVSTQCNDELRSALESAIREYRYVSPELRPRIPRLPMHNKNRALVAALDSQLSNYFDNCEDLTDAHSIMYCAAVAACRVAHVKMPSDRVTRPKVAVPAWQCRIERRIGGARALIGKLICFREGNTRPRVMRFVRRAFSGTDISPSDYLSRVTERIDFLKQKVYAWANRIRRYKRRVERYTQNRTFRSNERWVYKAWERPDQDVTDMHPPDDDAMCSFWRNIWSVPVSHTEGDWIREVERACDPLPEMGAIIISPQDVARAVRPLPNWKSPGPDGLHNFWIKWFKGSHACLASRYQAALESGSLPEFFMTGVTHLLHKSGSTAEPKNYRPITCLPTVYKVLTSILRDKINQHINSNNIMSASQNGCRNGSRGTKELLLIDMVISQQVRRSRKDLSTCWIDYKKAYDSVPHSWLMRVLELYKIDTTLRTFLMSCMGQWRTVLRYPGCRNIQRNSEPVRIERGIFQGDSLSPLWFCLALNPLSTLLENSGLGYRLRRGGQVISHLLYMDDLKLFAPTNLQLMELLKVTETFSNAIRMEFGVDKCAVMHVKRGEIMESVGTQLSDSINLRSLSSTETYKYLGMSEALGINVTDMKQSLRERFFGRLKKVLNSLLSGGNKVRAFNGWVMPVLMYSFGVLKWTQTELDALDRRVRTLLTAYRMHHPRSSVMRLYIPRKCGGRGFLNAKTLHNREICSLREYFLAVDVGMHRDVVAVDKGLTPLSLANENWRKPAVLDTNDRRAVWQSKELHGRFFRALHGPDVDQLASVAWLRFGDLFGETEGFVCAIMDEVIMTRNYRRFIVKDGTVDICRACHRPGESIRHIVSGCSSLANGEYLHRHNLVARIIHQQLALKYSLVESEVPYYRYVPDPVLDNGNITLYWDRSIITDRTIVANKPDIVVVDRIVRRAMIVDITVPHDENLVKAEKDKQIKYLGSRGCRHVGCGFSNHCTDSRFRQWLNSQEPRPTP

SEQ ID NO: 13279 - protein, 856 aa, Hecatera dysodea
MRFVRRAFSGTDISPRDYLTRVTERIDFLKQKVYAWANHIRRYKRRVERYTQNRTFQRNERWVYRAWERPDQGVTDTRLPDDEAMLSFWRNIWSVPVSHTEGDWTREVERACDPIPEMGAINISPQDVARAVRPLPNWKSPGPDGLHNFWIKWFKGSHARLAAQFQAALGSGSLPKFLTTGITHLLHKSGSTAEPKNYRPITCLPTVYKVLTSILRAKINNHIDSNSIMSASQNGCRNGSRGTKELLLIDVAISQQVRRSRRDLSTCWIDYKKAYDSVPHTWLMRVLELYKVDAVLRTFLMSCMGQWRTVLHYPGCRQTQANSEPIRIERGIFQGDSLSPLWFCLALNPLSTLLEGSGQGYRLRRGGQVISHLLYMDDLKLFAPNNLQLMKLLKVTETFSSDISMEFGVDKCAVMHVKRGEIMESVGTQLSDSIHLRSLCSTETYKYLGMSEALGINATGVKQSLKERFFGRLNKVLNSLLSGGNKVRAFNGWVMPVLMYSFGILKWTQTELDALDRRIRSLLTANRMHHPRSSVMRLYIPRKCGGRGFLNAKTLHNREVCSLREYFLEADVGMHRDVVAVDKGLTPLSLANENWRKPVVLDTNDRREVWKSKENHGRFYRVLHGPDVDFVASVAWLRFGDLFGETEGFICAITDEVMMTNNYRKYIVKDGTVDICRACHRPGESIRHIISGCSSLANGDYLQLALKYNLVESEVPYYRYAPDPVLENGNCTLYWDRSIITDRTIVANKPDIVVIDRLERRAMIVDIAVPHDENLVKAEKDKQSKYLDLAHEVVDMWNVNTAVIVPIVVTANGIIAESLDQHLKRLSLGSWIKGLIQKAALLDTARIVRRFLSREP

SEQ ID NO: 13280 - protein, 1200 aa, Mythimna impura
MLTRAAARRARPPPPDSSLSSASPPPEPSPIVSAVTSAAAVASSSSDEYFSPPTTPPPARRRGGRRPPSGLGPRGPPASDRVPAPGGSVQRMRWTRSINENVMRSYYGATEGGNNLTAYRVRMLSLFQVLEPAVNVSAQRLSDQVRVIQRNHMLDDTVLDRLRTEMGSHAIASSSQTVAPSQVSPSNHLPNHADEESTDMVTHVSTQCSNELRSALECAIREYRNMPLELRPRLPRLPMCNKNKALVAALDSQLSNYFDDCEDLTDTHSIMYCAAVAACRVAHVKFPNSDVATRLKPAVPAWQCRIERRIGGARALIGKLICFREGNTRPRVMRFVRRAFSGTDISPRDYMSCVTERIDFLKQKVYAWANRIRRYKRRVERYTQNRTFRSNERWVYRAWEQPDQDGADTRLPDDDAMSSFWRNIWSVPVSHTEGGWTREVERACEPIPEMGAITISPQDVARAVRPLPNWKSPGPDGLHNFWIKWLQRSHARLASQYQTALESGSLPEFLTTGVTHLLHKSGSTAEPKNYRPITCLPTVYKVLTSILRAKINHHVDNNAIMSASQNGCRNGSRGTKELLLIDMAISQQVRRSRKDLSTCWIDYKKAYDSVPHTWLMRVLELYKIDATLRTFLMSCMRQWRTVLRYPGCRHIQRNSEPVRIERGIFQGDSLSPLWFCLALNPLSTLLENSGLGYRLKRGGQVISHLLYMDDLKLFAPNNLQLMELLKVTETFSSAIRMEFGVDKCAVMHVKRGEIVESVGTQLSDSINLRSLSPTETYKYLGMSEALGINATDMKQTLRERFFGRLKKVFNSLLSGGNKVRAFNGWVMPVLMYSFGVLKWTQTELDALDRRVRTLLTACRMHHPRSSVMRLYIPRKCGGRGFLNAKTLHNREVCSLREYFLTADVGMHRDVVAVDKGLTPLSLANESWRKPVVLDTNDRREVWQSKELHGRFFRALHGPDVDQLASVAWLRVGDLFGETEGFVCAIMDEVIMTNNYRRFIVKDGTVDICRACHRPGESIRHIISGCSRLANGEYLHRHNLVARIIHQQLALNYSLVESEVPYYRYVPDPVLDNGDITLYWDRSIITDRTIVANKPDIVVVDRRERRTMIVDISVPHDENLVKAEKDKQIKYIDLAREVVDMWDVDSAIIVPIVVSANGLIAKSLDQHLRRLALGGWIKGLIQKAVLLDTARIVRRFLSLEP

SEQ ID NO: 13281 - protein, 1200 aa, Mythimna impura
MLTRSRAQKLHTHPTSSGSSLSSASQPPGPAPTVSPEIPVAAVASSSSDEYFSPPTTPPPARRRGRGRPPASLGPRGPPASDRVPAAGGSVQRMRWTSSINENVMRSYFGATEGGINLTAYRSRMLSLFQVLEPAVNVSVQRLSDQVRVIQRNRMLDDAVLDRLRLESQSSRVSPATTPAVVQRLPTASPRPVQVGDADDDAAISVSTQCNDRLRGALEDAFREYRSTPPGLRPRLPRLPMHKRNRALVCALDSQLSNCFDSSKDLTDTHSILYCAAVAACRVAHVKFPNCDRATRPAVPAWQCRIEHRIGEARALIGKLICFREGNTRPRVMRFVRRAFSGTDISPRDYLPCVTERIDFLKQKIYAWANRIRRYKRRVERYTRNRTFQSNERWVYRDWERSDQGVTDTRLPDDDAMCSFWRSIWSAPVSHTEGDWIREVERACDLLPEMGAITISPQDVARAVRPLPNWKSPGPDGLHNFWVKWFQRSHARLASQFQSALESGSLPQFLTTGITHLLHKSGSTAEPKNYRPITCLPTVYIVLTSILRAKINSHIETNSIMSASQNGCRNGSRGTKELLLIDIAISQQVRRSRKNLSACWIDYKKAYDSVPHTWLMRVLELYKVDATLRTFLMSCMGQWRTVLHYPGCRQIQENNEPIRIERGIFQGDSLSPLWFCLALNPLSTLLEGSGLGYRLKRGGQVISHLLYMDDLKLFAPNNLQLVELLKVTETFSSAIRMEFGVDKCAVIHVKRGEIMESVGIQLSDSIHLRSLCSTETYKYLGMSESLGINTDDVKQSLKERFFGRLNKVLNSLLSGGNKVRAFNGWVMPVLMYSFGILKWTQTELDALDRRVRTLLTANRMHHPRSSVMRLYIPRKCGGRGFLNAKTLHNREVCSLREYFLKTDVGMHRDVVAVDKGLTPLSLANENWRKPIVLDTNDRREVWQSKELHGRFYRALHGPDVDLLASVSWLRFGDLFGETEGFVFAIMDEVMMTNNYRKYIVKDGTVDICRACHRPGESIRHIISGCSHLANGGYLHRHNLVARIIHQQLALKYNLVESEVPYYRYVPDPVLDNGNITLYWDRSIITDRTIVANKPDIVVIDRLERRTMIVDIAVPHDENLVKAEKDKQTKYLDLAREVVDMWEVDKAIIVPIVVTANGLIAKSLEQHLRRLSLGSWIKGLIQKAVLLDTARIVRRFLSQEP

SEQ ID NO: 13282 - protein, 1200 aa, Mythimna impura
MLSRSRALKLNTHPTSSGSSLSSASQPPGPAPTVSPEIPVAAVASSSSDEYFSPPTTPPPARRRGRGRPPASLGPRGPPASDRVPAASGSVQRMRWTSSINENVMRSYFGATEGGINLTAYRGRMLSLFQVLEPAVNVSVQRLSDQVRVIQRNRMLDDAVLDRLRLESQSSRVSPATTPAAVQRLPTASPRPVQVGDADDDAAISVSTQCNDRLRGALEDAFREYRSTPPGLRPRLPRLPMHKRNRALVCALDSQLSNCFDSSKDLTDTHSILYCAAVAACRVAHVKFPNCDRATRPAVPAWQCRIEHRIGEARALIGKLICFREGNTRPRVMRFVRRAFSGTDISPRDYLSCVTERIDFLKQKIYAWANRIRRYKRRVERYTRNRTFQSNERWVYRDWERPDQDVTDTRLPDDDAMCSFWRSIWSAPVSHTEGDWIREVERACDLLPEMGAITISPQDVARAVRPLPNWKSPGPDGLHNFWVKWFQRSHARLASQFQSALESGSLPQFLTTGITHLLHKSGSTAEPKNYRPITCLPTVYKVLTSILRAKINSHIETNSIMSASQNGCRNGSRGTKELLLIDIAISQQVRRSRKNLSACWIDYKKAYDSVPHTWLKRVLELYKVDATLRTFLMSCMGQWRTVLHYPGCRQIQENNEPIRIERGIFQGDSLSPLWFCLALNPLSTLLEGSGLGYRLKRGGQVISHLLYMDDLKLFAPNNLQLVELLKVTETFSSAIRMEFGVEKCAVIHVKRGEIMESVGIQLSDSIHLRSLCSTETYKYLGMSESLGINTDDVKQLLKERFFGRLNKVLNSLLSGGNKVRAFNGWVMPVLMYSFGILKWTQTELDALDRRVRTLLTANRMHHPRSSVMRLYIPRKCGGRGFLNAKTLHNREVCSLREYFLKTDVGMHRDVVAVDKGLTPLSLANENWRKPIVLDTNDRREVWQSKELHGRFYRALHGPDVDLLASVSWLRFGDLFGETEGFVFAIMDEVMMTNNYRKYIVKDGTVDICRACHRPGESIRHIISGCSHLANGDYLHRHNLVARIIHQQLALKYNLVESEVPYYRYVPDPVLDNGNITLYWDRSIITDRTIVANKPDIVVIDRLERRTMIVDIAVPHDENLVKAEKDKQTKYLDLAREVVDMWEVDRAIIVPIVVTANGLIAKSLEQHLRRLSLGSWIKGLIQKAVLLDTARIVRRFLSQEP

SEQ ID NO: 13283 - protein, 1200 aa, Mythimna impura
MLTRAAARRARHPPPGSPLSSASPPPDLGSPVSPVAAVASSSSDEYFSPPTSPTPVRRPGRGRPPKSLGPGGQPAPSRVPAAGGCVQRMRWTQSMNENVMRAYYGSTEGGTSLTAYRDRMLSLFQDLEPTVNVSAQRLSDQVRFIQRNHRLDDAALDRLRSEVLSNQIVSTSIQTQTAATPTTNAISPRSILNNDDADERVVTVSSQCNDELRSALEDALREYRLTPTELRPRLPRLPMHKKNRALVCTLDSLLKNIFESSENLVDTHSILYCGAVAACRLANIKFPNTDGTIRPKPAVPAWQYRIERRIDEARVLIGKLHSFREGNTRPRVMRFVRRAFLGTSISPQEYMSRVTERIDFLKQKVCAWASRIRRYKRRVDRYSQNRIFQSDERWVYRAWERPEQNVIDGLRPDDFATITFWRNIWSVPVSHTEGGWIREVERVCEAIPEMEKITISPADVAKAVRPLPNWKSPGPDGLQNFWLKWYRNSHAPLASQFQSTLESGSLPEYLTTGVTHLLHKTGNPAEPKNYRPITCLSTVYKLLTSILREKINRHIENNSIMSASQNGCRNGSRGTKELLLIDMAVSQQARRSRKDLSTCWIDYKKAYDSVPHTWLMRVLELYKIDTTLRTFLESCMRQWKTVLRYPGCRPIQGDDEPIRIKRGIFQGDSLSPLWFCLALNPLSTLLEDSGLGYRLRRGGQAISHLLYMDDLKLFAPSNLQLMELLKVTETFSSAIRMEFGVDKCAAMHVKQGEIMESEGIQLPDSIHLKSLSSTETYRYLGMSEALGINNADMKQSLKERFFGRLKKVLNSLLSGGNKVRAFNGWVMPVLMYSFGILKWTQTELDALDRRVRTLLTANRMHHPRSSVMRLYISRKCGGRGFLNAKTLHNREVCSLREYFLKTDVGMHRDVVAVDKGLTPLSMAKEDWRKPVVLTTDDRKEVWKGKELHGRFYRALHEPDVDFLASVAWLRFSDLFGETEGFVCAIMDEVILTNNYRKYIMKDGTVDVCRACHRPGESIRHIISGCSRLANGEYLHRHNQVARIIHQQLALKYNLVDSEVPYYKYVPDPVLENDHVTLYWDRSIITDRTIVANKPDIVVIDRLARRAIIVDVTIPHDENLVKAEKEKQIKYLDLAHEVVGMWNMDSAVIVPIVVTANGLIAKSFDDHLSKLSLRGWIKGLIQKAVLLDTARIVRRFLSLEP

SEQ ID NO: 13284 - protein, 1200 aa, Mythimna impura
MLTRSRAREQETHPTSSGSSLSSASQPPGPAPAVSPVIPAAAVASSSSDEYFSPPTTPPPARRRGRGRPPASLRPRGPPASDRVPAAGGSVQRMRWTQSINENVMRSYFGATEGGSNLTAYRGRMLSLFQVLEPTVNVSAQRLSDQVRVIQRNRMLDDAVLDRLRLESQRSRASSATPVAAVQLQPSALPRPDHVGDADDDAAISVSTQCNERLRSALEDAFREYRSTPPGLRPRLPRLPMHKRNRALVCALDSQLSNCFDSSKDLADTHSILYCAAAAACRVAHVKFPNCDRATRPAVPAWQRRIERRIGEARALIGKLICFREGNTRPRVMRFVRRAFLGTDNSPQNYLPCVTERIDFLKQKVYAWASRIRRYKRRVERYTQNRTFQSNERWVYRTWERPDQDVTDTRLPDDDAMCSFWRRIWSVPVSHIEGDWIREVERTCDLLPEMGAITISPQDVARAVRPLPNWKSPGPDGLHNFWIKWFQGSHARLASQFQSALESGSLPEFLTTGITHLLHKSGSTADPKNYRPITCLPTVYKVLTSILRAKINTHIETNSIMSASQNGCRNGSRGTKELLLIDMAISQQVRRSRKDLSTCWIDYKKAYDSVPHTWLMRVLELYKVDTTLRTFLMSCMGQWRIVLHYPGCRQIRENSEPIRIERGIFQGDSLSPLWFCLALNPLSTLLEGSGLGYRLKRGGQVISHLLYMDDLKLFAPNNLHLMELLKVTETFSSAIRMEFGVDKCAVMHVKRGEIMESVGTQLSDSIYLRSLCSTETYKYLGMSEALGINAADVKQSLKERFFGRLNRVLKSLLSGGNKVRAFNGWVMPVLMYSFGILKWTQTELDALDRRVRTLLTANRMHHPRSSVMRLYIPRKCGGRGFLNAKTLHNREVCSLREYFLETDVGMRRDVVAVDKGLTPLSLANGNWRKPIILDTNDRREVWQSKELHGRFYRALHGPDVDLLASVSWLRFGDLFGETEGFVCAIMDEVVMTNNYRKYIVKDGTADICRACHRPGESIRHIISGCSHLANGDYLHRHNLVARIIHQQLALKYNLVESEVPYYKYVPDPVLDNGSITLYWDRSIITDRTIVANKPDIVVIDRLERRTVIVDIAVPHDENLVKAEKDKQTKYLDLAREVVDMWEVDTAVIVPIVVTANGLISKSLDQHLRRLSLGSWIKGLIQKAVLLDTARIVRRFLSQEP

SEQ ID NO: 13285 - protein, 960 aa, Mythimna impura
MHKRNRALVCALDSQLSNCFDSSKGLTDTHSILYCAAVAACRVAHVKFPNCDRATRPAVPAWQCRIEHRIGEARALIGKLICFREGNTRPRVMRFVRRAFSGTDISPRDYLPCVTERIDFLKQKIYAWANRIRRYKRRVERYTRNRTFQSNERWVYRDWERSDQGVTDTRLPDDVAMCSFWRSIWSAPVSHTEGDWIREVERACDLLPEMGAITISPQDVARAVRPLPNWKSPGPDGLHNFWVKWFQRSHARLASQFQSALESGSLPQFLTTGITHLLHKSGSTAEPKNYRPITCLPTVYKVLTSILRAKINSHIETNSIMSASQNGCRNGSRGTKELLLIDIAISQQVRRSRKNLSACWIDYKKAYDSVPHTWLMRVLELYKVDATLRTFLMSCMGQWRTVLHYPGCRQIQENNEPIRIERGIFQGDSLSPLWFCLALNPLSTLLEGSGLGYRLKRGGQVISHLLYMDDLKLFAPNNLQLVELLKVTETFSSAIRMEFGVDKCAVIHVKRGEIMESVGIQLSDSIHLSSLCSTETYKYLGMSESLGINTDDVKQSLKERFFGRLNKLLNSLLSGGNKVRAFNGWVMPVLMYSFGILKWTQTELDALDRRVRTLLTANRMHHPRSSVMRLYIPRKCGGRGFLNAKTLHNREVCSLREYFLKTDVGMHRDVVAVDKGLTPLSLANENWRKPIVLDTNDRREVWQSKELHGRFYRALHGPDVDLLASVSWLRFGDLFGETEGFVFAIMDEVMMTNNYRKYIVKDGTVDICRACHRPGESIRHIISGCSHLANGDYLHRHNLVARIIHQQLALKYNLVESEVPYYRYVPDPVLDNGNITLYWDRSIITDRTIVANKPDIVVIDRLERRTMIVDIAVPHDENLVKAEKDKLTKYLDLAREVVDMWEVDKAIIVPIVVTANGLIAKSLEQHLRRLSLGSWIKGLIQKAVLLDTARIVRRFLSQEP

SEQ ID NO: 13286 - protein, 868 aa, Mythimna impura
MRFVRRAFLGTGISPQEYMSRVTERIDFLKQKVCAWASRIRRYKRRVDRYSQNRMFQSDERWVYRAWERPEQNVIDGRRPDDFATITFWRNIWSVPVSHTEGDWMRDVERVCEAIPEMEKVVITPADVAKAVRPLPNWKSPGPDGLQNFWLKWFSNSHAPLASQFQSTLESGSLPEYLTTGVTHLLHKTGNPVEPKNYRPITCLSTVYKLLTSILRAKINRHIENNLIMSASQNGCRNGSRGTKELLLIDMAINQQARRSRKDLSTCWIDYKKAYDSVPHTWLMRVLELYKVDMTLRTFLESCMRQWKTVLRYPGCRPIQGNDEPIRIKRGIFQGDSLSPLWFCLALNPLSTLLEESGLGYRLRRGGQAISHLLYMDDLKLFAPSNLQLMELLKVTETFSSAIRMEFGVDKCAAMHVKRGEIMESEGIQLPDSIHLRSLSSTETYRYLGMSEALGINNADMKQSLKERFFGRLKKVLNSLLSGGNKVRAFNGWVMPVLMYSFGILKWTQTELDALDRRVRTLLTANRMHHPRSSVMRLYISRKCGGRGFLNAKTLHNREVCSLREYFLKTDVGMHRDVVAVDKGLTPLSMAKEDWRKPVILTTDDRKEIWKGKELHGRFYRALHEPDVDFLASVAWLRFSDLFGETEGFICAIMDEVILTNNYRRYIMKDGTVDVCRACHRPGESIRHIISGCSRLANGEYLHRHNQVARIIHQQLALKYNLVDSEVPYYKYVPDPVLENDHVTLYWDRSIITDRTIVANKPDIVVIDRLARRAVIVDVTIPHDENLVKAEKEKQIKYLDIAHEVVDMWNVDSAVIVPMVVTANGLIAKSFDDHLSKLSLRGWIKGLIQKAVLLDTARIVRRFLSLEP

SEQ ID NO: 13287 - protein, 1201 aa, Mythimna impura
MLTRSRAREQETHPTSSGSSLSSASQPPGPAPAVSPVIPAAAVASSSSDEYFSPPTTPPPARRRGRGRPPASLRPRGPPASDRVPAAGGSVQRMRWTQSINENVMRSYFGATEGGSNLTAYRGRMLSLFQVLEPTVNVSAQRLSDQVRVIQRNRMLDDAVLDRLRLESQRSRALSATPPAAVQLQPSALPRPDHVGDADDDAAISVSTQCNERLRSALEDAFREYRSTPPGLRPRLPRLPMHKRNRALVCALDSQLSNCFDSSKDLADTHSILYCAAAAACRVAHVKFPNCDRATRPAVPAWQRRIERRIGEARALIGKLICFREGNTRPRVMRFVRRAFLGTDISPQNYLPCVTERIDFLKQKVYAWASRIRRYKRRVERYTQNRTFQSNERWVYRTWERPDQDVTDTRLPDDDAILCSFWRRIWSVPVSHIEGDWIREVERTCDLLPEMGAITISPQDVARAVRPLPNWKSPGPDGLHNFWIKWFQGSHARLASQFQSALESGSLPEFLTTGITHLLHKSGSTADPKNYRPITCLPTVYKVLTSILRAKINTHIETNSIMSASQNGCRNGSRGTKELLLIDMAISQQVRRSRKDLSTCWIDYKKAYDSVPHTWLMRVLELYKVDTTLRTFLMSCMRQWRTVLHYPGCRQIRENSEPIRIERGIFQGDSLSPLWFCLALNPLSTLLEGSGLGYRLKRGGQVISHLLYMDDLKLFAPNNLHLMELLKITETFSSAIRMEFGVDKCAVMHVKRGEIMESVGTQLSDSIYLRSLCSTETYKYLGMSEALGINAADMKQSLKERFFGRLNRVLKSLLSGGNKVRAFNGWVMPVLMYSFGILKWTQTELDALDRRVRTLLTANRMHHPRSSVMRLYIPRKCGGRGFLNAKTLHNREVCSLREYFLETDVGMHRDVVAVDKGLTPLSLANGNWRKPIILDTNDRREVWQSKELHGRFYRALHGPDVDLLASVSWLRFGDLFGETEGFVCAIMDEVVMTNNYRKYIVKDGTADICRACHRPGESIRHIISGCSHLANGDYLHRHNLVARIIHQQLALKYNLVESEVPYYKYVPDPVLDNGSITLYWDRSIITDRTIVANKPDIVVIDRLERRTVIADIAVPHDDNLVKAEKDKQTKYLDLAREVVDMWEVDTAVIVPIVVTANGLISKSLDQHLRRLSLGSWIKGLIQKAVLLDTARIVRRFLSQEP

SEQ ID NO: 13288 - protein, 1200 aa, Mythimna impura
MLTRAAARRARPPPPASSLSSASPPPESSPTVSAVTPAVAVASSSSDEYFSPPTSPPPARRRRGRRPPSGLGPRGPPVSDRVPAPGGSVQRMRWTQSINENVMRAYYGATEGGNNLTAYRVRMLSLFQVLEPAVNVSAQRLSDQVRVIQRNHMLDDTVLDRLRTEMSNHAIAPSSQSVVPVMVPPSYHLSDHADETITDMVTHVSTQCNNELRSALECAIQEYRNMPLELRPRLPRLPMHNKNKALVAALDLQLSNYFDDCKDLTDTHSIMYCAAVAACRVAHVKFPNCDVATRPKPAVPAWQCRIERRIGGARALIGKLICFREGNTRPRVMRFVRRAFSGTDISPRDYMSRVTERIDFLKQKVYAWANRIRRYKRRVERYTQNRTFRSNERWVYRAWERPDQGVTDACLPDDDAMSSFWRSIWSVPVSHTEGDWTREVERACDPIPQMGAIDISPQDVARAVRPLPNWKSPGPDGLHNFWIKWFTRSHARLAYQFQSALESGSLPQFLTTGITHLLHKLGSTAEPKNYRPITCLPTVYKVLTSILRSKINSHIDKNLIMSPSQNGCRNGSRGTKELLLIDMTISQQVRRSRKDLSTCWIDYKKAYDSVPHTWLMRVLELYKIDTTLRTFLMSCMRQWSTVLRYPGCRHTQRNSEPVRIERGIFQGDSLSPLWFCLALNPLSTLLENSGLGYRLKRGGQVISHLLYMDDLKLFAPNNLQLMELLKVTETFSSAIRMEFGVDKCAVMHVKRGEVVESVGTQLTDSINLRSLSPTETYKYLGMSEALGINFTDMKQSLKERFFGRLKKVLNSLLSGGNKVRAFNGWVMPVLMYSFGVLKWTQTELDALDRRVRTLLTAYRMHHPRSSVMRLYIPRKCGGRGFLNAKTLHNREVCSLREYFLAADVGMYRDVVAVDKGLTPLSLANENWRKPVVLDTNDRREVWQSKELHGRFFRALHGPDVDQLASVAWLRFGDLFGETEGFVCAIMDEVIMTNNYRRFIVKDGTVDICRACHRPGESIRHIISGCSRLANGEYLHRHNLVARIIHQQLALKYSLVESEVPYYRYEPDPVLDNGHITLYWDRSIITDRTIVANKPDIVMVDRSERRAMIVDISVPHDENLVKAEKDKQIKYIDLAREVVDMWDVDSAIIVPIVVSANGLIAKSLDQHLRRLALGGWIKGLIQKVVLLDTARIIRRFLSLEP

SEQ ID NO: 13289 - protein, 1200 aa, Mythimna impura
MLTRSRAQKLHTHPTSSGSSLSSASQPPGPAPTVSPEIPVAAVASSSSDEYFSPPTTPPPARRRGRGRPPASLGPRGPPASDRVPAAGGSVQRMRWTSSINENVMRSYFGATEGGINLTAYRGRMLSLFQVLEPAVNVSVQRLSDQVRVIQRNRMLDDAVLDRLRLESQSSRVSPATTPAAVQRLPTASPRPVQVGDADDDAAISVSTQCNDRLRGALEDAFREYRSTPPGLRPRLPRLPMHKRNRALVCALDSQLSNCFDSSKDLTDTHSILYCAAVAACRVAHVKFPNCDRATRPAVPAWQCRIEHRIGEARALIGKLICFREGNTRPRVMRFVRRAFSGTDISPRDYLPCVTERIDFLKQKIYAWANRIRRYKRRVERYTRNRTFQSNERWVYRDWERSDQGVTDTRLPDDDAMCSFWRSIWSAPVSHTEGDWIREVERACDLLPEMGAITISSQDVARAVRPLPNWKSPGPDGLHNFWVKWFQRSHARLASQFQSALESGSLPQFLTTGITHLLHKSGSTAEPKNYRPITCLPTVYKVLTSILRAKINSHIETNSIMSASQNGCRNGSRGTKELLLIDIAISQQVRRSRKNLSACWIDYKKAYDSVPHTWLMRVLELYKVDATLRTFLMSCMGQWRTVLHYPGCRQIQENNEPIRIERGIFQGDSLSPLWFCLALNPLSTLLEGSGLGYRLKRGGQVISHLLYMDDLKLFAPNNLQLVELLKVTETFSSAIRMEFGVDKCAVIHVKRGEIMESVGIQLSDSIHLRSLCSTETYKYLGMSESLGINTDDVKQSLKERFFGRLNKVLNSLLSGGNKVRAFNGWVMPVLMYSFGILKWTQTELDALDRRVRTLLTANRMHHPRSSVMRLYIPRKCGGRGFLNAKTLHNREVCSLREYFLKTDVGMHRDVVAVDKGLTPLSLANENWRKPIVLDTNDRREVWQSKELHGRFYRALHGPDVDLLASVSWLRFGDLFGETEGFVFAIMDEVMMTNNYRKYIVKDGTVDICRACHRPGESIRHIISGCSHLANGDYLHRHNLVARIIHQQLALKYNLVESEVPYYRYVPDPVLDNGNITLYWDRSIITDRTIVANKPDIVVIDRLERRTMIVDIAVPHDENLVKAEKDKQTKYLDLAREVVDMWEVDRAIIVPIVVTANGLIAKSLEQHLRRLSLGSWIKGLIQKAVLLDTARIVRRFLSQEP

SEQ ID NO: 13290 - protein, 1048 aa, Mythimna impura
MLDDTVLDRLRTEMSNHAIAPSSQPVVPVMVPPSYHLSDHADEEITDMVTHVSTQCNNELRSALECAIREYRNMPLELRPRLPRLPMHNKNKALVAALDLQLSNYFDDCEDLTDTHSIMYCAAVAACRVAHVKFLSCDVSTRPKPAVPAWQCRIERRIGGARALIGKLICFREGNTRPRVMRFVRRAFSGTDISPRDYMSRVTERIDFLKQKVYAWANRIRRYKRRVERYTQNRTFRSNERWVYRAWERPDQGVTDTRLPDDDAMSSFWRSIWSVPVSHTEGDWTREVERACDPIPQMGAIDISPQDVARAVRPLPNWKSPGPDGLHNFWIKWFTRSHARLAYQFQSALESGSLPQFLTTGITHLLHKSGSTAEPKNYRPITCLPTVYKVLTSILRSKINSHIDKNLIMSPSQNGCRNGSRGTKELLLIDMTISQQVRRFRKDLSTCWIDYKKAYDSVPHTWLMRVLELYKIDTTLRTFLMSCMRQWSTVLRYPGCRHIQRNSEPVRIERGIFQGDSLSPLWFCLALNPLSTLLENSGLGYRLKRGGQVISHLLYMDDLKLFAPNNLQLMELLKVTETFSSAIRMEFGVDKCAVMHVKRGEVVESVGTQLTDSINLRSLSPTETYKYLGMSEALGINITDMKQSLKERFFGRLKKVFNSLLSGGNKVRAFNGWVMPVLMYSFGVLKWTQTELDALDRRVRTLLTAYRMHHPRSSVMRLYIPRKCGGRGFLNAKTLHNREVCSLREYFLATDVGMHRDVVAVDKGLTPLSLANENWRKPVVLDTNDRKEVWQSKELHGRFFRAFHGPDVDQLASVAWLRFGDLFGETEGFVCAIMDEVIMTNNYRRFIVKDGTVDICRACHRPGESIRHIISGCSRLANGEYLHRHNLVARIIHQQLALKYSLVESEVPYYRYEPDPVLDNGHITLYWDRSIITDRTIVANKPDIVVVDRSERRAMIVDISVPHDENLVKAEKDKQIKYIDLAREVVDMWDVDSAIIVPIVVSANGLIAKSLDQHLRRLALGGWIKALIQKAVLLDTARIVRRFLSLEP

SEQ ID NO: 13291 - protein, 1198 aa, Phlogophora meticulosa
MLTRSAARRARPPPPASSLSSASSPPKPSTIVSTVKPAVPVASSSSDEYFSPPTSPPPARRRRGRRPPDGLGPRGPPASDRVPAPGGSVQRMRWTQSINENVMRSYYGATEGGSNLTAYRVRMLSLFQVLEPAVNVSAQRLSDQVRVIQRNHMLDDVVLDRLRTEMQSSRVITSPSHTVVPPQYNIVLSSFADGEGSDKVTNVSTQYNEELRSALEGAIREYRFMLPALRPRLPRLPMHNKNRALVAALDSQLSNYFDNCDDLTDAHSILYCAAVAACRVAHVKFPYDIATRPKPAVPAWQCRIERRIAGARALIGKLVCYREGNTRPRVMRYVRRAFLGTDISPRDYMSRVTERIDFLKQKVYAWASRIRRYKRRVERYTQNRTFQSNERWVYRAWERSVQGVTDTHLPDDDVMCSFWRNIWSVPVSHTEGDWTREVERACDPIPQMGAITISPQDVARAVRPLPNWKSPGPDGLHNFWIKWLQKSHARLASQFQSALETGSLPQFLTTGITHLLHKSGSTAEPKNYRPITCLPTVYKVLTSILRVKINNHIDSNSIMSASQNGCRNGSRGTKELLLIDTAISQQVRRSRKDLSTCWIDYKKAYDSVPHTWLKRVLELYKVDATLRTFLTSCMRQWRTVLRYPGCRQIQRNSEPIRIERGIFQGDSLSPLWFCLALNPLSTLLEDSGLGYRLKRGGQVVSHLLYMDDLKLFAPSDLQLMELLTVTKTFSSAIRMEFGVDKCAVMHVKRGKIVESVGTQLPDFINFRALSPIETYKYLGMSEALGINAADMKQSLKERFFGRLKKVCNSLLSGGNKVRAFNGWVMPVLMYSFGILKWTQTELDALDRRVRTFLTASRMHHPRSSVMRLYIPRKCGGRGFLNAKTLHNREICSLRDYFLETDVGMHRDVVAVDQSLTPLSLAKENWRKPVVLDTNDRKEVWQSKELHGRFFQALHGPDVDQLASVSWLRFGDLFGETEGFVCAIMDEVIMTNNYRRFIVKDGTVDICRACHRPGESIRHIISGCSRLANEEYLHRHNLVARIIHQQLALKYSLVESEVPYYKYVPDPVLENASVTLYWDRSIITDRTIVANKPDIVVMDRIERRATIIDVTVPHDGNLVKAEKDKQIKYLDLAREVVDMWDVDSAIVVPIVVSANGLIAKSLDQHLRRLALGSWIKGLIQKAVLLDTARIVRRFLSLEP

SEQ ID NO: 13292 - protein, 868 aa, Xestia xanthographa
MRFVRQAFSGTDISPRDYMSRVTERIDFLKQKVYAWANRIRRYKRRVDRYTQTRTFQKDERWVYRAWERPDQGVADTHLPDDDAMCSFWRSIWSVPVSHAEGEWTRVIERVCDPISEMGAITISPQDVARAVRPLPNWKSPGPDGLHNFWIKWFTMSHARLATLFQSALESGSLPEFLTTGITHLLHKSGSTAEPKNYRPITCLPTVYKVLTSILRTKISKHIDDNSVMSASQNGCRNGSRGTKELLLIDMAISHQVRRSRKDLSTCWIDYKKAYDSVPHTWLMRVLELYKVDATLRTFLMSCMGQWRTVLCYPGCQQIQRNSEPIRIERGIFQGDSLSPLWFCLALNPLSTLLEDSGLGYRLRKDGQVISHLLYMDDLKLFAPNDLRLMELLKVTETFSNAIRMEFGVDKCAVMHVKRGEIVESVGTQLSDSITLRSLSATETYKYLGMSEALGVNVADMKQSLKERFFGRLKKVLNSLLSGGNKVRAFNGWVMPVLMYSFGILKWTQTELDALDTKVRKLLTAYRMHHPRSSVMRLYIPRKCGGRGFLNAKTLHNREICSLREYFLGTDVGMHRDVVTMDKGLTPLSLAKENWRKPPVLDTNDRREVWQSKELHGRFFRALHGPDVDLSASVAWLRSGDLFGETEGFVCAIMDEVMMTNNYRRFIVKDGTVDICRACHRPGESIRHIISGCSRLANGEYLHRHNLVARIIHQQLALKYNLVESEVPYYRYVPDPVLDNGCITLYWDQSIITDRTIVANKPDIVVVDRSERRAMIVDITVPHHENLVKAEKDKQIKYLDLAREVVDMWEVDSAIIVPIVVSAHGLIAKSLDQYLRRLSLGSWIKGLIQKAVLLDTARIVRRFLSLEP

SEQ ID NO: 13293 - protein, 1106 aa, Xestia xanthographa
MRWTQSINENVMRAYYGATEGGNNLTAYRVRMLSLFQVLEPAVSVSAQRLSDQVRVIQRNRMLDDTVLDRLRTEIQSSHVIATPSQAVVPPQSSIIPNCDNDVGNDMVTNVSTQCNVEMRSALEGAIQEYRFMQPDLRPRIPRLPMHNKNRALVAVLDSQLSNYFDNCEDLTDVHSILYCAAVAACRVAHVKFPSDRATRPKPAVPAWQYRIERRIGGARALIGKLVCFREGNTRPRVMRFVRQAFSGTDISPRDYMSRVTERIDFLKQKVYAWANRIRRYKRRVDRYTQNRTFQKDERWVYRAWERPDQGVADTHLPDDDAMCSFWRSIWSVPVSHAEGEWTRVIERACDPVSEMGAITISPQDVARAVRPLPNWKSPGPDGLHNFWIKWFTRSHARLATLFQSALESGSLPEFLTTGITHLLHKSGSTAEPKNYRPITCLPTVYKVLTSILRTKISKHIDDNSVMSASQNGCRNGSRGTKELLLIDMAISHQVRRSRKDLSTCWIDYKKAYDSVPHTWLMRVLELYKVDATLRTFLMSCMGQWRTVLRYPGCRQIQRNSEPIRIERGIFQGDSLSPLWFCLALNPLSTLLEDSGLGYRLRKDGQVISHLLYMDDLKLFAPNDLQLMELLKVTDTFSSAIRMEFGVDKCAVMHVKRGEIVESVGTQLSDSITLRSLSATETYKYLGMSEALGVNVADMKQSLKERFFGRLKKVFNSLLSGGNKVRAFNGWVMPVLMYSFGILKWTQTELDALDTKVRKLLTAYRMHHPRSSVMRLYIPRKCGGRGFLNAKTLHNREICSLREYFLGTDVGMHRDVVTVDKGLTPLSLAKENWRKPPVLDTNDRREVWQSKELHGRFFRALHGPDIDLPASVAWLRSGDLFGETEGFVCAIMDEVMMTNNYRRFIVKDGTVDICRACHRPGETIRHIISGCSRLANGEYLHRHNLVARIIHQQLALKYNLVESEVPYYRYVPDPVLDNGCITLYWDQSIITDRTIVANKPDIVVVDRSERRAMIVDITVPHDENLVKAEKDKQIKYLDLAREVVDMWEVDSAIIVPIVVSAHGLIAKSLDQYLRRLSLGSWIKGLIQKAVLLDTARIVRRFLSLEP

SEQ ID NO: 13294 - protein, 1198 aa, Xestia xanthographa
MLTRSAAARRARLPPPDSSLSSASPPPEPSPIVSAVTPAVAVASSSSDEYFSPPTTPPPARRRGGRRPPDGLGPRGPPASDRVPAPGGSVQRMRWTQSINANVMRAYYGATEGGNNLTAYRVRMLSLFQVLEPAVNVSAQRLSDQVRVIQRNRMLDDTVLDRLRTEIQSNHVIATPSQAVVPPQSSIIPNCDNDVSNDMVTNVSTQCNVEMRSALEGAIREYRFMQPDLRPRIPRLPMHNKNRALVAVLDSQLSNYFDNCEDLTDVHSILYCAAVATCRVAHVKFPSDRATRPKPAVPAWQYRIERRIGGARALIGKLVCFREGNTRPRVMRFVRQAFSGTDISPRDYMSRVTERIDFLRQKVYAWANRIRRYKRRVDRYTQNRTFQKDERWVYRAWERPDQGVADTHLPDDDAMCSFWRSIWSVPVSHAEGEWTRVIERACDPISEMGAITISPQDVARAVRPLPNWKSPGPDGLHNFWIKWFTRSHARLATLFQSALESGSLPEFLTTGITHLLHKSGSTAEPKNYRPITCLPTVYKVLTSILRTKISKHIDDNSVMSASQNGCRNGSRGTKELLLIDMAISHQVRRSRKDLSTCWIDYKKAYDSVPHTWLMRVLQLYKVDATLRTFLMSCMGQWRTVLHYPGCRQIQRNSEPIRIERGIFQGDSLSPLWFCLALNPLSTLLEDSGLGYRLRKDGQVISHLLYMDDLKLFAPNDLRLMELLKVTETFSNAIRMEFGVDKCAVMHVKRGEIVESVGTQLSDSITLRSLSATETYKYLGMSEALGVNVADMKQSLKERFFGRLKKVLNSLLSGGNKVRAFNGWVMPVLMYSFGILKWTQTELDALDTKVRKLLTAYRMHHPRSSVMRLYIPRKCGGRGFLNAKTLHNREICSLREYFLGTDVGMHRDVVTMDKGLTPLSLAKENWRKPPVLDTNDRREVWQSKELHGRFFRALHGPDVDLSASVAWLRSGDLFGETEGFVCAIMDEVMMTNNYRRFIVKDGTVDICRACHRPGESIRHIISGCSRLANGEYLHRHNLVARIIHQQLALKYNLVESEVPYYRYVPDPVLDNGCITLYWDQSIITDRTIVANKPDIVVVDRSERRAMIVDITVPHDENLVKAEKDKQIKYLDLAREVVDMWEVDSAIIVPIVVSAHGLIAKSLDQYLRRLSLGSWIKGLIQKAVLLDTARIVRRFLSLEP

SEQ ID NO: 13295 - protein, 1205 aa, Cosmia trapezina
MLTRSRAQHLRNTHPTSSGSSLSSASQLPEPAPDVSQVIPAAAVASSSSDEYFSPPTTPPPVRRRGRGRPPASLGPRGPPASDRVPAPGGSVQRMRWTQTVNENVMRAYFGATEGGSNLTAYRGRMLSLFQVLEPAVNVSAQRLSDQVRVIQRNHMLDDVVLDRLRLESRNSRVTSDSPMVAVQLQNLPSTSPRPDRVGEEDDSGAISVSSQCNVQLRSALEDAFREYRSTPPGLRPRLPRLPMHKKNKALVCALDSQLSNCFDGSKDLADTHSILYCAAVAACRVAHVKFHNNDRVTRPKPAVPTWQCRIERRIGEARALIGKLICFREGNTRPRVMRFVRRAFSGMDISPRDYLTCVTERIDFLKQKICAWANRIRRYRRRVERYTQNRTFQSDERWVYRAWERPDQGVADTQLPDDDAMCSFWRSIWSVPVSHTEGDWTREVERACDHIPQMGALTISPQDVARAVRPLPNWKSPGPDGLHNFWIKWFQRSHARLASQFQSALQSGSLPQFLTTGITHLLHKSGSTAEPRNYRPITCLPTVYKVLTSILRAKINKHIDTNSIMSASQNGCGNGSRGTKELLLIDMTISQQVRRSRKDLSTCWIDYKKAYDSVPHTWLMRVLELYKIDATLRTFLMSCMGQWRTVLRYPGCRNIQRNSEPIRIERGIFQGDSLSPLWFCLALNPLSTLLEDSGLGYRLRRGGQVISHLLYMDDLKLFAPNNLQLMELLKVTETFSSAIRMEFGVDKCAVMHVKRGEIVESVRTQLSDSIHLRSLSSLETYKYLGMSEALGINAADMKQSLRERFFGRLNKVLNSLLSGGNKVRAFNGWVMPVLMYSFGILKWTQTELDALDRRVRTLLTANRMHHPRSSVMRLYIPRKCGGRGFLNAKTLHNREVCSLREYFLEADVGMHREVVSVDKGLTPLSLANENWRKPIVLDTNDRREVWQSKELHGRFYRVLHGPDVDFLASVSWLRFGDLFGETEGFVFAIMDEVMMTNNYRKYIVKDGTVDICRACHRPGESIRHIISGCSRLANGDYLHRHNLVARIIHQQLALKYSLVESEVPYYRYVPDPVLENGNITLYWDRSIITDRTIVANKPDIVVIDRLERRTVIVDIAVPHDENLVKAEKDKQIKYLDLAREVVDMWDVDTAIIVPIVVTANGIIAKSLDQHLRRLSLGGWIKGLIQKAVLLDTARIVRRFLSQQP

SEQ ID NO: 13296 - protein, 1202 aa, Cosmia trapezina
MKMLTRSATRRARLPPPDSSLSSASPPPVPSLTVNAVSTPAAVVASSSSDEYFSPPTTPPPARRRGGRRPPDGLGPRGPPASDRVPAPGGSVQRMRWTRSINENVMRSYYGATEGGNNLTAYRVRMHSLFQVLEPALNVSAQRLSDQVRVIQRNHMLDDTALDRLRSEMQSSSVIAPLSQTIVAPPPPQCNTIQADEGSDGTAANVSTQCNEELRSALEGAIQEYRFVSPELRPRLPRLPMHNKNRALVAALDSQLSNYFDDCEDLTDTHSILYCAAVAACRVAHVKFANDSRATRPKPAVPAWQCRIERRIGGARALIGKLICFREGNTRPRVMRFVRRAFSGTDVSPQDYMSRVTERIDFLKQKVYAWANRIRRYKRRVDRYTQNRTFQSDERWVYRGWERPDQGVADTRLPDDDAMCSFWRSIWSVPVSHTEGDWTREVERACDPIPEMGAITICPQDVARAVRPLPNWKSPGPDGLHNFWIKWFRGSHARLAAQYQSALQSGSLPQFLTTGITHLLHKSGSTAEPKNYRPITCLPTVYKVLTSILRAKINEHIDTNSIMSASQNGSRNGSRGTKELLLIDMAISQQVRRSRKDLSTCWIDYKKAYDSVPHTWLMRVLELYKVDATLRTFLMSCMEQWRTVLRYPGCRNIQRNSEPIRIERGIFQGDSLSPLWFCLALNPLSTLLEDSGLGYRLRRGGQVISHLLYMDDLKLFAPNNLQLMELLKVTETFSSAIRMEFGVDKCAVMHVKRGEIVESVGTQLSDSINLRTLSASETYKYLGMSEALGINVADMKQSLRERFFGRLKKVFNSLLSGGNKVRAFNGWVMPVLMYSFGILKWTQTELDALDRRVRTLLTAYRMHHPRSSVMRLYIPRKCGGRGILNAKTLHNREICSLREYFLEADVGMHRDVVAVDKGLTPLSLAKENWRKPVVLDTNDRMEVWQSKELHGRFFRALHGPDVDLLASVAWLRSGDLFGETEGFVCAIMDEVIMTNNYRRFIVKDGTVDICRACHRPGESIRHIISGCSRLANEEYLHRHNLVARIIHQQLALKYSLVESEVPYYRYVPDPVLENGNITLYWDRSIITDRTIVANKPDIVVVDRTERRAMVIDITVPHDGNLVKAEKDKQIKYLDLAREVVDMWDVDSAIIVPIVVSANGLIAKSLDQHLRRLSLGSWIKGLIQKAVLLDTARIVRRFLSLEP

SEQ ID NO: 13297 - protein, 1200 aa, Cosmia trapezina
MLTRSATRRARLPPPDSSLSSASPPPVPSLTVNAVSTPAAVVASSSSDEYFSPPTTPPPARRRGGRRPPDGLGPRGPPASDRVPAPGGSVQRMRWTRSINENVMRSYYGATEGGNNLTAYRVRMHSLFRVLEPALNVSAQRLSDQVRVIQRNHMLDDTVLDRLRSEMQSSRVIAPLSQTIVAPPPPQCNTIQADEGSDGTAANVSAQCNEELRSALEGAIQEYRFVSPELRPRLPRLPMHNKNRALVAALDSQLSNYFDDCEDLTDTHSILYCAAVAACRVAHVKFANDSRATRPKPAVPAWQCRIERRIGGARALIGKLICFREGNTRPRVMRFVRRAFSGTDVSPQDYMSRVTERIDFLRQKVYAWANRIRRYKRRVDRYTQNRTFQSDERWVYRGWERPDQGVADTRLPDDDAMCSFWRSIWSVPVSHTEGDWAREVERACDPIPEMGAITICPQDVARAVRPLPNWKSPGPDGLHNFWIKWFRGSHARLAAQYQSALQSGSLPQFLTTGITHLLHKSGSTAEPKNYRPITCLPTVYKVLTSILRAKINEHIDTNSIMSASQNGSRNGSRGTKELLLIDMAISQQVRRSRKDLSTCWIDYKKAYDSVPHTWLMRVLELYKVDATLRTFLMSCMEQWRTVLRYPGCRNIQRNSEPIRIERGIFQGDSLSPLWFCLALNPLSTLLEDSGLGYRLRRGGQVISHLLYMDDLKLFAPNNLQLMELLKVTETFSSAIRMEFGVDKCAVMHVKRGEIVESVGTQLSDSINLRTLSASETYKYLGMSEALGINVADMKQSLRERFFGRLKKVFNSLLSGGNKVRAFNGWVMPVLMYSFGILKWTQTELDALDRRVRTLLTAYRMHHPRSSVMRLYIPRKCGGRGFLNAKTLHNREICSLREYFLEADVGMHRDVVAVDKGLTPLSLAKENWRKPVVLDTNDRMEVWQSKELHGRFFRALHGPDVDLLASVAWLRSGDLFGETEGFVCAIMDEVIMTNNYRRFIVKDGTVDICRACHRPGESIRHIISGCSRLANEEYLHRHNLVARIIHQQLALKYSLVESEVPYYRYVPDPVLENGNITMYWDRSIITDRTIVANKPDIVVVDRTERRAMVIDITVPHDGNLVKAEKDKQIKYLDLAREVVDMWDVDSAIIVPIVVSANGLIAKSLDQHLRRLSLGSWIKGLIQKAVLLDTARIVRRFLSLEP

SEQ ID NO: 13298 - protein, 1198 aa, Mamestra brassicae
MLTRAAAQRARLQPPASSLSSASPPPEPSPTVSAVIPAVAVASRSSDEYFSPPTWPPPARRRRGRRPPDGLGPRGPPASDRVPAPGGSVQRMRWTQTINENVMRSYYGATEGGTNLTAYRGRMLSLFQVLEPAVNVSAQRLSDQVRVIQRNRMLDDAVLDRLRLESRNGRVSAASPPAAVQIQSSVSPRPNIVGEDDDDGAISVSTQCNERLRSALEDAFREYRSTPPELRPRLPRLPMHNKNRALVCALDSQLANCFDSSEDLAGTHSILYGAAAAACRVAHVKFPNSDRATRPAVPAWQCRIERRIGEARALIGKLICFREGNTRRRVMRFVRRAFSGTDTSPRDYLTRVTERIDFLKQKIYAWANRIRRYKRRVERYTQNRTFQSNERWVYRAWERPDQGVTDTRLPDDDVMCSFWRNNWSVPVSHTEGDWTREVERACDPIPEMGAITISPQDVARAVRPLPNWKSPGPDGLHNFWIKWFKRSHARLASQFQSALESGSLPQFLTTGITHLPHKSGSTAEPKNYRPITCLPTVYKVLTSILRAKINQHIETNSIMSASQNGCRNQSRGTKELLLIGVAISQQVRRSRRDLSTCWIDYKKAYDSVPHTWLMRVLELYKVDAVLRTFLMSCMGQWRTVLRYPGCRQIQANSDPIRIERGIFQGDSLSPLWFCLALNPLSTLLEGSGQGYRLRRGGQVISHLLYMDDLKLFAPNNLQLMKLLKVTETFSSAISMEFGVDKCAVMHVKRGEIMESVGTQLSDSINLRSLSSTETYKYLGMSEALGINANDVKQSLKERFFGRLNKVLNSLLSGGNKVRAFNGWVMPVLMYSFGILKWTQTELDALDRRVRSLLTANRMHHPRSSVMRLYISRKCGGRGFLNAKTLHNREICSLREFFLEADVGMHRDVVAVDKGLTALSLANENWRKPVVLDTNDRREVWQSKELHGRFYRVLHGPDVDFLASVAWLRFGDLCGETEGFVCAIMDEVMMTNNYRKYIVKDGTVDICRACHRPGESIRHIISGCSSLANGDYLHRHNLVARIIHQQLALKYNLVESEVPYYRYVPDPVLENGNCTLYWDRSIITDRTIIANKPDIVVIDRLERRAMIVDIAVPHDVNLVKTEKDKQTKYLDLAREVVDMWDVNTAVIVPIVVTANGIIAKSLDQHLKRLSLGSWIKGLIQKAVLLDTARIVRRFLSQGP

SEQ ID NO: 13299 - protein, 1197 aa, Mamestra brassicae
MLTRSRARHLATHPSPSASSLSSASPPPEPSPTVSAVTPAVAVASSSSDEYFSPPTTPPPARRRRGRRPPDGLGLRGPPASDRVPAPGGSVQRMRWTQSINENVMRSYFGATEGGTNLTAYRGRMLSLFQVLEPAVNVSAQRLSDQVRVIQRNRMLDDSVLDRLRMEMCGHVITPPSQTVAPPQSQISSHADEASNDRVTNVSTQCNEELRSALECAIREYRYIPPELRPRLPRLPMHNKNRALVAALDSQLSNYFDDCEDLTDTHSIMYCAAVAACRVAHVKMTNDRVTRPKPAVPAWQCRIERRIGGARALIGKLICFREGNTRPRVMRFVRRAFSGTDISPRDYMSRVTERIDFLKQKVYAWANRIRRYRRRVERYTQNRTFRSNERWVYRVWEQPDHGVTDTRLPDDDAMCSFWRNIWSVPVSHTEGDWIREVERACDPLPEMGAITISPQDVARAVRPLPNWKSPGPDGLHNFWIKWLQRSHARLASQYQSALESGSLPKFLTTGVTHLLHKSGSTAEPKNYRPITCLPTVYKVLTSILRAKINNHINSSNIMSVSQNGCRNGSRGTKELLLIDMAISQQVRRSRKDLSTCWIDYKKAYDSVPHTWLMRVLELYKIDTMLHTFLMSCMGQWRTVLRYSGCRNIQRNSEPVRIERGIFQGDSLSPLWFCLALNPLSTLLDNSGLGYRLKRGGQVISHLLYMDDLKLFAPSNLQLMELLKVTETFSSAIRMEFGVDKCAVMHVKRGEIMESVGTQFSDSINLRSLSSTETYKYLGMSEALGINVTDMKQSLRERFFGRLKKVFNSLLSGGNKVRAFNGWVMPVLMHSFGVLKWTQTEHDALDRRVRTLLTAYRMHHPRSSVMRLYILRKCGGRGFLNAKTLHNREICSIREYFLAVDVGMHRDVVTVDKGLTPLSLANENWRKPAVLDTNDRRAVWQSKELHGRYFRALHGPDVDQLASVAWLRFGDLFGETEGFVCAIMDEVIMTNNYRRFIVKDGTVDICRACHRPGESIRHIVSGCSRLANGEYLHRHNLVARIIHQQLALKYSLVESEVPYYRYAPDPVLDNGNITLYWDRSIITDRTIVANKPDIVVVDRIERRAMIVDITVPHDENLVKAEKDKQIKYIDLAREVVDMWDVDSTIIVPIVVSANGLIATSLDQHLRRLSLGSWIKGLIQKAVLLDTARIVRRFLSLEP

SEQ ID NO: 13300 - protein, 1200 aa, Mamestra brassicae
MLTRSRARAQTAQPTSSGSSLSSASQPPGPAPAVSPEIPVAAVASSSSDEYFSPPTTPPPARRRGRGRPPTSLGPRGPPASDRVPAIGGSVQRMRWTQTINENVMRSYYGATEGGTNLTAYRGRMLSLFQVLEPAVNVSAQRLSDQVRVILRNRMLDDAVLDRLRLESRSVRVSPASPPAAVQIQSSISPRSNNVGEDDDDGAISVSTQCNERLRSALEDAFREYRSTPPELRPRLPRLPMHNKNRALVCALDSQLTNCFDSSEDLADTHSILYCAAAAACRVAHVKFLNSDRATRPAVPAWQCRIERRIGEARALIGKLICFRESNTRRRVMRFVRRAFSGTDTSPRDYLTRVTERIDFLKQKIYAWANRIRRYKRRVERYTQNRTFQSNERWVYRAWERPDQGVTDTRLPDDDVMCSFWRNIWSVPVGHTEGDWIREVERACDPILEMGATTISPQDVARAVRPLPNWKSPGPDGLHNFWIKWFTGSHARLASQFQSALESGSLPQFLTTGITHLLHKSGSTAEPKNYRPITCLPTVYKVLTSILRAKINHHIESNSIMSASQNGCRNGSRGTKELLLMDIATSQQVRRSRKDLSTCWIDYKKAYDSVPHTWLMRVLELYKVDAVLRTFLMSCVGQWRTVLRYPGCRQIQVNGDPIRIERGIFQGDSLSPLWFCLALNPLSTLLEGSGQGYRLRRGGQVISHLLYMDDLKLFAPNNLQLMELLKVTETFSSAISMEFGVDKCAVMHVKRGEIMESVVTQLSDSIHLRSLSSTETYKYLGMSEALGINANDMKQSLKERFFGRLNKVLNSLLSGGNKVRAFNGWVMPVLMYSFGILKWTQTELDALDRRVRSLLTANRMHHPRSSVMRLYIPRKCGGRGFLNAKTLHNREICSLREFFLEADVGMHRDVVAVDKGLTALSLANENWRKPVVLDTNDRKKVWQSKELHGRFYRVLHGPDVDFLASVAWLRFGDLFGETEGFVCAIMDEVMMTNNYRKYIVKDGTVDICRACHRPGESIRHIISGCPSLANGDYLHRHNLVARIIHQQLALKYNLVESEVPYYRYVPDPVLENGNCTLYWDRSIITDRTIVANKPDIVVIDRLERRAMIVDIAVPHDENLVKTEKDKQTKYLDLAREVVDMWDVNTAVIVPIVVTANGIIAKSLDQHLKRLSLGSWIKGLIQKAVLLDTARIVRRFLSQGP

SEQ ID NO: 13301 - protein, 1200 aa, Mamestra brassicae
MLTRSRARAQTAQPTSSGSSLSSASQPPGPAPAVSPEIPVAAVASSSSDEYFSPPTTPPPARRRGRGRPPTSLGPRGPPASDRVPAIGGSVQRMRWTQTINENVMRSYYGATEGGTNLTAYRGRMLSLFQVLEPAVNVSAQRLSDQVRVILRNRMLDDAVLDRLRLESRSGRVSPASPPAAVEIQSSISPRPNNVGEDDDDAAISVSTQCNERLRSALEDAFREYRSTPPELRPRLPRLPMHNKNRALVCALDSQLTNCFDSSEDLADTHSILYCAAAAACRVAHVKFLNSDRATRPAVPAWQCRIERRIGEARALIGKLICFREGNTRRRVMRFVRRAFSGTDTSPRDYLTRVTERIDFLKQKICAWANRIRRYKRRVERYTQNRTFQSNERWVYRAWERPDQGVTDTRLPDDDVMCSFWRNIWSVPVSHTEGDWIREVERACDPILEMGAITISPQDVARAVRPLPNWKSPGPDGLHNFWIKWFTGSHVRLASQFQSALESGSLPQFLTTGITHLLHKSGSTAEPKNYRPITCLPTVYKVLTSILRAKINHHIESNSIMSASQNGCKNGSRGTKELLLMDIAISQQVRRSRKDLSTCWIDYKKAYDSVPHTWLMRVLELYKVDAVLRTFLMSCMGQWRTVLRYPGCRQIQVNGDPIRIERGIFQGDSLSPLWFCLALNPLSTLLEGSGQGYRLRRGGQVISHLLYMDDLKLFAPNNLQLMELLKVTETFSSAISMEFGVDKCAVMHVKRGEIMESVGTQLSDSIHLRSLSSTETYKYLGMSEALGINANDMKQSLKERFFGRLNKVLNSLLSGGNKVRAFNGWVMPVLMYSFGILKWTQTELDALDRRVRSLLTANRMHHPRSSVMRLYIPRKCGGRGFLNAKTLHNREICSLREFFLEADVGMHRDVVAVDKGLTALSLANENWRKPVILDTNDRREVWQSKELHGRFYRVLHGPDVDFLASVAWLRFGDLFGETEGFVCAIMDEVMMTNNYRKYIVKDGTVDICRACHRPGESIRHIISGCPSLANGDYLHRHNLVARIIHQQLALKYNLVESEVPYYRYVPDPVLENGNCTLYWDRSIITDRTIVANKPDIVVIDRLERRAMIVDIAVPHHENLVKTEKDKQTKYLDLAREVVDMWDVNTAVIVPIVVTANGIIAKSLDQHLKRLSLGSWIKGLIQKAVLLDTARIVRRFLSQGP

SEQ ID NO: 13302 - protein, 1198 aa, Noctua fimbriata
MLTRAAAKRARLSPPDPSLSSASPPPESSPVMSAVTPAVAVASSSSDEYFSPPTTPPPVRRRGGRRPPDGLGPRGPPASDRVPAPGGSVQRMRWTQSINENVMRSYYGATEGGNNLTAYRVRMLSLFQVLEPAVNVSAQRLSDQVRVIQRNRMLDDTVLDRLRTEMQSSHVIATPPPQAVVPPQSTIIPNRDNDVSNDIVTNVSTQCNEEMRSALEGAIREYRFMQPDLRPRIPRLPMHNKNRALVAVLDSQLSNYFDNCEDLTDAHSILYCAAVAACRVAHVKFSNDRATRPKPAVPPWQYRIERRIGGARALIGKLICFREGNTRPRVMRFVRRAFSGTDISPRDYMSRITERIDFLKQKVYAWANRIRRYKRRVDRYTQNRTFQRDERWVYRAWERPDQGVADTRLPDDDAMCSFWRSIWSVPVSHTEGEWTQGVERACDLVPEMGAITISPQDVVRAVRPLPNWKSPGPDGLHNFWIKWFTRSHARLAILFQSALESGSLPEFLTTGITHLLHKSGSTAEPKNYRPITCLPTVYKVLTSILRAKINKHIDDNSIMSASQNGCRNGSRGTKELLLIDMAISQQVRRSRSDLSTCWIDYKKAYDSVPHTWLMRVLELYKVDATLRTFLMSCMGQWRTVLRYPGCRQIQRNSEPIRIERGIFQGDSLSPLWFCLALNPLSTLLEDSGLGYRLRRGGQVISHLLYMDDLKLFSPNDLQLMELLKVTETFSSAIRMEFGVDKCAVMHVKRGEIVESVGTQLSDSINLRSLSATETYKYLGMSEALGINVADMKQSLKERFFGRLKKVFNSLLSGGNKVRAFNGWVMPVLMYSFGILKWTQTELDALDRRVRTLLTAYRMHHPRSSIMRLYIPRKCGGRGFLNAKTLHNREICSLREYFLETDVGMHRDVVAVDKGLTPLSLAKENWRKPLVLDTNDRMEVWQSKELHGRFFRALHGPDVDLSASVAWLRSGDLFGETEGFVCAIMDEVMMTNNYRRFIVKDGTVDICRACHRPGESIRHIISGCSRLANGEYLHRHNLVARIIHQQLALKYNLVESEVPYYKYVPDPVLENGSITLYWDQSIITDRTIVANKPDIVVVDRSERRTMIVDITVPHDENLVKAEKDKKIKYLDLAREVVDMWDVDSAIIVPIVVSAHGLIAKSLDQYLRRLSLGSWIKGLIQKAVLLDTARIVRRFLSLEP

SEQ ID NO: 13303 - protein, 1106 aa, Noctua fimbriata
MRWTQSINENVMRSYYGATEGGNNLTAYRVRMLSLFQVLEPAVNVSAQRLSDQVRVIQRNRMLDDTVLDRLRTEMQSSHVITPSAQAVVLPQSSTITNRDNDVSNDMVTNVSTQCNEEMRSALEGAIREYRFMQPDLRPRIPRLPMHNKNRALVAVLDTQLSNYFDNCEDLTDAHSILYCAAVAACRVAHVKFFDDRATRPKPVVPPWQYRIERRIGGARALIGKLICFREGNTRPRVMRFVRRAFSGTDISPRDYMSRITERIDFLKQKVYAWASRIRRYKRRVNRYTQNRTFQRDERWLYRTWERPDQGVADTRIPDDDAMCSFWRSIWSVPVSHTEGEWTREVERACDLVPEMGAITISPQDVVRAVRPLPNWKSPGPDGLHNFWIKWFTRSHARLAILFQSALESGSLPEFLTTGITHLLHKSGSTAEPKNYRPITCLPTVYKVLTSILRAKINKHIDDNSIMSASQNGCRNGSRGTKELLLIDMAISQQVRRSRRDLSTCWIDYKKAYDSVPHTWLMRVLELYKVDATLRTFLMSCMGQWRTVLRYPGCRQIQRNSEPIRIERGIFQGDSLSPLWFCLALNPLSTLLEDSGLGYQLRRGGQVISHLLYMDDLKLFAPNDLQLMELLKVTETFSSAIRMEFGADKCAVMHVKRGEIVESVGTQLSDSINLRSLSATETYKYLGMSEALGINVADMKQSLKERFFGRLKKVFNSLLSGGNKVRAFNGWVMPVLMYSFGILKWTQTELDALDRRVRTLLTAYRMHHPRSSVMRLYIPRKCGGRGFLNAKTLHNREICSLREYFLETDVGMHRDVVAMDKGLTPLSLAKENWRKPLVLDTNDRMEVWQSKELHGRFFRALHGPDVDLSASVAWLRSGNLFGETEGFVCAIMDEVMMTNNYRRFIVKDGTVDICRACHRPGESIRHIISGCSRLANGEYLHRHNLVARIIHQQLALKYNLVESEVPYYKYVPDPVLENGSITLYWDQSIITDRTIVANKPDIVVVDRSERRTMIVDITVPHDENLVKAEKDKKIKYLDLAREVVDMWDVDSAIIVPIVVSAHGLIAKSLDQYLRRLSLGSWIKGLIQKAVLLDTARIVRRFLSLEP

SEQ ID NO: 13304 - protein, 1028 aa, Noctua fimbriata
MLDDTVLDRLRTEMQSSHVIATPPPQAVVPPQSTIIPNRDNDVSNDIVTNVSTQCNEEMRSALEGAIREYRFMKPDLRPRIPRLPMHNKNRALVAVLDSQLSNYFDNCEDLTDAHSILYCAAVAACRVAHVKFSDDRATRPKPAVPPWQYRIERRIGGARALIGKLICFREGNTRPRVMRFVRRAFSGTDISPRDYMSRTNRIRRYKRRVDRYTQNRTFLRDERWVYRAWERPDQGVADTRLPDDDAMCSFWRSIWSVPVSHTEGEWTRGVERACDLVPEMGAITISPQDVVRAVRPLPNWKSPGPDGLHNFWIKWFTRSHARLAILFQSALESGSLPEFLTTGITHLLHKSGSTAEPKNYRPITCLPTVYKVLTSILRAKINKHIDDNSIMSASQNGCRNGSRGTKELLHFDMAISQQVRRSRMDLSTCWIDYKKAYDSVPHTWLMRVLELYKVDATLRTFLMSCMGQWRTVLRYPGCGQIQRNSEPIRIERGIFQGDSLSPLWFCLALNPLSTLLEDSGLGYRLRSQGQVISHLLYMDDLKLFAPNDLQLMELLKVIETFSSAIRMKFGVDKCAVMHVKRGEIVESVGTQLSDSINLRSLSATETYKYLGMSEALGINVADMKQSLKERFFGRLKKVFNSLLSGGNKVRAFNGWVMPVLMYSFGILKWTQTELDALDRRVRTLLTAYRMHHPRSSVMRLYIPRKCGGRGFLNGKTLHNREICSLREYFLETDVGMHRDVVAVDKGLTPLSLAKENWRKPLVLDTNDRMEVWQSKELHGRFFRALHGPDVDLSASVAWLRSGDLFGETEGFVCAIMDEVMMTNNYRRFIVKDGTVDICRACHRPGESIRHIISGCSRLANGEYLHRHNLVARIIHQQLALKYNLVESEVPYYKYVPDPVLENGSITLYWDQSIITDRTIVANKPDIVVVDRSERRTMIVDITVPHDENLVKAEKDKKIKYLDLAREVVDMWDVDSAIIVPIVVSAHGLIAKSLDQNLRRLSLGSWIKGLIQKAVLLDTVRIVRRSSL

SEQ ID NO: 13305 - protein, 1197 aa, Noctua fimbriata
MLTRAAAKRARLSPPDPSLSSASPPPESSPVVSAVTPAVAVASSSSDEYFSPPTTPPPVRRRGGRRPPDGLGPRGPPASDRVPAPGGSVQRMRWTQSINENVMRSYYGATEGGNNLTAYRVRMLSLFQVLEPAVNVSAQRLSDQVRVIQRNRMLDDTVLDRLRTETQSSHVITPSAQAVVLPQSSTIPNRDNDVSNDMVTNVSTQCNEEMRSALEGAIREYRFMQPDLRPRIPRLPMHNKNRALVAVLDSQLSNYFDNCEDLTDAHSILYCAAVAACRIAHVKFSDDRATRPKPAVPPWQYRIERRIGGARALIGKLICFREGNTRPRVMRFVRRAFSGTDISPRDYMSRITERIDFLKQKVYAWASRIRRYKRRVDRYTQNRTFLRDERWVYRTWERPDQGVADTRIPDDDAMCSFWRSIWSVPVSHTEGEWTREVERACDLVPEMGAITISPQDVVRAVRPLPNWKSPGPDGLHNFWIKWFTRSHARLAILFQSALESGSLPEFLTIGITHLLHKSGSTAEPKNYRPITCLPTVYKVLTSILRAKINKHIDDNSIMSASQNGCRNGSRGTKELLLIDMAISQQVRRSRRDLSTCWIDYKKAYDSVPHTWLMRVLELYKVDATLRTFLMSCMGQWRTVLRYPRCWQIQRNSEPIRIERGIFQGDSLSPLWFCLALNPLSTLLEDSGLGYQLRRGGQVISHLLYMDDLKLFAPNDLQLMELLKVTETFSSAIRMEFGVDKCAVMHVKRGEIVESVGTQLSDSINLRSLSATETYKYLGMSEALGINVADMKQSLKERFFGRLKKVFNSLLSGGNKVRAFNGWVMPVLMYSFGILKWTQTELDALDRRVRTLLTAYRMHHPRSSVMRLYIPRKCGGRGFLNAKTLHNREICSLREYFLETDVGMHRDVVAMDKGLTPLSLAKENWRKPLVLDTNDRMEVWQSKELHGRFFRALHGPDVDLSASVAWLRSGDLFGETEGFVCAIMDEVMKTNNYRRFIVKDGTVDICRACHRPGESIRHIISGCSRLANGEYLHRHNLVARIIHQQLALKYNLVESEVPYYKYVPDPVLENGSITLYWDQSIITDRTIVANKPDIVVVDRSERRTMIVDITVPHDENLVKAEKDKKIKYLDLAREVVDMWDVDSAIIVPIVVSAHGLIAKSLDQYLRRLSLGSWIKGLIQKAVLLDTARIVRRFLSLEP

SEQ ID NO: 13306 - protein, 975 aa, Atethmia centrago
MSPEVRPCLPRLPMHKKNRALVAVLDSQLSNYFDDCEDLTDTHSILYCAAEAVCRVAHVIFPNDSRATRPKPTVPIWQCRIERRIGGARALIGKLICFREGNTRPRVMRFVRRAFSGTDISPQDYMSRVTERIDFLKQKVYAWANRIRRYKRRVDRYTQNRTFQSDERWVYRGWEQRDQGVTDTRLPDDDVMCSFWRSIWSVPVSHTEGDWARKVERACDPLPELGAITICPQDVARAVRPLPNWKSPGPDGLHNFWLKWFLGSHARLAAQYQTALESGSLPQFLTIGVTHLLHKSGSTAEPKNYRPITCLPTAYKVLTSILRAKINKHIDTNSIMSASQNGCRNGSRGTKELLLIDMTISQQVRRFRKDLSTCWIDYKKAYDSVPHTWLMRVLELYKVDATLRTFLMSCMGRWRTVLRYPGCRNIQRNSEPIRIERGIFQGDSLSPLWFCLALNPLSTLLEDSGLGYRLRRGGQVISHLLYMDDLKLFASNNLQLMELLKITETFSSAIRMEFGVDKCAVMHVKRGEIVESVGTQLSDSINLRALSASETYKYLGMSEALGINVTDMKQSLKQRFFDRLKKVFNSLLSGGNKVRAFNGWVMPVLMYSFGILKWTQTELDALDRRVRTLLTAYRMYHPRSSVMRLYIPRKCGGRGFLNAKTLHNREVCSLREYFLEAHVGMHRDVVAVDKGLTPLSLAKENWRKLVVLDTNDRREVWQSKELHGRFFRALHEPDVDFQASVAWLRFGDLFGETEGFVCAIMDEVIMTKNYRRFIVKDGTVDMCRACHRPGESIRHIISGCSRLANEEYLHRHNLVARIIHQQLALKYSLVESEVPYYRYVPDPVLDNGNITLYWDRSIITDRTIVANKPDIVVVDRTERRAMIVDITVPHDGNLVKAEKDKQIKYLDLAREVVDMWDVDSAIIVPIVVSANGLIAKSLDQHLRRLTLDGWIKGLIQKAVLLDTARIVRRFLSLEP

SEQ ID NO: 13307 - protein, 868 aa, Agrotis ipsilon
MRFVRRAFSGIDIDPRDYLARVTERIDFLKQKICAWANRIRRYKRRVERYTLNRTFQSDERWVYRAWERPDQGLADTPLPDDDAMSSFWRSIWSVPVSHTEGDWIRDVERACDHIPEMGAITISPQDVACAVHLLPNWKSPGPDGLHNFWIKWLKKSHARLATLFQSAIESGSLPEFLMTGITHLLHKTGSTAEPKNYRPITCLPTLYKVLTSILRTKISKHIYENSIMSASQNGCKNGSRGTKELLLIDMAISQQVRRSRKDLSTCWIDYKKAYDSVPHTWLMRVLELYKVDATLCTFLMSCMQQWRTVLLYPGCRHIQRTSEPIRIERGIFQGDSLSPLWFCLALNPLSTLLEGSGLGYRLKRGGQVISHLLYMDDLKLFAPNNLQLMKLLKVTETFSSAIRMEFGVDKCAVMHVKRGEIMESEGTQLSDSIHLRSLSSTETYKYLGMSEALGINNADMKQSLRERFFGRLNKVLNSLLSGGNKVRAFNGWVMPVLMYSFGILKWTQTELDALDRRVRSLLTANRMHHPRSSVMRLYIPRKCGGRGFLNAKTLHNREVCSLREYFLETDVGMHRDVVTVDKGLTPLSLANENWRKPRVLDTNDRKEVWQSKELHGRYYRALHGPDVDFLASVSWLRFGDLFGETEGFVCAIMDEVMMTNNYRKYIVKDGTVDICRACHRPGESIRHIISGCSRLANGEYLHRHNLVARIIHQQLALKYNLVELEVPYYRYAPDPVLENGNISLYWDRPIITDRTIVANKPDIVVIDRPERRAIIVDITVPHDENLVKAEKDKQFKYLDLAREVVDMWDVNTAVIVPIVVSANGLIAKSLDQHLRRLSLGGWIKRLIQKAVLLDTARIVRRFLSQEP

SEQ ID NO: 13308 - protein, 1198 aa, Mesoligia furuncula
MLTRSALRKARLPPPDSSLSSASPPPVPSLTVSAVTTPAVAVASSSSDEYFSPPTTPPPARRRGGRRPPDGLGPRGPPASDRVPAPGGSVQRMRWTRSINENVMRSYYGATEGGNNLTAYRVRMLSLFQVLEPAVNVSAQRLSDQVRVIQRNHMLDDTVLDRLRNEMQSSHVIAPQPQTAVLLPQCNTNHADEGSNDRATNVSTQCNEELRSALEDAIREYRFMSPEHRPRLPRLPMHNKNRALVAALDSQLSNYFDDCEDLTDTHSILYCAAVAVCRVAHVKFANDSRATRPKPAIPAWQCRIERRIGGARALIGKLICFREGNTRPRVMRFVRRAFLGTDISPQDYMSCVTERIDFLKQKVYAWANRIRRYKRRVERYTQNRTFQSDERWVYRSWERPDQSVADTCLPDDEAMCSFWRNIWSVPVSHTEGDWAREVERACDPIPEMGAITICPQDVARAVRPLPNWKSPGPDGLHNFWIKWFLRSHARLASQFQTALESGSLPQFLTTGITHLLHKSGSTTEPKNYRPITCLPTVYKVLTSILRAKIDKHINTNSIMSVSQNGCKNGSRGTKELLLIDMAISQQVRRSRKDLSTCWIDYKKAYDSVPHTWLMRVLELYKIDATLRTFLMSCMGQWRTVLRYPGCRNIQRNSEPIRIERGIFQGDSLSPLWFCLALNPLSTLLEDSGLGYRLRRGGQVISHLLYMDDLKLFAPNNLQLMELLKVTQTFSSAIRMEFGVDKCAVMHVKRGEIVESVGTQLSDSTNLRALSASETYKYLGMSEALGINVTDMKQSLKERFFGRLKKVLNSLLSGGNKVRAFNGWVMPVLMYSFGILKWTQTELDALDRRVRTLLTANRMHHPRSSVMRLYIPRKCGGRGFLNAKTLHNREICSLREYFLETDVGMHRDVVAVDKGLTPLSLAKENWRKPVVLDTNDRMEVWQSKELHGRFFRALHGPDVDLLASVAWLRFGDLFGETEGFVCAIMDEVMMTNNYRRFIVKDGTVDICRACHRPGESIRHIISGCSRLANGEYLHRHNLVARIIHQQLALKYSLVESEVPYYRYVPDPVLENGNISLYWDRSIITDRTIVANKPDIVVVDRSERRAMIVDITVPHDENLVKAEKDKQIKYLDLAREVVDMWDVDSAIIVPIVVTANGLIAKSLDQHLRRLWLGSWIKGLIQKAVLLDTARIVRRFLSLEP

SEQ ID NO: 13309 - protein, 1198 aa, Mesoligia furuncula
MLTRSALRKARLPPPDSSLSSASPPPVPSLTVSAVTTPAAAVASSSSDEYFSPPTTPPPARRRGGRRPPDGLGPRGPPASDRVPAPGGSVQRMRWTQSINENVMRSYYGVTEGGNNLTAYRVRMLSLFQVLEPTVNVSAQRLSDQVRVIQRNHMLDDTVLDRLRNEMQSSHVIAPQSQTAVVLPQSNTSHADEGSNDRATNVSTQCNEELRSTLEDAIQEYRFMSPELRPRLPRLPMHNKNRALVAVLDSQLSNYFDGCEDLTDTHSILYCAAVATCRVAHVKFANDSRATRPKPAVPAWQCRIERRIGEARALIGKLTCFREGNTRPRVMRFVRRAFLGTDISPQDYMSCVTERIDFLKQKVYAWANRIRRYKRRVERYTQNRTFQSDQRWVYRDWERPDQSVTDACLPDDDAMCSFWRSIWSVPVSHTESDWTREVERACDPIPEMGAITICPQDVARAVRPLPNWKSPGPDGLHNFWIKWFTRSHARLASQFQTALESGSLPQFLTTGITHLLHKSGSTAEPKNYRPITCLPTVYKVLTSILRVKIDKHINTNSIMSASQNGCRNGSRGTKELLLIDTTISQQVRRFRKDLSTCWIDYKKAYDSVPHTWLMRVLGLYKVDTTLRTFLMSCMGQWRTVLRYPGCRNIQRNSEPIRIERGIFQGDSLSPLWFCLALNPLSTLLEDSGLGYRLRRGGQVISHLLYMDDLKLFAPNNLQLMELLKITETFSSAIRMEFGVDKCAVMHVKRGEIVESVGTQLSDSTNLRALSASETYKYLGMSEALGINVTDMKQSLKERFFGRLKKVFNSLLSGGNKVRAFNGWVMPVLMYSFGILKWTQTELDALDRKVRTLLTANRMHHPRSSVMRLYIPRKCGGRGFLNAKTLHNREICSLREYFLETDVGMHRDVVAVDKGLTPLSLGKENWRKPVVLDTNDRMEVWQSKELHGRFFRALHGPDVDLLASVAWLRFGDLFGETEGFVCAIMDEVMMTNNYRRFIVKDGTVDICRACHRPGESIRHIISGCSRLANGEYLHRHNLVARIIHQQLALKYSLVESEVPYYRYVPDPVLENGNITLYWDRSIITDRTIIANKPDIVVVDRSERRAMIVDITVPHDENLVKAEKDKQIKYLDLAHEVVDMWDVDSAIIVPIVVTANGLIAKSFDQHLKRLSLGSWIKGLIQKAVLLDTARIVRRFLSLEP

SEQ ID NO: 13310 - protein, 1206 aa, Mesoligia furuncula
MLTRSRARHLLKNTHPTSSGSSLSSASQLPDPAPDVSLVRPAAAVASSSSDEYFSPPTTPPPVCRRGRGRPPASLGLRGPPASDRVPAPGGSVQRMRWTQTVNENVMRAYFGATEGGSNLTAYRGRMLSLFQVLEPAVNVSAQRLSDQVRVIQRNHMLDNVVLDRLRLESRNSHVTPASSLIAVQLQNVPSVSPRPDHVYVEDDDEAITVSSQCNARLRSALEDAFCEYRSIPPGLRPRLPRLPMHKKNKALVCALDSQLSNCFNNSKDLTDTHSILYCAAVAACRVAHVKFPNSDRAPRPKPAVPAWQCRIECRIGEARALIGKLICFREGNTRPRVMRFVRRAFSGTDISSRDYLSRVTERIDFLKQKIYAWANRIRRYRRRVERYTQNRTFQNDERWVYRAWERPDQGVTDTPLPDDDAMCSFWRNIWSVPVSHTEGDWTAKVERACDLIPEMGVLTISPQDVARAVRPLPNWKSPGPDGLHNFWIKWFQGSHARLASQFQSALESGSLPQFLTTGITHLLHKSGSTADPKNYRPITCLPTVYKVLTSILRAKINKHIDTNSIMSVSQNGCRNGSRGTKELLLIDMTISQQVRRFRKDLSTCWIDYKKAYDSVPHTWLMRVLELYKVDTTLRTFLMSCMGQWRTVLRYPGCRNIQRNSEPIRIERGIFQGDSLSPLWFCLALNPLSTLLEDSGLGYRLRRGGQVISHLLYMDDLKLFAPNNLRLMELLKITETFSSAIRMEFGVDKCAVMHVKRGEIVESVGTQLSDSTNLRALSAFETYKYLGMSEALGINVTDMKQSLKERFFGRLKKVFNSLLSGGNKVRAFNSWVMPVLMYSFGILKWTQTELDALDRKVRTLLTANRMHHPRSSVMRLYIPRKCGGRGFLNAKTLHNREICSLREYFLETDVGMHRDVVAVDKGLTPLSLGKENWRKPVVLDTNDRMEVWQSKELHGRFFRALHGPDVDLLASVAWLRFGDLFGETEGFVYAIMDEVMMTNNYRRFIVKDGTVDICRACHRPGESIRHIVSGCSRLANGEYLHRHNLVARIIHQQLALKYSLVESEVPYYRYVPDPVLENGNITLYWDRSIITDRTIVANKPDIVVVDRLERRAMIVDITVPHDENLVKAEKDKQVKYLDLAREVVDMWDVNSAIIVPIVVTANGLIAKSLDQHLKRLSLGSWIKGLIQKAVLLDTARIVRRFLYLEP

SEQ ID NO: 13311 - protein, 970 aa, Mesoligia furuncula
MIIIIIIIMHNKNRALVAALDSQLSKYFDTCEDLIDTHSILYCAAVAACRVAHVKFANDSRATRPKQAVPAWQCRIERRIGGARTLIGKLICFREGNTRPRVMRFVRRAFSGTDISPQDYMSCVTERIDFLKQKVYAWANRIRRYRRRVERYTQNRTFQSDERWVYRGWERPDQGVAETCLPDDDAMCSFWRNIWSVPVSHTEGDWAREVERACDPIPEMGAITICPQDVARAVRPLPNWKSPGPDGLHNFWIKWFPRSHALLASQFQTALKSGSLPQFLTTGITHLLHKSGSTAEPKNYRPITCLPTVYKVLTSILRTKINKHIDTNSIMSASQNGCRNGSRGTKELLLIDMAISQQVRRFRKDLSTCWIDYKKAYDSVPHTWLMRVLELYKIDTTLRTFLMSCMGQWRTVLRYPGCRNIQRNSEPIRIERGIFQGDSLSPLWFCLALNPLSTLLEDSGLGYRLRRGGQVISHLLYMDDLKLFAPNNLQLMELLKITETFSSAIRMEFGVDKCAVMHVKRGEIVESVGTQLSDSTNLRALSASETYKYLGMSEALGINVTDMKQSVKERFFGRLKKVLNSLLSGGNKVRAFNGWVMPVLMYSFGILKWTQTELDALDRRVRTLLTANRMHHPRSSVMRLYIPRKCGGRGFLNAKTLHNREICSLREYFLETDVGMHRDVVIVDKGLTPLSLAKENWRKPVVLDTNDRMEVWQSKELHGRFLRALRGPDVDLQASVAWLRFGNLFGETEGFVCAIMDEVMMTNNYRRFIVKDGTVDICRACHRPGESIRHIISGCSRLANGEYLHRHNLVARIIHQQLALKYNLVESEVPYYRYVPDPVLENGNITLYWDRSIITDRTIVANKPDIVVVDRSERRAMIVDITVPHDENLVKAEKDKQIKYLDLAREVVDMWDVDTAIIVPIVVTANGLIAKSLDQHLRRLSLGSWIKGLIQRAVLLDTARIVRRFLSLEP

SEQ ID NO: 13312 - protein, 1198 aa, Mesoligia furuncula
MLTRSALRKARLPPPDSSLSSASPPPVPSLTVSAVTTPAVAVASSSSDEYFSPPTTPPPARRRGGRRPPDGLGPRGPPASDRVPAPGGSVQRMRWTRSINENVMRSYYGATEGGNNLTAYRVRMLSLFQVLEPAVNVSAQRLSDQVRVIQRNHMLDDTVLDRLRNEMQSSHVIAPQPQTAVLLPQCNTNHADEGSNDRATNVSTQCNEELRSALEDAIREYRFMSPEHRPRLPRLPMHNKNRALVAALDSQLSNYFDDCEDLTDTHSILYCAAVAVCRVAHVKFANDSRATRPKPAIPAWQCRIERRIGGARALIGKLICFREGNTRPRVMRFVRRAFLGTDISPQDYMSCVTERIDFLKQKVYAWANRIRRYKRRVERYTQNRTFQSDERWVYRSWERPDQSVADTCLPDDEAMCSFWRNIWSVPVSHTEGDWAREVERACDPIPEMGAITICPQDVARAVRPLPNWKSPGPDGLHNFWIKWFLRSHARLASQFQTALESGSLPQFLTTGITHLLHKSGSTTEPKNYRPITCLPTVYKVLTSILRAKIDKHINTNSIMSVSQNGCKNGSRGTKELLLIDMAISQQVRRSRKDLSTCWIDYKKAYDSVPHTWLMRVLELYKIDATLRTFLMSCMGQWRTVLRYPGCRNIQRNSEPIRIERGIFQGDSLSPLWFCLALNPLSTLLEDSGLGYRLRRGGQVISHLLYMDDLKLFAPNNLQLMELLKVTQTFSSAIRMEFGVDKCAVMHVKRGEIVESVGTQLSDSTNLRALSASETYKYLGMSEALGIYVTDMKQSLKERFFGRLKKVLNSLLSGGNKVRAFNGWVMPVLMYSFGILKWTQTELDALDRRVRTLLTANRMHHPRSSVMRLYIPRKCGGRGFLNAKTLHNREICSLREYFLETDVGMHRDVVAVDKGLTPLSLAKENWRKPVVLDTNDRMEVWQSKELHGRFFRALHGPDVDLLASVAWLRFGDLFGETEGFVCAIMDEVMMTNNYRRFIVKDGTVDICRACHRPGESIRHIISGCSRLANGEYLHRHNLVARIIHQQLALKYSLVESEVPYYRYVPDPVLENGNISLYWDRSIITDRTIVANKPDIVVVDRSERRAMIVDITVPHDENLVKAEKDKQIKYLDLAREVVDMGDVDSAIIVPIVVTANGLIAKNLDQHLRRLSLGSWIKGLIQKAVLLDTARIVRRFLSLEP

SEQ ID NO: 13313 - protein, 1199 aa, Spilarctia lutea
MLTRARRRAQLSPPDSSLRSALPSPEEAIKVPAGAEASSSSSSDEFFSPPTSPIPVRRQGRGRPPTSLGSRGPLTSNRAPAAGGDVRRMKWTHSINENVMRAYFRATELGTNLTAYRVRLVSLFQELEPAVNVSAQRLSDQVRAIQRCHLLDDAALERIRSDIRNSLTVPSSSHVLNVVTNSTPQVPQNDDISELVDSEIISVSTQYNDRIRSTLEDAIREYRYVNLNNRPRLSRLPIHKRNLALVSALDSLLPKYFSNSGDLSDTHSILYCAAIAVCRVAGVKFAEYTTTTRQENTLPAWQCRIERRIAEARTLIGKLMSFRSGNTRPRVMRFVKQAFLGTTISPQEYMSCVTERIDFLKQKVYAWANRIRRYRKRVDRYNQNRMFQKNERWVYRKWENLSPCMSDGQVPDENATNSFWHSIWSVPVTHTEGDWYRDVERSCESLLPMEPISIDEEDVSCAVRSLPNWKAPGPDGLHNFWLKWFRSSHACLASQFQTALDSGSLPQFLTTGITHLLYKSGDAMDPKNFRPITCLPTLYKLLTSILRLKITTHINHNSILSISQNGCRSGTRGTKELLIIDMTISQQVRRNRKSLATCWIDYKKAFDSVPHTWLLKVLELYKIDTTLCTFLKVCMRQWRTALRYPGCRQSAMNDVLIKIERGIFQGDILSPLWFCLALNPLSTLLEGSGLGYRLQKDDRVISHLLYMDDLKLLAPTKLQLTALLKVTENFSNSIKLEFGVDKCAVMHVKKGEIVESEGIELSDFTKLRSLSATEAYKYLGFSQSLGMPESDVKQTLRERFFSRLKKVLKSLLSGSNKVRACNGWVMPVLMYSFGVLRWTQTELNAIDRRVRTLLTAFRMHHPRSSVMRLYIPRRLGGRGLLNIKTLHNREVYNLREYFLQTDVGVHRSVVTVDTGLTPLALAKENWRKPVVLSTNDRREVWKGKVLHGRFYRALNGPDIDFKASTSWLRYSDLFGETEGFVCAIMDEVIMTNNYRKYILRDGTVDICRACHRPGESIRHIISGCSRLANGEYLHRHNQVARIVHQQLALKYNLVISEVPYYRYVPDPVLENGRATLYWDRSIITDRTIVANKPDIVVIDRLERRAMIVDIAVPHDENLMKVEKEKQIKYLDLSHEIVDMWNVDSVIIVPIVVSAHGLIAKSLDQHLKRLTLGGWIKGLIQKAVLLDTARIVRRFLSLEP

SEQ ID NO: 13314 - protein, 1199 aa, Spilarctia lutea
MLTRARLRAQLSPPDSSLRSTLPSPEAITEVPVDAEASSSSSSDEFFSPPTSPIPVRRQGRGRPPTSLGSRGPLTSNRAPATGGDLRRMKWTNSINENVMRAYFRATELGTNLTAYRVRLVSLFRELEPSVNVSAQRLSDQVRAIQRCHLLNDAVLERIRSDILNVLIVPSSSHAVDLVPINTPQLPHDHYVDELVESEDISVSTQCNNKIRSALEDAIQEYRYVNWNNRPRLPRLPIHKRNLALVSALDSLLSDYFDNSEDLSDTHSILYCAAVAVCRVANVKFRENMTYVRPKNTIPAWQCRIERRIAETRTLIGKLVSFRSGNTRPRVMRFVKHAFSGTTISPGQYMSCVTERIDFLKQKVYAWANRIRRYRKRVDRYNQNRMFQRNEKWVYRKWEEPSPSVSDGQFPDDNATNTFWRGIWSVPVTHTEGDWCRDVERSCESILPMEPLTIGKDDVSCAARSLPNWKSPGPDGLHNFWLKWFRSSHACLASQFQAAVDSSSLPQFLTTGITHLLYKSGSAMDPKNFRPITCLPTVYKLLTSILRLKISTHINNNSIISVSQNGCRSGTRGTKELLIMDMTISQQVRRNRKSLATCWIDYKKAYDSVPHTWLLRVLELYKIDTTLCTFLKSCMGQWRTVLRYPGCRQSAMTDVLIKIERGIFQGDSLSPLWFCLALNPLSTLLEGSELGYRLRKDDRAISHLLYMDDLKLLAPTKLQLTELLKVTENFSNSIKMEFGVDKCAVMYVKKGLIVESEGIELSDSIKLRSLSATESYKYLGFSQSLGIPESDMKQALRERFFGRLKKVLKSLLSGGNKVRAYNGWVMPVLMYSFGVLRWTQTELDALDRRVRTLLTAFRMHHPRSSVMRLYIPRKFGGRGLLNIKTLHNREIYNLREYFLHTDVGIHRSVVAVDSGLTPLALAKENWRKPVVLSTNDRREVWRGKELHGRFYRALHGPDIDFKTSTSWLRYGDLFGETEGFVCAIMDEVIMTNNYRKYILKDGTVDICRACHRPGESIRHIISGCSRLANGEYLHRHNQVARIVHQQLALKYHLVNSEVPYYRYVPDPVLENGRATLYWDRSIITDRTIVANKPDIVVIDRLERRAIIIDIAVPHDENLVKVEKEKQIKYLDLSHEIVDMWNVDSVIMVPIVVSAHGLIAKSLDQHLKRLTLEGWIKGLIQKAVLLDTARIVRRFLSLES

SEQ ID NO: 13315 - protein, 988 aa, Xestia c-nigrum
MRSALEGAIREYRFMTPELRPRLPRLPMHNKNRMLVAVLDSQLSNYFDNCEDLTDVHSILYCAAVAACRVARVKFSDDRATRPKPAVPAWQYRIEQRIGGARALIGKLICFREGNTRPRVMRFVKRAFSGTDINPRDYMSRVTERIDFLKQKVYAWASRIRRYKRRVDRYTQNRTFQRDERWVYRAWERPDQSVADTRLPDDDAMCSFWRSIWSVPVSHAEGEWTRVIERACDPVPEMGAITISPQDVACAVRPLPNWKSPGPDGLHNFWIKWFTRSHARLATLFQSALESGSLPEFLTTGITHLLHKSGSTAEPKNYRPITCLPTVYKVLTSILRTKICKHVDDNSVMSASQNGCRNGSRGTKELLLIDMAISQQVRRSRKDLSTCWIDYKKAYDSVPHTWLMRVLELYKVDATLRTFLMSCMRQWRTVLRYPGCRQIQRNSEPIRIERGIFQGDSLSPLWFCLALNPLSTLLEDSGLGYQLRKDGRVISHLLYMDDLKLFAHNDLQLMELLKVTETFSSAIRMEFGVDKCAVMHVKRGEIVESVGTQLSDSINLRSLSATETYKYLGMSEALGINVADMKQSLKERFFGRLKKVFNSLLSGGNKVRAFNGWVMPVLMYSFGILKWTQTELDALDTKVRKLLTVFRMHHPRSSVMRLYIPRKCGGRGFLNAKTLHNREICSLRDYFLEADVGMHRDVVTMDKGLTPLSLAKENWRKPIILTTDDRRKEWQGKELHGRFYRALHGPDVDFLASVSWLRSGDLFGETEGFVCAIMDEVMMTNNYRRFIVKDGTVDICRACHRPGESIRHIISGCSRLANGEYLHRHNLVARIIHQQLALKYNLVESEVPYYRYVPDPVLVNGSITLYWDQSIITDRTVIANRPDIVVMDRSERRAMIVDITVPHDENLVKAEKDKQIKYLDLAREVVDMWEVDSAIIVPIVVSAHGLIAKSLDQHLRRLSLGSWIKGLIQKAVLLDTARLVRRFLSLEP

SEQ ID NO: 13316 - protein, 974 aa, Xestia c-nigrum
MTPELRPRLPRLPMHNKNRMLVAVLDSQLSNYFDNCEDLTDVHSVLYCAAVAACRVARVKFPDDRATRPKPAVPAWQYRIEQRIGGARALIGKLICFREGNTRPRVMRFVRRAFSGTDINPRDYMSRVTERIDFLKQKVYAWASRIRRYKRRVDRYAQNRTFQRDERWVYRAWERPDQGVADTRLPDDDAMCSFWRSIWSVPVSHAEGEWTRVVERACDPVSEMGAITISPQDVACAVRPLPNWKSPGPDGLHNFWIKWFTRSHARLATLFQSALESGSLPEFLTTGITHLLHKSGSTAEPKNYRPITCLPTVYKVLTSILRAKITKHIDENSVMSASQNGCRNGSRGTKELLLIDMAISQQVRRSRKDLSTCWIDYKKAYDSVPHTWLMRVLELYKVDATLRTFLMSCMGQWRTVLRYPGCRQIQRNSEPIRIERGIFQGDSLSPLWFCLALNPLSTLLEDSGLGYQLRKDGRVISHLLYMDDLKLFAPNDFQLMELLKVTETFSSAIRMEFGVDKCAVMHVKRGEIVESVGTQLSDSINLRSLSATETYKYLGMSEALGINVADMKQSLKERFFGRLKKVFNSLLSGGNKVRAFNGWVMPVLMYSFGILKWTQTELDALDTKVRKLLTAFRMHHPRSSVMRLYIPRKCGGRGFLNAKTLHNREICSLRDYFLEADVGMHRDVVAMDKGLTPLSLAKENWRKPIILTTDDRRKEWQGKELHGRFYRALHGPDVDFLASVSWLRSGDLFGETEGFVCAIMDEVMMTNNYRRFIVKDGTVDICRACHRPGESIRHIISGCSRLANGEYLHRHNLVARIIHQQLALKYNLVESEVPYYRYVPDPVLVNGSITLYWDQSIITDRTVIANRPDIVVMDRSERRAMIVDITVPHDENLVKAEKDKQIKYLDLAREVVDMWEVDSAIIVPIVVSAHGLIAKSLDQHLRRLSLGSWIKGLIQKAVLLDTARIVRRFLSLEP

SEQ ID NO: 13317 - protein, 1036 aa, Xestia c-nigrum
MHSSHVIATPPSQAVVPPQSTTITNRDDDVSSDMITNVGTQYSEDMRSALEGAIREYRFMTPELRPRLPRLPMHNKNRMLVAVLDSQLSNYFDNCEDLTDVHSILYCAAVAACRVARVKFSDDRATRSKPAVPAWQYRIEQRIGGARALIGKLICFREGNTRPRVMRFVRRAFSGTDINPRDYMSRVTERIDFLKQKVYAWASRIRIRCRYKRRVDRYTQNRTFQRDERWVYRAWERPDQSVADTRLPDDDAMCSFWRSIWSVPVSHAEGEWTRVIERACDPVPEMGAITISPQDVACAVRPLPNWKSPGPDGLHNFWIKLFTRSHARLATLFQSALESGSLPEFLTTGITHLLHKSGSTAEPKNYRPITCLPTVYKVLTSILRTKICKHVDDNSVMSASQNGCRNGSRGTKELLLIDMAISQQVRRSRKDLSTCWIDYKKAYDSVPHTWLLRVLELYKVDATLRTFLMSCMRQWRTVLRYPGCRQIQRNSEPIRIERGIFQGDSLSPLWFCLALNPLSTLLEDSGLGYQLRKDGRVISHLLYMDDLKLFAPNDLQLMELLKVTETFSSAIRMEFGVDKCAVMHVKRGEIVESVGTQLSDSINLRSLSATETYKYLGMSEALGINVADMKQSLKERFFGRLKKVFNSLLSGGNKVRAFNGWVMPVLMYSFGILKWTQTELDALDTKVRKLLTAFRMHHPRSSVMRLYIPRKCGGRGFLNAKTLHNREICSLRDYFLEADVGMHRDVVTMDKGLTPLSLAKENWRKPIILTTDDRRKEWQGKELHGRFYRALHGPDVDFLASVSWLRSGDLFGETEGFVCAIMDEVMMTNNYRRFIVKDGTVDICRACHRPGESIRHIISGCSRLANGEYLHRHNLVARIIHQQLALKYNLVESEVPYYRYVPDPVLVNGSITLYWDQSIITDRTVIANRPDIVVMDRSERRAMIVDITVPHDENLVKAEKDKQIKYLDLAREVVDMWEVDSAIIVPIVVSAHGLIAKSLDQHLRRLSLGSWIKGLIQKAVLLDTARLVRRFLSLEP

SEQ ID NO: 13318 - protein, 1198 aa, Griposia aprilina
MLTRSAARRARPPPPDSSLSSASLPPVSSPTVSAVTTPAAVVASSSSDEYFSPPTTPPPVRRRGGHRPPDGLGPRGPPASDRVPAPGGSVQRMRWTRSINENVMRSYYGATEGGNNLTAYRVRMLSLFQVLEPAVNVSAQRLSDQVRVIQRNHMLDDTVLDRLRNEMQSSHVIAPPSQTVVVLPQSNTSQADEESDDRATNVSTQCNDELRSALEDAIREYRFISPELRPRLPRLPMHNKNRVLVAALDAQLSNYFDDCVDLTDTHSILYCAAVAACRVAHVKFANDSRATRPKPAVPAWQCRIERRIGGARALIGKLICFREGNTRPRVMRFVRRAFAGIDISPQDYMSCVTERIDFLKQKVYAWANRIRRYKRRVERYTQNRTFQRDERWVYRDWERPDQGVADTCLPDDAAMCSFWRNIWSVPVSHTEGDWAREVERACDPIPEMGAISICPQDVTRAVRPLPNWKSPGPDGLHNFWIKWFGRSHAHLAAQYQVALESGSLPQFLTTGVTHLLHKSGSTAEPKNYRPITCLPTVYKVLTSILRAKINKHIDTNSVMSPSQNGCRNGSRGTKELLLIDMAISQQVRRSRKDMSTCWIDYKKAYDSVPHTWLVRVLELYKVDATLRTFLKSCMGQWRTVLHYPGCRNIQRNNEPIRIERGIFQGDSLSPLWFCLALNPLSTLLEDSGLGYRLRRGGQVISHLLYMDDLKLFAPNNLQLMELLKVTETFSSAIRMEFGVDKCAVMHVKRGEIVESVGTQLSDSINLRAPSAFETYKYLGMSEALGINGTDMKQLLKERFFGRLKKVFNSLLSGGNKVRAFNGWVMPVLMYSFGILKWTQTELDALDRKVRTLLTANRMHHPRSSVMRLYIPRKCGGRGFLNAKTLHNREICSLREYFLEADVGMHRDVVTVDKGLTPLSLAKENWRKPVVLDTNDRMEVWQSKELHGRFFRALHGPDVDQLASVAWLRFGDLFGETEGFVCAIMDEVILTNNYRRHIMKDGTVDVCRACHRPGESIRHIISGCSRLANEEYLHRHNLVARIIHQQLALKYSLVESEVPYYRYVPDPVLENGHITLYWDRSIITDRTIVANKPDIVMVDRLERRAMIVDITVPHDGNLVKAEKDKQIKYLDLAREVVDMWDVDSAIIVPIVVTANGLIAKSLDQHLRRLSLGSWIKGLIQKAVLLDTARIVRRFLSLEP

SEQ ID NO: 13319 - protein, 1025 aa, Griposia aprilina
MLDDTVLDRLRNKMQSSHVIAPPSQTVVVLPQCNTSQADEESDDRATNVSTQCNDELRSALEDAIREYRFISPELRPRLPRSPIHNKNRVLVAALDAQLSNYFDDCVDLTNTHSILYCAAVAACRVAHVKFANDSRATRPKPAVPAWQCRIERRIGGARALIGKLICFREGNTRPRVMRFVRRAFAGTNISPQDYMSCVTERIDFLKQKVYAWANRIRRYKRRVERYTQNRTFQRDERWVYRGWERPNQGVADTCLPDDDAMCSFRRNIWSVPVSHTECDWVREVERACDPIPEMGAISICPQDVTRAVHPLPNWKSPGPDGLQNFWIKWFGRSHARLAAQYQVAIESGSLPQFLTTGVTHLLHKSGSTAEPKNYRPITCLPTVYKVLTSILRAKINKHIDTNSIMSPSQNGCRNGSRGTKELLLIDMAISQQVRRSRKDLSTCWIDYKKAYDSVPHTWLVRVLELYKVDATLRTFLKSCMGQWRTILHYPGCRNIQRDNEPIRIERGIFQGDSLSPLWFCLALNPLSTLLEDSGLGYRLRRGGQVISHLLYMDDLKLFAPNNLQLMELLKVTETFSSASRMEFGVDKCAVMHVKRGEIVESVGTHLSDSINLRALSASDTYKYLGMSEALGINGTDMKQSLKERFFGRLKKVFNSLLSGGNKVRAFNGWVMPVLMYSFGILKWTQTELDALDRKVRTLLTANRMHHSRSLVMRLYILRKCGGRGFLNAKTLYNREICSLREYFLEADVGMHRDVVTVDKGLTPLSLAKENWRKPVVIDTNDRMAVWQSKELHGRFFRALHGPDVDQLASVAWLRFGDLFGETEGFVCGIMDEVILTNNYRRHIMKDGTVDVCRACHGPGESIRHIISGCSRLANEEYLHRHNLVARIIHQQLALKYSLVESEVPYYRYVPDPVLENGHITLYWDRSIITDRTIVANKPDIVVVDRLERRAMIVDITVPHDGNLVKAEKDKQIKYLDLAREVVDMWDVDSAIIVPIVVTANGLIAKSLDQHLRRLSLGSWIKGLI

SEQ ID NO: 13320 - protein, 1198 aa, Griposia aprilina
MLTRSAARRARPPPPDSSLSSASLPPVSSPTVSAVTTPAAVVASSSSDEYFSPPTTPPPVRRRGGHRPPDGLGPRGPPASDRVPAPGGSVQRMRWTRSINENVMRSYYGATEGGNNLTAYRVRMLSLFQVLEPAVNVSAQRLSDQVRVIQRNHMLDDTVLDRLRNEMQSSHVIAPPSQTVVVLPQSNTSQADEESDDRATNVSTQCNDELRSALEDAIREYRFISPELRPRLPRLPMHNKNRVLVAALDAQLSNYFDDCVDLTDTHSILYCAAVAACRVAHVKFANDSRATRPKPAVPAWQCRIERRIGEARALIGKLICFREGNTRPRVMRFVRRTFAGTNISPQDYMSCVTERIDFLKQKVYAWANRIRRYKRRVERYTQNRTFQRDERWVYRGWERPDQGVADTCLPDDDAMCSFWRNIWSVPVSHTEGDWTREVERACDPIPEMGAITICPQDVTRAVRPLPNWKSPEPDGLHNFWIKWFGRSHARLAAQYQVALESGSLPQFLTTGVTHLLHKSGSTAEPKNYRPIACLPTVYKVLTSILRDKINKHIDTNYIMSPSQNGCRNGSRGTKELLLIDMAISQQVRRSRKDLSTCWIDYKKAYDSVPHTWLMRVLELYKVEATLRTFLMSCMGQWRTVLHYPACRNTQRNSEPIRIERGIFQGDSLSPLWFCLALNPLSTLLEDSGLGYRLRRGGQVISHLLYMDDLKLFAPNNSQLMDLLKVTETFSSAIRMEFGVDKCAVMHVKRGEIVESVGTQLSDSINLRALSASETYKYLGMSEALGINGTDMKQSLKDRFFGRLKKVFNSLLSGGNKVRAFNGWVMPVLMYSFGILKWTQTELDALDRKVRTLLTANRMHHPRSSVMRLYIPRKCGGRGFLNAKTLHNREICSLREYFLEADVGMHRDVVTVDKGLTPLSLAKENWRKPVVLDTNDRMEVWQSKELHGRFFRALHGPDVDQLASVAWLRFGDLFGETEGFVCAIMDEVMMTNNYRRFIVKDGTVDICRACHRPGESIRHIISGCSRLANEEYLHRHNLVARIIHQQLALKYSLVESEVPYYRYVPDPVLENGHITLYWDRSIITDRTIVANKPDIVMVDRLERRAMIVDITVPHDGNLVKAEKDKQIKYLDLAREVVDMWDVDSAIIVPIVVTANGLIAKSLDQHLRRLSLGSWIKGLIQKAVLLDTARIVRRFLSLEP

SEQ ID NO: 13321 - protein, 1106 aa, Griposia aprilina
MRWTRSINENVMRSYYGATEGGHNLTSYRVRMLSLFQVLEPAVNVTAQRLSDQVRVIQRNHMLDDTVLDRLRNEMQSSHVIAPPSQTVVVLPQSKTSQADEESDDRATNVSTQCNDELRSALEDAIREYRFISPKLRPRLPRLPMHNKNRALVVALDAQLSNYFDDCVDLTDTHSILYCAAVAACRVAHVKFANDSRATRPKPAVPAWQCRIERRIGGARALIGKLICFREGNTRPRVMRFVRRAFAGTDISPQDYMSCVTERIDFLKQKVYAWANRIRRYKRRVERYTQNRTFQRDESWVYRGWERPDQGVADTCLPDDDAMCSFWRNIWSVPVSHTEGDWTREVERACDPIPEMGAITICPQDVTRAVRPQPNWKSPGLDGLHNFWIKWFGGSHARLAAQYQVALESGSLPQFLTTGVTHLLHKSGSTAEPKNYRPIACLPTVYKVLTSILRDKINKHIDTNYIMSPSQNGCRNGSRGTMELLLIDMAISQQVRRSRKDLSTCWIDYKKAYDSVPHTWLMRVLELYKVEATLRTFLMSCMGQWRTVLRYPACRNTQRNSEPIRIERGIFQGDSLSPLWFCLALNPLSTLLEDSGLGYRLRRGGQVISHLLYMDDLKLFAPNNSQLMDLLKVTETFSSAIRMEFGVDKCAVMHVKRGEIVESVGTQLSDSINLRALSASETYKYLGMSEALGINGTDMKQSLKDRFFGRLKKVFNSLLSGGNKVRAFNGWVMPVLMYSFGILKWTQTELDALDRKVRTLLTANRMHHPRSSVMRLYIPRKCGGRGFLNAKTLHNREICSLREYFLEADVGMHRDVVTVDKGLTPLSLAKENWRKPVVLDTNDRMEVWQSKELHGRFFRALHGPDVDQLASVAWLRFGDLFGETEGFVCAIMDEVMMTNNYRRFIVKDGTVDICRACHRPGESIRHIISGCSRLANEEYLHRHNLVARIIHQQLALKYSLVESQVPYYRYVPDPVLENGHITLYWDRSIITDRTIVANKPDIVMVDRLERRAMIVDITVPHDGNLVKAEKDKQIKYLDLAREVVDMWDVDSAIIVPIVVTANGLIAKSLDQHLRRLSLGSWIKGLIQKAVLLDTARIVRRFLSLEP

SEQ ID NO: 13322 - protein, 1078 aa, Griposia aprilina
MLLMLSLFQVLEPGVNVSAQRLSDQVRVIQRNHMLDDTVLDRLRNEMQSSHVIAPPSQTVVVLPQSNTSQADEESDDRATNVSTQCNDELRSALENAIREYRFISPELRPRLPRLPMHNKNRVLVAALDAQLSNYFDDCVDLTDTHSILYCAAVAACRVAHIKFANDSRPTRPKPAVPAWQCRIERRIGGARALIGKLICFREGNTRPRVMRFVRRAFAGTNISPQDYMSCVTERIDFLKQKVYAWANRIRRYKRRVERYTQNRTFQRDERWVYRGWERPDQGVADTCLPDDDAMCSFWRNIWSVPVSHTEGDWGREVERACDPIPEMGAISICPQDVTRAVRPLPNWKSPGPDGLQNFWIKWFGRSHARLAAQYQVAIESGSLPHFLTTGVTHLLHKSGSTAEPKNYRPITCLPTVYKVLTSILRAKINKHIDTNSIMSPSQNGCRNGSRGTKELLLIDMAISQQVRRSRKDLSTCWIDYKKAYDSVPHTWLVRVLELYKVDATLRTFLKSCMGQWRTILHYPGYRNIQRDNEPIRIERGIFQGDSLSPLWFCLALNPLSTLLEDSGLGYRLRRGGQVISHLLYMDDLKLFAPNNLQLMELLKVTETFSSAIRMEFGVDKCAVMHVKRGEIVESVGTQLSYSINLRALSASDTYKYLGMSEALGINGTDMKQSLKERFFGRLKKVFNSLLSGGNKVRAFNGWVMPVLMYSFGILKWTQTELDALDRKVRTLLTANRMHHPRSSVMRLYIPRKCGGRGFLNAKTLHNREICSLREYFLEADVGMHTDVVKVDKGLTPLSLAKENWRKPVVLDTNDRMEVWQSKELHGRFFRALHGPDVDQLASVAWLRFGDLFGETEGFVCAIMDEVILTNNYRRHIMKDGTVDVCRACHRPGESIRHIISGCSRLANEEYLHRHNLVARIIHQQLALKYSLVESEVPYYRYVPDPVLENGHITLYWDRSIITDRTIVANKPDIVVVDRLERRAMIVDITVPHDGNLVKAEKDKQIKYLDLAREVVDMWDVDSAIVVPIVVTANGLIAKSLDQHLRRLSLGSWIKGLIQKAVLLDTARIVRRFLSLEP

SEQ ID NO: 13323 - protein, 1094 aa, Griposia aprilina
MRSYYGATEGGNNLTAYRVRMLSLFQVLEPAVNVSAQRLSDQVRVIQRNHMLDDTVLDRLRSEMQSSHVITPPSQTVVVLPQPITSHDEGSDDRATNVSTQCNEELRSALEGAIREYRFMSPELRPRLPRLPMHNKNRALVAALDSQLSNYFDDCVDLTDTHSILYCAAVAACRVAHVKFANDSRATRPKPAVPAWQCRIERRIGGARALIGKLICFREGNTRPRVMRFVRRAFAGTDVSPQDYISCVTERIDFLKQKVYALASRIRRYKRRVERYTQNRTFQRDERWVYRDWERPDQGVADTYLPDDDAMCSFWHNIWSVPVSHTEGDWTREVERACEPIPEMGAITICPQDVARAVRPLPNWKSPGPDGLHNFWIKWFLRSHARLAAQFQAALESGSLPQFLTTGVTHLLHKSGSIAEPKNYRPITCLPTVYKVLTSILRAKINKHIDTNSIMSASQNGCRNGSRGTKELLLIDMAISQQVRRSRKDLSTCWIDYKKAYDSVPHTWLMRVLELYKVDATLRTFLKSCMRQWRTVLRYPTCRNTQRNSEPIRIERGIFQGDSLSPLWFCLALNPLSTLLEDSGLGYRLRRGGRVISHLLYMDDLKLFAPNNLQLIELLKVTETFSSAIRMEFGLDKCAVMHVKRGKIVESVGTQLSDSMNLRALSASETYKYLGMSEALGVNNTDMKQSLKERFFGRLKKVFNSLLSGGNKVRSFNGWVMPVLMYSFGILKWTQTELDTLDRRVRTLLTANRMHHPRSSVMRLYIPRKCGGRGFLNAKTLHNREICSLREYFLEADVGMHRDVVAVDKGLTPLSLAKENWRKPVVLDTNDRMEVWQSKELHGRFFRALHGPDVDVQASVAWLRFGDLFGETEGFDCAIMDEVMMTNNYRRFIVKDGTVDICRACHRPGESIRHIISGCSRLANEEYLQRHNLVARIIHQQLALKYSFVESEVPYYRYVPDPVLENGTITLYWDRSIITDRTIIANKPDIVLVDRRERRAMIVDITIPHDGNLVKAEKDKQIKYLDLAREVVDMWDVDSAIIVPIVVTANGLIAKSLDQHLRRLSLGSWIKGLIQKAVLLDTARIVRRFLSLEP

SEQ ID NO: 13324 - protein, 1045 aa, Griposia aprilina
MLDDTVLDRLRNEMQSSHVIAPPSQTVVVLPESNTSQADEESDDIATNVSTQCNDELRSALEDAIREYRFISPKLRPRLPRLPMHNKNRVLVAALDAQLSNYFDDCVDLTDTHSILYCAAVAACRVAHVKFANDSRATRPKPAVPAWQCRIERRIGGARALIGKLICFREGNTRPRVMRFVRRSFAGTNISPQDYMSCVTERIDFLKQKVYAWANRIRRYKRRVERYTQNRTFQRDERWVYRGWERPDQGVADTCLPDDDAMCSFWRNIWSVPVSHTEGDWAREVERACDPIPEMGAISICPQDVTRAVRPLHNWKSPGPDGLHNFWIKWFGRSHARLAAQFQVALESGSLPQFLTTGVTHLLHKSGSTAEPKNYRPITCLPTVYKVLTSILRAKINKHIDTNSIMSPSQNGCRNGSRGTKELLLIDMAISQQVRRSRQDLSTCWIDYKKAYDSVPHTWLVRVLELYKVDATLRTFLKSCMGQWRTVLHYPGCRNIQRDNEPIRIERGIFLGDSLIPLWFCLSLNPLSTLLEDSGLGYRLRRGGQVISHLLYMDDLKVFAPNNLQLMELLKVTETFSSAIRMEFGVDKCAVMHVKRGEIVESVGTQLSDSINLRALSASETYKYLGMSEALGINGTEMKQSLKERFFGRLKKVFNSILSGGNKVRAFNGWVMPVLMYSFGILKWTQTELDALDRKVRTLLTANRMHHPRSSVMRLYIPRKCGGRGFLNAKILHNREICSLREYFLEADVGMHGDVVTVDKGLTPLSLAKENWRKPVVLDTNDRMEVWQSKELHGRFFRALHGPDVDQLASVAWLRFGDLFGETEGFVCAIMDEVILTNNYRRHIMKDGTVDVCRACHRPGESIRNIISGCSRLANEEYLHRHNLVARIIHQQLALKYSFVESEVPYYRYVPVAVLENGHITLYWDRSIITDRTIVANKPDIVMVDRLERRAMIVDITVPHDGILVKAEKDKQIKYLDLAREVVDMWDVDSVIIVPIVVTTNGLIAKSLDQHLRRLSLGSWKKGLIQKAVLLDTARIVRRFLSLEP

SEQ ID NO: 13325 - protein, 1199 aa, Griposia aprilina
MMLTRSAKRRAHPPPPDSSLSSASPPPVSNPTVSAVTTPAAVVASSSSDEYFSPPTTPPPVRRRGGHRPPDGLGPRGPPASDRVPAPGGSVQRMRWTRSINENVMRSYYGATEGGNNLTAYRVRMLSLFQVLEPAVNVSAQRLSDQVRVIQRNHMLDDTVLDRLRNEMQSSHVIAPPSQTVVVLPQSNTSQADEESDDRATNVSTQCNDELRSALEDAIREYRFISPELRPRLPRLPMHNKNRVLVAALDAQLSNYFDDCVDLTDTHSILYCAAVAACRVAHIKFANDSRPTRPKPAVPAWQCRIERRIGGARALIGKLICFREGNTRPRVMRFVRRAFAGTNISPQDYMSCVTERIDFLKQKVYAWANRIRRYKRRVERYTQNRTFQRDERWVYRGWERPDQGVADTCLPDDDAMCSFWRNIWSVPVSHTEGDWGREVERACDTIPEMGAISICPQDVTRAVRPLPNWKSPGPDGLQNFWIKWFGRSHARLAAQYQVAIESGSLPHFLTTGVTHLLHKSGSTAEPKNYRPITCLPTVYKVLTSILRAKINKHIDTNSIMSPSQNGCRNGSRGTKELLLIDMAISQQVRRSRKDLSTCWIDYKKAYDSVPHTWLVRVLELYKVDATLRTFLKSCMGQWRTILHYPGCRNIQRDNEPIRIERGIFQGDSLSPLWFCLALNPLSTLLEDSGLGYRLRRGGQVISHLLYMDDLKLFAPNNLQLMELLKVTETFSSAIGMEFGVDKCAVMHVKRGEIVESVGTQLSYSINLRALSASDTYKYLGMSEALGINGTDMKQSLKERFFGRLKKVFNSLLSGGNKVRAFNGWVMPVLMYSFGILKWTQTELDALDRKVRTLLTANRMHHPRSSVMRLYIPRKCGGRGFLNAKTLHNREICSLREYFLEADVGMHTDVVKVDKGLTPLSLAKENWRKPVVLDTNDRMEVWQSKELHGRFFRALHGPDVDQLASVAWLRFGDLFGETEGFVCEIMDEVILTNNYRRHIMKDGTVDVCRACHRPGESIRHIISGCSRLANEEYLHRHNLVARIIHQQLALKYSLVESEVPYYRYVPDPVLENGHITLYWDRSIITDRTIVANKPDIVVVDRLERRAMIVDITVPHDGNLVKAEKDKQIKYLDLAREVVDMWDVDSAIIVPIVVTANGLIAKSLDQHLRRLSLGSWIKGLIQKAVLLDTARIVRRFLSLEP

SEQ ID NO: 13326 - protein, 1198 aa, Griposia aprilina
MLTRSAARRARPPPPDSSLSSASLPPVSSPTVSAVTTPAAVVASSSSDEYFSPPTTPPPVRRRGGHRPPDGLGPRGPPASDRVPAPGGSVQRMRWTRSINENVMRSYYGATEGGNNLTAYRVRMLSLFQVLEPAVNVSAQRLSDQVRVIQRNHMLDDTVLDRLRNEIQSSHVIAPPSQTVVVLPQSNTSQADEESDDRATNVSTQCNDELRSALEDAIREYRFISPELRPRLPRLPMHNKNRVLVAALDAQLSNYFDDCVDLTDTHSILYCAAVAACRVAHVKFANDSRATRPKPAVPAWQCRIERRIGEARALIGKLICFREGNTRPRVMRFVRRAFAGTNISPQDYMSCVTERIDFLKQKVYAWANRIRRYKRRVERYTQNRTFQRDERWVYRGWERPDQGVADTCLPDDDAMCSFWRNIWSVPVSHTEGDWTREVERACDPIPEMGAITICPQDVTRAVRPLPNWKSPGPDGLHNFWNKWFGRSHARLAAQYQVALESGSLPQFLTTGVTHLLHKSGSTAEPKNYRPIACLPTVYKVLTSILRDKINKHIDTNYIMSPSQNGCRNGSRGTKELLLIDMAISQQVRRSRKDLSTCWIDYKKAYDSVPHTWLMRVLELYKVEATLRTFLMSCMGQWRTVLHYPACRNTQRNSEPIRIERGIFQGDSLSPLWFCLALNPLSTLLEDSGLGYRLRRGGQVISHLLYMDDLKLFAPNNSQLMDLLKVTETFSSAIRMEFGVDKCAVMHVKRGEIVESVGTQLSDSINLRALSASETYKYLGMSEALGINGTNMKQSLKDRFFGRLKKVFNSLLSGGNKVRAFNGWVMPVLMYSFGILKWTQTELDALDRKVRTLLTANRMHHPRSSVMRLYIPRKCGGRGFLNAKTLHNREICSLREYFLEADVGMHRDVVTVDKGLTPLSLAKENWRKPVVLDTNDRMEVWQSKELHGRFFRALHGPDVDQLASVAWLRFGDLFGETEGFVCAIMDEVMMTNNYRRFIVKDGTVDICRACHRPGESIRHIISGCSRLANEEYLHRHNLVARIIHQQLALKYSLVESEVPYYRYVPDPVLENGHITLYWDRSIITDRTIVANKPDIVMVDRLERRAMIVDITVPHDGNLVKAEKDKQIKYLDLAREVVDMWDVDSAIIVPIVVTANGLIAKSLDQHLRRLSLGSWIKGLIQKAVLLDTARIVRRFLSLEP

SEQ ID NO: 13327 - protein, 1201 aa, Omphaloscelis lunosa
MLTRLAARRARLPPPDSPLSSTSSPPVRSPTVNAVMTPAAAVASSSSDEYFSPPTTPPPARRRGRRRPPDGLGPRGPPASDRVPAPGGSVQRMRWTRSINENVMRSYYGATEGGNNLTAYRVRMLSLFQVLEPAVNVSAQRLSDQVRVIQRNHMLDDTVLDRLRSEMQSSHVIAPPLRSVIIPSQMSSVITSQADERIDDRATNVSTQCNEDLRSALEGAIQEYRFMSPELRPRLPRLPMHNKNKALVAVLDSQLSNYFDDCEDLTDTHSILYCAAVAVCRVAHLKFSNDSRATRPKPAAPAWQCRIERRIGGARTLIGKLICFREGNTRPRVMRFVRRAFLGTDISPQDYMTRVTERIDFLKQKVYAWANRIRRYKRRVERYTQNRTFQSDERWVYRAWERPDQDVADTHLPDDDAMCSFWRSIWSVPVSHTEDGWTREVERACDPIPEMGAITICPQDVARAVRPLPNWKSPGPDGLHNFWIKWFVKSHARLAAQYQTALESGSLPQFLMTGVTHLLHKSGSTAEPKNYRPITCLPTVYKVLTSILRAKINKHIDTNSIMSASQNGCRNGSRGTKELLLIDMAISQQVRRSRKDLSTCWIDYKKAYDSVPHTWLMRVLELYKVHTTLRTFLMSCMGQWRTVLRYPGCRNIQRNSEPIRIERGIFQGDSLSPLWFCLALNPLSTLMEDSGLGYRLRRGGQVISHLLYMDDLKLFAPNNLQLMKLLKVTETFSSAIRMEFGVDKCAVMHVKRGEIMESVGTQLSDSINLRALSASETYKYLGMSEALGINVTDMKQSLKERFFGRLKKVLNSLLSGGNKVRAFNGWVMPVLMYSFGILKWTQTELDALDRWVRTLLTAYRMHHPRSSVMRLYIPRKCGGRGFLNAKTLHNREICSLREYFLGVDVGMHRDVVVVDKGLTPLSLAKENWRKPVVLDTKDRMEIWQSKELHGRYFRALHGPDVDLPASVTWLRFGDLFGETEGFVCAIMDEVMMTNNYRRFIVKDGTVDICRACHRPGESIRHIISGCSRLANEEYLHRHNLVARIIHQQLALKYSLVESEVPYYRYVPDPVLENGNITLYWDRSIITDRTIAANKPDIVVVDRGERRTMIIDITVPHDENLVKAEKDKQIKYLDLAREVVDMWDVDSAIIVPIVVTANGLIAKSLDQHLRRLSLGSWIKGLIQRAVLLDTARIVRRFLSLKP

SEQ ID NO: 13328 - protein, 962 aa, Omphaloscelis lunosa
MHKKNKALMCTLDSLLSNCFDGSKDLADTHSILYCAAVAACRVAHVKFPNSDRAPRPKPAVPAWQCRIERRIGEARVLIGKLICFREGNTRPRVMRFVKRAFSGTDISFQDYLTRVTERIDFLKQKIYAWANRIRRYRRRVERYTQNRTFQSDERWVYRAWERLDQGVIDTHLPDDDAMCSFWRSIWSAPVSHTEGDWTREIERACEQIPEMEALTISLQDIARAVRPLPNWKSPGPDGLHNFWIKWFQRSHARLASQFQSALESGSLPQFLTTGITHLLHKSGSTAEPKNYRPITCLPTVYKVFTSILRTKINKHIDTNSIMSASQNGCRNGSRGTKELLLIDMAINQQVRRSRRDLSTCWIDYKKAYDSVPHTWLMRVLELYKVNVTLRTFLMSCMGQWRTVLRYPGCRQILRNSEPIKIERGIFQGDSLSPLWFCLALNPLSTLLEDSGLGYRLRRGGQVISHLLYMDDLKLFAPNNLQLLELLKVTETFSSAIRMEFGVDKCAVMHVKRGEIVESVGTQLSDSIQLRSLSSIETYKYLGMSEALGVNAADMKQSLKERFFNRLNKVLNSLLSGGNKVRAFNGWVMPVLMYSFGILKWTQTELDALDRRVRTLLTANRMHHPRSSVMRLYIPRKCGGRGFLNAKTLHNREVCSLREYFLEADVGMHRDVVTVDKGLTPLSLANENWRKPIVLDTNDRREVWQSKELHGRFYRALHGPDVDLLASVSWLRFGDLFGETEGFVFAIMDEVMMTNNYRKYIVKDGTVDICRACHRPGESIRHIISGCSRLANGDYLHRHNLVARIIHQQLALKYSLVESEVPYYRYVPDPVLENSNITLYWDRSIITDRTIVANKPDIVVIDRLERRTMLIDIAVPHDENLVKAEKDKRIKYLDLAREVVDMWDVDTIIIVPIVMTANGIIAKSLDHHLKRLSLGSWIKGLIQKAVLLDTARIVRRFLSQEP

SEQ ID NO: 13329 - protein, 1204 aa, Omphaloscelis lunosa
MLTRSATRRAHPPPPDSSLSSASPPSIPNPTVNVVTTPAAAVASSSSDEYFSPPTSPTPVRRQGRGRPPASLGLRGQQAPNRVPAAGGNVSRIRWTQSMNENVMRAYYGATEGGINLTAYRSRMLSLFQVLEPTINVSAQRLSDQVRVIQHNHRLDNATLDRLRLEMQNSFASNPPPSQDVVQAPAAVPLQANQHEEEEDGRAISADNLCNVELRSALEDAIREYRFTSPDLRPRLPRLPMNKRNRALVCALDELLPNFTESSANLCDTHSILYCTAVAACRIARVKFPNTDRSVRPKPVAPAWQCRIECRINEARVLIGKLICFREGNTRPRVMRFVRRAFSGTSISPREYVSHVTERIDFLKQKVYAWANRIRRYRRRVDRYTQNRMFQNDERWVYRTWERPTPNQGVTDTRLPNSDAMKAFWQSIWSVPVSHTEGDWMRVVEQACDPIPHMEAISITPLDVARAVRPLPNWKSPGPDGLHNFWLKWLQRSHTCLATQFQSSLDTGSLPLFFTTGVTHLLHKSGSTAEPKNYRPITCLPTIYKVFTSILRAKISHHINNNLITSVSQNGCKNGSRGTKELLLIDMTISQQVRKSRKDLSTCWIDYKKAYDSVPHTWLMRVLELYKIDATLRTFLMSCMQQWRTVLLYPGCRQIRGIDEPIRIERGIFQGDSLSPLWFCLALNPLSTLLEDSGLGYRLRRGGQVISHLLYMDDLKLFAPNNLRLMELLKITETFSSAIRMEFGVDKCAVMQVKRGEIMESVGTQLADSIHLRSLSSTETYKYLGMSEALGINVTDMKQSLKERFFGRLNKVLNSLLSGGNKVRAFNGWVMPVLMYSFGILKWTQTELDALDRKVRTLLTANRMHHPRSSVMRLYIPRKCGGRGFLNAKTLHNREIYSLREYFLQTNVGMHRDVVAVDKGLTPLSLAKENWRKPTVLDTNDRKEIWQGKELHGRFFRALHGPDVDFLTSVSWLRFGDLFGETEGFVCAIMDEVIMTNNYRKYIVKDGTVDICRACHQPGESIRHIVSGCSRLANGEYLHRHNLVARIIHQQLALQYNLIESEVPYYRYVPDPVLENGHTTLYWDRSIITDRTIVANKPDIVVIDRRERRAMIVDIAVPHDENLVKAEKDKKIKYLDLAHEVVDMWDVDSAIIVPIIVTVNGLIAKSLDQHLRRLSLRGWIKGLIQKAVLLDTARIVRTFLSLEP

SEQ ID NO: 13330 - protein, 1044 aa, Sesamia nonagrioides
MLDDTVLDRLRNEMQSSRVIAHQSQSAEIPPQPTNYADEGSNDRATNVSTQCNEELRNALEAAIREYRSISAELRPRLPRLPMHNRNRALMAALDAQLSNYFDTCEDLTDTHSILYCAAVAACRVAHVKFPSDSRATRPKPVVPAWQHRIERRIGGARALIGKLICFREGNTRPRVMRFVRRAFSGTNTSPQNYMARVTERIDFLKQKVYAWANRIRRYKRRVERYTQNRTFQSNERRVYRDWERPEQGVTDTCLPDDDAMCSFWRSIWSVPVSHTEGDWARDVERACDPIPEMGAITICPQDVAHAVRPLPNWKSPGPDGLHNFWIKWFPRSHARLASQFQTALVSGSLPQFLTTGITHLLHKSGSTAEPKNYRPITCLPTVYKVLTSILKTKINKHIDSNSILSASQNGCRSGSRGTKELLLIDMAISQQVRRSRKDLSTCWIDYKKAYDSVPHTWLMRVLELYKVDATLRTFLMTCMRTWRTVLRYPGCRNIQRNSEPIRIERGIFQGDSLSPLWFCLALNPLSTLLEDSGLGYRLRRGGQVISHLLYMDDLKLFAPNNSQLNELLKITEIFSSSIRMEFGVDKCAVMHVKRGEIMEPVGTQLTSSINLRALSASETYKYLGMSEALGINVTDMKQSLKERFFGRLKKVLNSLLSGGNKVRAFNGWVMPVLMYSFGILKWTQTELDALDQRVRTLLTANRLHHPRSSVMRLYIPRKCGGRGFLNAKTLHNREICSLRDYFLETDVGMHRDVVAADKGLIPLSLAKENWRKPVVLDTNDRMEVWKSKELHGRFFRALHGPDVDFQASVAWLRFGDLFGETEGFVFAIMDEVMMTNNYRRFIVKDGTVDICRACHRPGESIRHIISGCSRLANGEYLHRHNLVARIIHQQLALKYKLVESEVPYYRYMPDPVLENGHITLYWDRSIITDRTIIANKPDIVLVDRSERRAMIVDITIPHDENLVKAEKDKQTKYLDLAHEVVDMWEVDSAIIVPIVVTANGLIAKSLDQHLRRLSLGSWIKGLIQKAVLLDTARIVRKFLSLEP

SEQ ID NO: 13331 - protein, 1097 aa, Sesamia nonagrioides
MRSYYGATEGGNNLTAYRVRMLSLFQVLEPAVNVSAQRLSDQVRVIQRNHMLGDVVLDRLRLESRNSHVTPASSLVAVQLNSVSPRPNHIDEEDDDRAISVSPQCNEKLRSALEDAFREYRSIPPELRPRLPRLPMHKKNKALVCALDSQLSNYLKDSKDLNDTHSILYCGAVAICRVAHVKFPDNDRATRPKSAVPAWQCRIERRIGETRALIGKLVSFREGNTRPRVMRFVRRAFSGTDTSTRDYLFRVTERIDFFKQKIYAWANRIRRYRRRVERYSQNRNFQSDERRVYRAWERSDQGVTDTCLPDDDATCSFWRNIWSVPVSHTEGSWTRVVERACDPVPEMGAITICPQDVARAVRPLPNWKSPGPDGLHNFWIKWFSGSHARLASQFQTALESGSLPQYLTTGVTHLLHKSGSTAEPRNYRPITCLPTVYKVLTSILKSKINTHIDSNSIMSASQNGCRSGSRGTKELLLIDMAISQQVRRSRKDLSTCWIDYKKAYDSVPHTWLMRVLELYKVDATLRTFLMTCMRTWRTVLRYPGCRNIQRNSEPIRIERGIFQGDSLSPLWFCLALNPLSTLLEDSGLGYRLRRGGQVISHLLYMDDLKLFAHTDSQLKELLKITETFSSSIRMEFGVDKCAVMHVKRGEIMESVGTQLTSSINLRALSASETYKYLGMSEALGINVTDMKQSLKERFFGRLKKVLNSLLSGGNKVRAFNGWVMPVLMYSFGILKWTQTELDALDRRVRTLLTANRLHHPRSSVMRLYIPRKCGGRGFLNAKTLHNREICSLREYFLTTDVGMHRDVVAVDKGLTSLSLAKENWRKPVVLDTNDRMEVWKSKELHGRFFKALHGPDVDLQASVAWLRFGDLFGETEGFVCAITDEVMMTNNYRRFIVKDGTVDICRACHRPGESIRHIISGCSRLANGEYLHRHNLVARIIHQQLALKYNLVESEVPYYRYTPDPVLENDHITLYWDRSIITDRTIIANKPDIVLVDRSERRAMIVDITIPHDENLVKAEKDKQIKYLDLAHEVVDMWEVDSAIIVPIVVTANGLIAKSLDQHLRRLSLGSWFKGLIQKAVLLDTARIVRKFLSLEP

SEQ ID NO: 13332 - protein, 1197 aa, Sesamia nonagrioides
MLTRSAARRARPPSPDSLLGSASPPPVSSPTVSAVTTPAAAVALSSSDEYFSPPTTPPPVRRRGGRRPPDRLGPRGPSASDRVPAPGGSVQRMRWTQSINENVMRSYYGATEGGNNLTAYRVRMLSLFQVLEPAVNVSAQRLSDQVRVIQRNHMLDDTVLDRLRNEMQSSRVIAHQSQTAEIPPQSTNYADEGSNDRATNVSTQCNEELINALEAAIREYRSTSAELRPRLPRLPMHNRNRALMAALDAQLSNYFDTCEDLTDTHSILYCAAVAACRVAHVKFPSDSRATRPKPVVPAWQHRIERRIGGARALIGKLICFREGNTRPRVMRFVRRAFAGTNISPQNYMARVTERIDFLKQKVYAWANRIRRYKRRVERYTQNRTFQNNERWVYRDWERPEQGVTDTCLPDDDVMCSFWRSIWSVPVSHTEGDWARDVERACDLIPEMGAITICPQDVACAVRPLPNWKSPGPDGLHNFWIKWFPRSHARLASQFQTALVSGSLPQFLTTGITHLLHKSGSTAEPKNYRPITCLPTVYKVLTSILKTKINKHIDSNSIMSASQNGCKSGSRGTKELLLIDMAISQQVRRSRKDLSTCWIDYRKAYDSVPHTWLMRVLELYKVDATLRTFLMSCMRTWRTVLRYPGCRSIQRNSEPIRIERGIFQGDSLSPLWFCLALNPLSTLLEDSGLGYRLRRGGQVISHLLYMDDLKLFAPNNSQLRELLKITETFSSSIRMEFGVDKCAVMHVKRGEIMESVGTQLTGSINLRALSASETYKYLGMSEALGINVTDMKQSLKERFFGRLKKVLNSLLSGGNKVRAFNGWVMPVLMYSFGILKWTQTELDALDQRVRTLLTANRLHHPRSSVMRLYIPRKCGGRGFLNAKTLHNREVCSLREYFLETDVGMHRDVVAADKGLTPLSLAKENWRKPVVLDTNDRLEVWKSKELHGRFFRALHGPDVDFQASVAWLRFGDLFGETEGFVFAIMDEVMMTNNYRRFIVKDGTVDICRACHRPGESIRHIISGCSRLANGEYLHRHNLVARIIHQQLALKYKLVESEVPYYRYMPDPVLENGHITLYWDRSIITDRTIVANKPDIVLVDRSERRAMIVDITIPHDENLVKAEKDKQIKYLDLAHEVVDMWEVDSAIIVPIVVTANGLIAKSLDQHLRRLSLGSWIKGLIQKAVLLDTARIVRKFLSLEP

SEQ ID NO: 13333 - protein, 1074 aa, Sesamia nonagrioides
MLSLFQVLEPAVNVSAQRLSDQVRVIQRNHMLDDTVLDRLRNEMQSSRVIAHQSQTAEIPPQSTNYADEGSNDRATNVSTQCNEELINALEAAIREYRSTSAELRPRLPRLPMHNRNRALMAALDAQLSNYFDTCEDLTDTHSILYCAAVAACRVAHVKFPSDSRATRPKPVVPAWQHRIERRIGGARALIGKLICFREGNTRPRVMRFVRRAFAGTNISPQNYMARVTERIDFLKQKVYAWANRIRRYKRRVERYTQNRTFQNNERWVYRDWERPEQGVTDTCLPDDDVMCSFWRSIWSVPVSHTEGDWARDVERACDLIPEMGAITICPQDVACAVRPLPNWKSPGPDGLHNFWIKWFPRSHARLASQFQTALVSGSLPQFLTTGITHLLHKSGSTAEPKNYRPITCLPTVYKVLTSILKTKINKHIDSNSIMSASQNGCKSGSRGTKELLLIDMAISQQVRRSRKDLSTCWIDYRKAYDSVPHTWLMRVLELYKVDATLRTFLMSCMRTWRTVLRYPGCRSIQRNSEPIRIERGIFQGDSLSPLWFCLALNPLSTLLEDSGLGYRLRRGGQVISHLLYMDDLKLFAPNNSQLRELLKITETFSSSIRMEFGVDKCAVMHVKRGEIMESVGTQLTGSINLRALSASETYKYLGMSEALGINVTDMKQSLKERFFGRLKKVLNSLLSGGNKVRAFNGWVMPVLMYSFGILKWTQTELDALDQRVRTLLTANRLHHPRSSVMRLYIPRKCGGRGFLNAKTLHNREVCSLREYFLETDVGMHRDVVAADKGLTPLSLAKENWRKPVVLDTNDRLEVWKSKELHGRFFRALHGPDVDFQASVAWLRFGDLFGETEGFVFAIMDEVMMTNNYRRFIVKDGTVDICRACHRPGESIRHIISGCSRLANGEYLHRHNLVARIIHQQLALKYKLVESEVPYYRYMPDPVLENGHITLYWDRSIITDRTIVANKPDIVLVDRSERRAMIVDITIPHDENLVKAEKDKQIKYLDLAHEVVDMWEVDSAIIVPIVVTANGLIAKSLDQHLRRLSLGSWIKGLIQKAVLLDTARIVRKFLSLEP

SEQ ID NO: 13334 - protein, 868 aa, Sesamia nonagrioides
MRFVRRAFSGTDVSTRDYLLRVTERIDFLKQKIYAWANRIRRYRRRVERYSQNRNFQSDERWVYRAWERSDQGVTDTCLPDDDATRSFWRNIWSVPVSHTEGGWTRDVERACDPVPEMGAITICPQDVARAVRPLPNWKSPGPDGLHNFRIKWFSGSHACLASQFQTALESGSLPQFLTTGITHLLHKSGSTAEPKNYRPITCLPTVYKVLTSILKAKINTHIDSNSIMSASQNGCRNGSRGTKELLLIDMAISQQVRRSRKDLSTCWIDYKKAYDSVPHTWLMRVLELYKVDATLRTFLMTCMSQWRTVLRYPGCRNIQRNSEPIRIERGIFQGDSLSPLWFCLALNPLSTLLEDSGLGYRLRRGGQVISHLLYMDDLKLFAHTNSQLKELLKITETFSSAIRMEFGVDKCAVMHVQRGEIVESVGTQLTGSINLRSLSASETYKYLGMSEALGINVTDMKQSLKERFFGRLKKVLNSLLSGGNKVRAFNGWVMPVLMYSFGILKWTQTELDALDQRVRTLLTANRLHHPRSSVMRLYIPRKCGGRGFLNAKTLHNREVCSLREYFLKTDVGMHRDVVAVDKGLTPLSLAKENWRKPVVLETNDRMEVWQSKELHGRFFRALRGPDVDFQASVAWLRYGDLFGETEGFVCAIMDEVMMMNNYRKFIVKDGTVDICRACHRPGESIRHIISGCSRLANGEYLHRHNLVARIIHQQLALKYNLVESEVPYYRYMPDPVLENGHITLYWDRSIITDRTIVANKPDIVMVDRSERRAMIVDITIPHDENLVKAEKDKQIKYLDLAHEVVDMWEVDSAIIVPIVVTANGLIAKSLDQHLRRLSLGGWIKGLIQKAVLLDTARIVRKFLSLEP

SEQ ID NO: 13335 - protein, 962 aa, Sesamia nonagrioides
MHNRNRALMAALDAQLSNYFDTCEDLTDTHSILYCAAVAACRVAHVKFPSDSRATRPKPVVPAWQRRIERRIGGARALIGKLICFREGNTRPRVMRFVRRAFSGTNTSPQNYMARVTERIDFLKQKVYAWANRIRRYKRRVERYTQNRTFQSNERRVYRDWERSEQGVTDTCLPDDDAMCSFWRSIWSVPVSHTEGDWARDVERACDPIPEMGAITICPQDVACAVRPLPNWKSPGPDGLHNFWIKWFPRSHARLASQFQTALVSGSLPQFLTTGITHLLHKSGSTAEPKNYRPITCLPTVYKVLTSILKTKINKHIDSNSILSASQNGCRSGSRGTKELLLIDMAISQQVRRSRKDLSTCWIDYKKAYDSVPHTWLMRVLELYKVDATLRTFLMTCMRTWRTVLRYPGCRNIQRYSEPIRIERGIFQGDSLSPLWFCLALNPLSTLLEDSGLGYRLRRGGQVISHLLYMDDLKLFAPNNSQLNELLKITEIFSSSIRMEFGVDKCAVMHVKRGEIMEPVGTQLTSSINLRALSASETYKYLGMSEALGINVTDMKQSLKERFFGRLKKVLNSLLSGGNKVRAFNGWVMPVLMYSFGILKWTQTELDALDQRVRTLLTANRLHHPRSSVMRLYIPRKCGGRGFLNAKTLHNREICSLRDYFLETDVGMQRDVVAADKGLTPLSLANENWRKPVVLDTNDRMEVWKSKELHGRFFRALHGPDVDFQASVAWLRFGDLFGETEGFVFAIMDEVMMTNNYRRFIVKDGTVDICRACHRPGESIRHIISGCSRLANGEYLHRHNLVARIIHQQLALKYKLVESEVPYYRYMPDPVLENGHITLYWDRSIITDRTIIANKPDIVLVDRSERRAMIVDITIPHDENLVKAEKDKQTKYLDLAHEVVDMWEVDSAIIVPIVVTANGLIAKSLDQHLRRLSLGSWIKGLIQKAVLLDTARIVRKFLSLEP

SEQ ID NO: 13336 - protein, 1197 aa, Sesamia nonagrioides
MLTRSAARRARPPSPDSLLSSASPPPVSSPTVSAVTTPAATVASSSSDEYFSPPTTPPPVRRRGGRRPPDCLGPRGPSASDRVPAPGGSVQRMRWTQSINENVMRSYYGATEGGTNLTAYRVRMLSLFQVLEPAVNVSAQRLSDQVRVIQRNHMLDDTVLDRLRNEMQSSRVIAHQSQSAEIPPQPTNYADEGSNDRATNVSTQCNEELRNALEAAIREYRSISAELRPRLPRLPMHNRNWALMAALDAQLSNYFDTCEDLTDTHSILYCAAVAACRVAHVKFPTDSRATRPKPVVPAWQHRIERRIGGARALIGKLICFREGNTRPRVMRFVRRAFSGTNTSPQYYMARVTERIDFLKQKVYAWVNRIRRYKRRVERYTQNRTFQSNERRVYRDWERPEQGVTDTCLPDDDAMCSFWRSIWSVPVSHTEGDWARDVERACDPIPEMGTITICPQDVAHAVRPLPNWKSPGPDGLHNFWIKWFPRSHARLASQFQTALVSGSLPQFLTTGITHLLHKSGSTAEPKNYRPITCLPTVYKVLTSILKTKINKHIDSNSILSASQNGCRSGSRGAKELLLIDMAISQQVRRSRKDLSTCWIDYKKAYDSVPHTWLMRVLELYKVDATLRTFLMTCMRTWRTVLRYPGCRNIQRNSEPIRIERGIFQGDSLSPLWFCLALNPLSTLLEDSGLGYRLRRGGQVISHLLYMDDLKLFAPNNSQLNELLKITEIFSSSIRMEFGVDKCAVMHVKRGEIMEPVGTQLTSSINLRALSASETYKYLGMSEALGINVTDMKQSLKERFFGRLKKVLNSLLSGGNKVRAFNGWVMPVLMYSFGILKWTQTELDALDQRVRTLLTANRLHHPRSSVMRLYIPRKCGGRGFLNAKTLHNREICSLRDYFLETDMGMHRDVVAADKGLTPLSLAKENWRKPVVLDTNDRMEVWKSKELHGRFFRALHGPDVDFQASVAWLRFGDLFGETEGFVFAIMDEVMMTNNYRRFIVKDGTVDICRACHRPGESIRHIISGCSRLANGEYLHRHNLVARIIHQQLALKYKLVESEVPYYRYMPDPVLENGHITLYWDRSIITDRTIIANKPDIVLVDRSERRAMIVDITIPHDENLVKAEKDKQTKYLDLAHEVVDMWEVDSAIIVPIVVTANGLIAKSLDQHLRRLSLGSWIKGLIQKAVLLDTARIVRKFLSLEP

SEQ ID NO: 13337 - protein, 1197 aa, Sesamia nonagrioides
MLTRSAARRARPPSPDSLLSSASPPPASSATVSAVTTPAAAVASSSSDEYFSPPTTPPPARRRGGRRPPDRLGPRGPSASDRVPAPGGSVQRMRWTQSINENVMRSYYGATEGGNNLTAYRVRMLSLFQVLEPAVNVSAQRLSDQVRVIQRNHMLDDTVLDRLRNEMQSSRIIAHQSQTAEIPPQPTNYADEGSNDRATNVSTQCNEELINALENAIREYRFTPAELRPRLPRLPMHNRNRALMAALDAQLSDYFDTCEDLTDTHSILYCAAVAACRVAHVKFPSDSRATRPKPVVPAWQHRIERRIGGARALIGKLICFREGNTRPRVMRFVRRAFAGTNISPQNYMARVTERIDFLKQKVYAWANRIRRYKRRVERYTQNRTFQSNERWVYRVWERPEQGVTDTCLPDDDAMCSFWRNIWSVPVSHTEGDWARDVERACDPIPEMGAITICPQDVACAVRPLPNWKSPGPDGLHNFWIKWFPRSHARLASQFQTALVSGSLPQFLTTGITHLLHKSGSTAEPKNYRPITCLPTVYKVLTSILKTKINKHIDSNSIMSASQNGCKSGSRGTKELLLIDMAISQQVRRSRKDLSTCWIDYRKAYDSVPHTWLMRVLELYKVDATLRTFLMSCMRTWRTVLRYPGCRNIQRNSEPIRIERGIFQGDSLSPLWFCLALNPLSTLLEDSGLGYRLRRGGQVISHLLYMDDLKLFAPNNSQLRELLKITETFSSSIRMEFGVDKCAVMHVKRGEIMESVGTQLTDSINLRALSASETYKYLGMSEALGINVTDMKQSLKERFFGRLKKVLNSLLSGGNKVRAFNGWVMPVLMCSFGILKWTQTELDALDQRVRTLLTANRLHHPRSSVMRLYIPRKCGGRGFLNAKTLHNREVCSLRDYFLVTDVGMHRDVVAADKGLTPLSLAKENWRKPVVLDTNDRMEVWKSKELHGRFFRALHGPDVDFQASVAWLRFGDLFGETEGFVFAIMDEVMMTNNYRRFIVKDGTFDICRACHRPGESIRHIISGCSRLANGEYLHRHNLVARIIHQQLALKYNLVESEVPYYRYTPDPVLENGYITLYWDRSIITDRTIVANKPDIVMVDRSERRAMIVDITIPHDENLVKAEKDKQIKYLDLAHEVVDMWEVDSAIIVPIVVTANGLIAKSLDQHLRRLSLGSWIKGLIQKAVLLDTARIVRKFLSLEP

SEQ ID NO: 13338 - protein, 1200 aa, Sesamia nonagrioides
MLTRSAARRARSPPPDSSPSSASPPPVSSPTVNAVMTPAAAVALSSSDEYFSPPTTPPPVRRRGGRRPPDCLGPRGPPASDRAPATGGNVQRMKWTQSINEKVMRAYFGATEGGSNLTAYRGRMLSLFQVLEPAVNVSAQRLSDQVRVIQGNHMLDDVVLDRQRLESRNSHVTPASSLVAVQLNSVPSRPNLVDEEDDDEAISVTPQCNEKVRSALEDASREYRSTPPELRPRLPRLPMHKKNKALVCALDSQLSNYLKDSKDLADTHSILYCGAVAICRVAHVKFPDSDRATRPKPAVPAWQCRIERRIGETRALIGKLISFREGNTRPRVMRFVRRAFSGTDVSTRDYLLRVTERIDFLKQKIYAWANRIRRYRRRVERYSQNRNFQSDERWVYRAWERSDQGVTDTCLPDDDATRSFWRNIWSVPVSHTEGGWTRDVERACDPVPEMGAITICPQDVARAVRPLPNWKSPGPDGLYNFWIKWFSGSNACLASQFQTALESGSLPQFLTTGITHLLHKSGSTAEPKNYRPITCLPTVYKVLTSILKAKINTHIDSNSIMSASQNGCRNGSRGTKELLLIDMAISQQVRRSRKDLSTCWIDYKKAYDSVPHTWLMRVLELYKVDATLRTFLMTCMSQWRTVLRYPGCRNIQRNSEPIRIERGIFQGDSLSPLWFCLALNPLSTLLEDSGLGYRLRRGGQVISHLLYMDDLKLFAHTNSQLKELLKITETFSSAIRMEFGVDKCAVMHVQRGEIVESVGTQLTGSINLRSLSASETYKYLGMSEALGINVTDMKQSLKERFFGRLKKVLNSLLSGGNKVRAFNGWVMPVLMYSFGILKWTQTELDALDQRVRTLLTANRLHHPRSSVMRLYIPRKCGGRGFLNAKTLHNREVCSLREYFLKTDVGMHRDVVAVDKGLTPLSLAKENWRKPVVLETNDRMEVWQSKELHGRFFRALRGPDVDFQASVAWLRYGDLFGETEGFVCAIMDEVMMTNNYRKFIVKDGTVDICRACHRPGESIRHIISGCSRLANGEYLHRHNLVARIIHQQLALKYNLVESEVPYYRYMPDPVLENGHITLYWDRSIITDRTIVANKPDIVMVDRSERRAMIVDITIPHDENLVKAEKDKQIKYLDLAHEVVDMWEVDSAIIVPIVVTANGLIAKSLDQHLRRLSLGGWIKGLIQKAVLLDTARIVRKFLSLEP

SEQ ID NO: 13339 - protein, 868 aa, Apamea monoglypha
MRFVRRAFSGTDISSQDYLSHVTERIDFLKQKVYAWANRIRRYKRRVDRYTQNRAFQSDERWVYRGWERPDQGVADTCLPDDDAMYSFWRSIWSVPVSHTEGDWAREVERACDPIPEMEAITICAQDVARAVRPLPNWKSPGPDGLHNFWIKWFTRSHARLASQFQIALESGSLPQFLTTGVTHLLHKSASTAEPKNYRPITCLPTVYKVLTSILRAKINKHIDTNSIMPASQNGCKNGSRGTKELLLIDMAISQQVRRSRKDLSTCWIDYKKAYDSVPHTWLMRVLELYKVDTTLRTFLMTCMGQWRTVLRYPGCRNIQRNSEPIRIERGIFQGDSLSPLWFCLALNPLSTLLEDSGLGYRLRRGGQVISHLLYMDDLKLFAPNNLQLMELLKITETFSSAIRMEFGVDKCAVMHVKRGEIVESVGTQLSDSTNLRALSASETYKYLGMSEALGINVTDMKQSLKERFFGRLKKVLNSLLSGGNKVRAFNSWVMPVLMYSFGILKWTQTELDALDRRVRTLLTANRMHHPRSSVMRLYIPRKCGGRGFLNAKTLHNREICSLREYFLETDVGMHRDVVAVDKGLTPLSLAKENWRKPVVLDTNDRLEVWQSKELHGRFYRALHGPDVDLLASVAWLRFGDLFGETEGFVCAIMDEVMMTNNYRRFIVKDGTVDICRACHRPGESIRHIISGCSRLANGEYLHRHNLVARIIHQQLALKYSLVESEVPYYRYVPDPVLENGHITLYWDRSIITDRTIVANKPDIVVVDRSERRAMIVDITVPHDENLVKAEKDKQIKYLDLAREVVDMWDVDSAIIVPIVVTANGLIAKSLDQHLRRLSLGSWIKGLIQKAVLLDTARIVRRFLSLEP

SEQ ID NO: 13340 - protein, 1184 aa, Furcula furcula
MLTRSKAQQRPPDSSPCSASQPPAPSRDGTPPAAVASSESDEFFSPPSSPPPVRRRRGRPPRELGRLGHPAPNRVLTPGGVVRRKKWTSSIKEGVMRAYYEATEGGTNLTAYRDRMLSLFQVLEPAVNVSAQRLSDQVRAIQSGHMLDDTVLDRLRSVVQGGRVAPYISSQAVAPAVDTAPAPRLAANSDDNRDDTTTNVSTQYIDLLRSTLEDVVQEYRGMPQSLRPRLPRLPMHKRNRALVCTLDSLLSSYFDSSDLADAHSLLYCAAMTVCRVARVKLPNTDAATRPRPAVLAWQCRIERRIGEARVLIGKLTCFREGNTRPRVMRFVREYLSRITERIDFLKQKVCAWANRIRRYRARVDRYSQNNMFQRDQRWVYRSWERPSQIGGEVQRPDDGAMIRFWRNIWSVPVTHSEGDWIRDVKQVCESIPEMGAITIRPQDVADAVRPLPNWKAPGPDGLHNFWLKWLRSSHACLASLFQSAVDSGSLPEFLTTGITHLLHKTNSTADPKNYRPITCLPTVYKTLTSIRRAKIYRHVESNSIMSASQNGCRSGARGTKELLLIDMAICQQARRNRKDLSTCWIDYKKAYDSVPHTWLMRVLELYKVNTTLRTFLASCMGQWRTVLLYPGSRQTLGDGDPIRIERGIFQGDSLSPLWFWLALNPLSTLLKSSGLGCRLRRGGQVISHLLYMDDLKLFAPTELQLMGLLKVTETFSNSIRMEFGVDKYAVMHVKQGRMVESRSVQLSDSTDLRILSATETYKYLGMSQALNINETDMKQSLRERFLGRLRKVLKSLLSGGNKVRAYNGWVMPVLMYSFGILKWTQTELDTLDRTVRTLLTTYRMHHPRSSVMRLYIPRKCGGRGFLNAKTLHNREIYNLREYFLQCGGEMHTDVVAVDNGLTPLSLAKGNWHKPVVLTTGDREAVWQCKELHGRFYRVLHGPDVDLSASVAWLRFGDLFGETEGFVCAIMDEVVMTNNYRKYILRDGTIDICRACHRPGESLRHIISGCSRLANGEYLHRHNQVARIIHQQLALKYRLVTSEVPYYRYVPEPVLEDGHITLYWDRSIITDRTIVANRPDIVLIDRTERRAMIVDVTVPHDENLVKAEKDKECKYLDLAHEVVDMWDIDRAVIVPIVVSAHGLMAKSLDKHLKRLALDGWIKGQMQKAVLLETARIVRKFLSLEP

SEQ ID NO: 13341 - protein, 1196 aa, Furcula furcula
MLTRNKARMRPPGSPPRSASQSSRLNAEADGTPAAVASSESDEYFSPPTSPPPVCRRRGRPPRDMGRLGQPAPNRVLAPGGVVRRMKWTSSINESVMRAYYEATEGGTNLTAYRNRMLSLFQALEPAVNVSAQRLSDQVRAIQRGHMLDGPVLDRLRSEVQGSRVAPCIPSSQAVAPVVNTALVPRLAANSDDDRDDMTTDVSTNVSTQLRSTLEDVVREYRTMPQSLRPRLPRLPMHRRNRALVCALDSLLSSYFDSSEDLADAHALLYCAAITACRVARVKFPDAATRPKPAVPAWQCRIERRIGEARVLIGKLTCFREGNTRPRVMRFVRRAFSGTGIDPREYLSRVTERIDFLKQKVCAWANRVRRYRARVDRYSQNNMFQRDQRWVYSSWERPSQTVGEVQRPDDDAMIRFWRNIWSVPVAHSEGDWIGDVEEVCEPLPEMGPITIGPQDVADAVRPLPNWKAPGPDGLHNFWLKWLPSSHVCLASLFQSALESGSLPEFMTTGIIHLLHKTDSTTNPKNYRPITCLPTVYKTLTSILRAKIYRHVEDNSIMSSSQNGCRSGARGTKELLLIDMAICQQARRNHKDLSTCWIDYKKAFDSVPHTWLMRVLELYKVNTTLRTFLASCMRQWRTVLLYPGSRQTLGNGDPIRIERGIFQGDSLSPLWFCLALNPLSTLLKSSGLGCRLRRGGQVISHLLYMDDLKLFAPTELQLTGLLKVTETFSNSIRMEFGVDKCAVMHVKRGRMVESRSVQLSDSTDLRTLSATETYKYLGMSQALNINETDMKQSLRERFLGRLRKVLKSLLSGGNKVRAYNGWVMPVLMYSFGILKWTQTELDALDRTVRTLLTTYRVHHPRSSVMRLYIPRKRGGRGFLNAKTLHNREIYNLREYFLHCGGEMHTDVVAVDNGLTPLSLAKGNWRKPVVLTTGDREAVWQSKELHGRFYRALHGPDVDFSASVAWLRFGDLFGETEGFVCAIMDEVVMTNNYRKYILRDGTIDICRACHRPGESLRHIISGCSRLANGEYLHRHNQVARIIHQQLALKYRLVTSEVPYYRYVPEPVLEDGHITLYWDRSIITDRTIVANKPDIVLIDRTERRAMIVDVTVPHDENLVKAEKDKQCKYLDLAHEVVDMWDIDNAIIVPIVVSAHGLMAKSLDKHLKRLTLDGWIKGQMQKAVLLETARIVRKFLSLEP

SEQ ID NO: 13342 - protein, 1196 aa, Furcula furcula
MLTRHKARLRPPDSSPRSASQPPAPSTGGAPAAVASSESDEYFSPPSSPPPVCRQRGRPPRNLGLLGQPAPNRVPVPGGVVRRMKWTPSINENVMRAYYKATEGGTNLTVYRDRMLSLFQTLEPAVNVSAQRLSDQVRAIQRGHMLDDAVLDRLRSEVQGGRVVACIPSSQAVAPAVNTAPAPRLAANSGDDRDDMSTNISTNVSTQLRSTLEDVVREYRTMPQGLRPRLPRLPMHKRNRALVCALDSLLSSYFDSSEDLADAHSLLYCAAMTACRVARVKFPNSDAATRPRPAVPAWQCRIERRIGEARVLIGKLTCFREGNTRPRVMRFVRCAFSGTGIDPREYLSRVTERIDFLKQKVCAWANRIRRYRARVDRYSQNNMFQRDQRWVYRSWERPSQIGGEVLRPDDDAMIRFWRNIWSVPVTHSEGDWIGDVRQVCEPIPEMGAITIRPQDVADAVRPLPNWKAPGPDGLHNFWLKWLRSSHACLASLFQSAVESGSLPEFLTTGITHLLHKTNSTADPKNYRPITCLPTVYKTLTSILRAKIYRHVESNSIMSASQNGCRSGARGTKELLLIDMAICQQARRNRKDLSTCWIDYKKAYDSVPHTWLMRVLELYKVNTTLRTFLASCMRQWRTVLLYPGSRQTLGDGEPIRIERGIFQGDSLSPLWFCLALNPLSTLLKSSGLGYRLRRGGQVISHLLYMDDLKLFAPTEVQLMGLLKVTETFSSSIRMEFGVDKCAVMHVKRGRLVESRSVQLSDSTDLRTLSATETYKYLGMSQALGINETDMKQSLRERFLGRLRKVLKSLLSGGNRVRAYNGWVMPVLMYSFGILKWTQTELDTLDRTVRTLLTAYRMHHPRSSVMRLYIPRKCGGRGFLNAKTLHNREIYNLREYFLHCGGEMHTDVVAVDSGLTPLSLAKGNWRKPVVHTTGDRETVWQSKELHGRFYRALHGPDVDFSASVAWLRFGDLFGETEGSVCAIMDEVVMTNNYRKYILRDGTIDICRACHRPGESLRHIISGCSRLANGEYLHRHNQVARIIHQQLALKYRLVMSEVPYYRYVPEPVLEDGHITLYWDRSIITDRTIVANRPDIVLIDRTERRAMIVDVTVPHDENLVKAEKDKECKYLDLAHEVVDLWDIDKAIIVPIVVSAHGLMAKSLDKHLKRLTLDGWIKGQMQKAVLLETARIVRKFLSLEP

SEQ ID NO: 13343 - protein, 1202 aa, Spodoptera exigua
MLTRAAARRARPLPPASSLSSASPPPGSSLTVSEETPAVAAALSSSDEYYSPPTTPPPTRRRGGRRPPAGLGPRGPSASDRVPAAGGSVQRMRWTQPINENVMRAYYGATEGGNNLTAYRVRMLSLFQVLEPAINVSAQRLSDQVRVIQRNRMLDNTVLDRLRTEMGSCAGASSSRTVAPAMMPPSNRGIVSTAADEESTDTVTHVSTQCNDELRSALECAIREYRYMSPEIRPRLPRLPMHNKNRVLVAALDSQLSNHFDDCEDLSDTHSMMYCAAVAACRVAHVKFPTSDVATRLKPAVPAWQRRIERRIAGARALIGKLICFREGNTRPRVMRFVRRAFSGTDISPQDYMSRVTERIDFLKQKVYAWANRIRRYKRRVQRYTQNRTFRSNERWVYRAWERPDQGVTDTRLPDDDAMCSFWRSIWSVPVSHTEGDWIREVKRACDPIPQMGAINISPQDVARAVRPLPNWKSPGPDGLHNFWIKWFTRSHARLASQFQAALESGSLPQFLTTGVTHLLHKSGSTTEPKNYRPITCLPTVYKVLTSILRSKINSHIDKNNIMSTAQNGCKSGSRGTKELLLIDMTISQQVRRSRKDLSTCWIDYKKAYDSVPHTWLMRVLELYKIDTKLRTFLMSCMRQWSTVLRYPGCRHIQTNSETVRIERGIFQGDSLSPLWFCLALNPLSTLLENSGLGYRLKRGGQVISHLLYMDDLKLFAPNRLQLMELLKLTETFSSAIRMEFGVDKCAVMHVKRGEIVESVGTQLTDSINLRSLSPTETYKYLGMSEALGINVTDMKQSLRERFFGRLKKVFNSFLSGGNKVRAFNDWVMPVLMYSFGVLKWSQTELDTLDRRVRTMLTAYRMHHPRSSVMRLYIPRKCGGRGFLNAKTLHNREVCSLREYFLAADVGMHRDVVAVDKGLTPLSLASENWRKPVVLDTNARREVWQSKELHGRFFRALHGPDVDQLASVSWLRSGDLFGETEGFVCAIMDEVIMTNNYRRFIVKDGTADICRACHRPGESIRHIISGCSRLANGEYLHRHNLVARIIHQQLALKYSLVGSEVPYYRYEPDPVLENGHITLYWDRSIITDRTIVANKPDIVVVDRNERRAMIVDIAVPHDENLVKAEKDKLIKYIDLAREFVDMWDVDSAVIVPIVVSANGLIAKSLDQHLRRLSLGGWIKGLIQKVVLLDTARIVRRFLSLEP

SEQ ID NO: 13344 - protein, 1200 aa, Mamestra configurata
MLTRSRARAQTAQPTSSGSSLSSASQPPGPAPAVSPEIPVAAVASSSSDEYFSPPTTPPPTRRRGRGRPPTSLGPRGPTASDRVPAIGGSVQRMRWTQTINENVMRSYYGATEGGTNLTAYRGRMLSLFQVLEPAVNVSAQRLSDQVRVILRNRMLDDAVLDRLRLESRSGRVSPTSPPAAVQIQSSVSPRPNNVGEDDDDGAISVSTQCNERLRSALEDAFREYRTTPPELRPRLPRLPMHNKNRALVCALDSQLTNCFDSSEDLTDTHSILYCAAAAACRVAHVKFPNSDRATRPAVPAWQCRIERRIGEARALIGKLICFREGNTRRRVMRFVRRAFSGTDTSPRDYLTRVTERIDFLKQKIYAWANRIRRYKRRVERYTQNRTFQSNERWVYRAWERPDQGVTDTRLPDDDVMCSFWRNIWSVPVSHTEGDWTREVERACDPIPEMGAITISPQDVARAVRPLPNWKSPGPDGLHNFWIKWFKRSHARLASQFQSALESGSLPQFLTTGITHLLHKSGSTAEPKNYRPITCLPTVYKVLTSILRAKINHHIETNSIMSASQNGCRNRSRGTKELLLIDVAISQQVRRSRRDLSTCWIDYKKAYDSVPHTWLMRVLELYKVDAVLRTFLMSCMGQWRTVLRYPGCRQIQANSDPIRIERGIFQGDSLSPLWFCLALNPLSTLLEGSGQGYRLRRGGQVISHLLYMDDLKLFAPNNLQLMKLLKVTETFSSAISMEFGVDKCAVMHVKRGEIMESVGTQLSDSIHLRSLSSTETYKYLGMSEALGINANDVKQSLKERFFGRLNKVLNSLLSGGNKVRAFNGWVMPVLMYSFGILKWTQTELDALDRRVRSLLTANRMHHPRSSVMRLYIPRKCGGRGFLNAKTLHNREICSLREFFLEADVGMHRDVVAVDKGLTALSLANENWRKPVVLDTNDRREVWQSKELHGRFYRVLHGPDVDFLASVAWLRFGDLFGETEGFVCAIMDEVMMTNNYRKYIVKDGTVDICRACHRPGESIRHIISGCSSLANGDYLHRHNLVARIIHQQLALKYNLVESEVPYYRYVPDPVLENGNCTLYWDRSIITDRTIIANKPDIVVIDRLERRAMIVDIAVPHDVNLVKTEKDKQTKYLDLAREVVDMWDVNTAVIVPIVVTANGIIAKSLDQHLKRLSLGGWIKGLIQKAVLLDTARIVRRFLTQGP

SEQ ID NO: 13345 - protein, 1200 aa, Mamestra configurata
MLTRSRARAQTAQPTSSGSSLSSASQPPGPAPAVSPEIPVAAVASSSSDEYFSPPTTPPPTRRRGRGRPPTSLGPRGPTASDRVPAIGGSVQRMRWTQTINENVMRSYYGATEGGTNLTAYRGRMLSLFQVLEPAVNVSAQRLSDQVRVILRNRMLDDAVLDRLRLESRSGRVSPTSPPAAVQIQSSVSPRPNNVGEDDDDGAISVSTQCNERLRSALEDAFREYRSTPPELRPRLPRLPMHNKNRALVCALDSQLTNCFDSSEDLADTHSILYCAAAAACRVAHVKFPNSDRATRPAVPAWQCRIERRIGEARALIGKLICFREGNTRRRVMRFVRRAFSGTDTSPRDYLTRVTERIDFLKQKIYAWANRIRRYKRRVERYTQNRTFQSNERWVYRAWERPDQGVTDTRLPDDDVMCSFWRNIWSVPVSHTEGDWTREVERACDPIPEMGAITISPQDVARAVRPLPNWKSPGPDGLHNFWIKWFKRSHARLASQFQSALESGSLPQFLTTGITHLLHKSGSTAEPKNYRPITCLPTVYKVLTSILRAKINHHIETNSIMSASQNGCRNGSRGTKELLLIDVAISQQVRRSRRDLSTCWIDYKKAYDSVPHTWLMRVLELYKVDAVLRTFLMSCMGQWRTVLRYPGCRQIQANSDPIRIERGIFQGDSLSPLWFCLALNPLSTLLEGSGQGYRLKRGGQVISHLLYMDDLKLFAPNNLQLMKLLKVTETFSSAISMEFGVDKCAVMHVKRGEIMESVGTQLSDSINLRSLSSTETYKYLGMSEALGINAADVKQSLKERFFGRLNKVLNSLLSGGNKVRAFNGWVMPVLMYSFGILKWTQTELDALDRRVRSLLTANRMHHPRSSVMRLYIPRKCGGRGFLNAKTLHNREICSLREFFLEADVGMHRDVVAVDKGLTALSLANENWRKPVVLDTNDRREVWQSKELHGRFYRVLHGPDVDFLASVAWLRFGDLFGETEGFVCAIMDEVMMTNNYRKYIVKDGTVDICRACHRPGESIRHIISGCSSLANGDYLHRHNLVARIIHQQLALKYNLVESEVPYYRYVPDPVLENGNCTLYWDRSIITDRTIVANKPDIVVIDRLERRAMIVDIAVPHDENLVKTEKDKQTKYLDLAREVVDMWDVNTAVIVPIVVTANGIIAKSLDQHLKRLSLGSWIKGLIQKAVLLDTARIVRRFLSQGP

SEQ ID NO: 13346 - protein, 962 aa, Amphipyra berbera
MNKKNRALMCALDSLLSSYFDNSESLEDTHSILYCAAVAACRVAHAKFDNNDRATRPKPAVPAWQCRIERRINEARALIGKLICFREGNTRPRVMRFVRRAFSGTDINPRDYLSRVTERIDFLKQKVYAWANRIRRYRRRVERYTQNRMFHSDERWVYRTCERPDHDVSDTHLPDNDVMNTFWRNIWSMPVTHIEGDWMQEVQRACEPIEEMGDITIVPQDVTSAVRPMANWKSPGPDGLHNFWLKWLRSSHARLASQFQSSLESGSFPEFLTTGVTHLLHKSGSTAEPKNYRPITCLPTVYKLLTSILRAKINSHIINNSIMSVSQNGCKNGSRGTKELLLIDMAISQQVRRSRKDLSTCWIDYKKAYDSVPHTWLMRVLELYKVNTTLCAFLTSCMGQWRTVLHYPGCRQIQGRGEPIRIERGIFQGDSLSPLWFCLALNPLSTLLEGSGLGYRLRRGGQVISHLLYMDDLKLFAPNNLQLVKLLKVTETFSNSIRMEFGVDKCAVMHVKRGGIMESVGTQLSDSIHLRSLSSTETYKYLGMSEALGINETDMKQSLRERFYGRLKKVLKSLLSGGNKVRAFNGWVMPVLMYSFGILKWTQTELDALDRRVRTLLTAYRMHHPRSSVMRLYIPRKCGGRGFLNAKTLHNREVCSLREYFLQADVGMHRDVVAVDKGFTPLSLAKENWRNPVVLDTNGRREVWQSKELHGRFYRALHGPDVDFLASVAWLRFGDLFGETEGFVCAIMDEVMMTNNYRKYIVKDGTVDICRACHCPGESIRHIISGCSRLANGEYLHRHNLVARIIHQQLALKYNLVDAEVPYYKYVPDPVLENGHITLYWDRSIITDRTIVANKPDIVVIDRSERLAMIVDITVPHDENLVKAEKDKEIKYQDLAHEVVDMWEVDSAVIVPIVVTANGLIAKSLDQHLTRLALGSWIKGLIQKAVLLDTARIVRKFLSLRP

SEQ ID NO: 13347 - protein, 1209 aa, Amphipyra berbera
MLTRSRAKALTETTRPRSSAPSLSSASQPPDSSIVSDVTPAAAVASSSSDEYFSPPTSPPPARRRGRGRPPDSLRPRGPLASDRVPAAGGSVQRMRWTPTMNENCMRAYFGATEGGTNLTAYRGRMLSLFQVLEPTVNVSAQRLSDQVRVIQRDHRLTDAALDRLRSEVQSNAIISLQSQTAAQPRTPTVVPPLPTHGNEESDDRVTNVSTQCNEQLRSALELAIQEYRFTPPNSNTNAKPRIPRLPMHRKNRALMCALDSLLSSYFDNSENLEDTHSILYCAAVAACRVAHAKFDNSDKATRPKRAVPAWQCRIERRISEARALIGKLICFREGNTRPRVMRFVRRAFSGTDINPRDYMSRVTERIDFLKQKVYAWANRIRRYKRRVERYTQNRMFHSDERWVYRTWERPDHDVNDTHPPDNDVMNTFWRNIWSMPVTHTEGDWMQEVQRACEPIEEMGDITIVPQDVTSAVRPMANWKSPGPDGLHNFWIKWLRSSHARLASQFQSSLESGSLPEFLTTGVTHLLHKSGSTAEPKNYRPITCLPTVYKLLTSILRAKINSHIINNSIMSVSQNGCKNGSRGTKELLLIDMAISQQVRRSRKDLSTCWIDYKKAYDSVPHTWLMRVLELYKVNTTLCAFLTSCMGQWRTVLHYPGCRQIQGRGEPIRIERGIFQGDSLSPLWFCLALNPLSTLLEGSGLGYRLRRGGQVISHLLYMDDLKLFAPNNLQLMKLLKVTETFSNSIRMEFGVDKCAVMHVKRGGIMESVGTQLSDSIHLRSLSSTETYKYLGMSEALGIHETDMKQSLRERFYGRLKKVLKSLLSGGNKVRAFNGWVMPVLMYSFGILKWTQTELDALDRRVRTLLTAYRMHHPRSSVMRLYIPRKCGGRGFLNAKTLHNREVCSLREYFLQADVGMHRDVVAVDKGFTPLSLAKENWRKPVVLDTNGRREVWQSKELHGRFYRALHGPDVDFLASVAWLRFGDLFGETEGFVCAIMDEVILTNNYRKYIVKDGTVDICRACHCPGESIRHIISGCSRLANGEYLHRHNLVARIIHQQLALKYNLVDAEVPYYKYVPDPVLENGHITLYWDRSIITDRTIVANKPDIVVIDRSERLAMIVDITVPHDENLVKAEKDKEIKYQDLAHEVVDMWEVDSAVIVPIVVTANGLIAKSLDQHLTRLALGSWIKGLMQKAVLLDTARIVRKFLSLRP

SEQ ID NO: 13348 - protein, 1210 aa, Amphipyra berbera
MTAMLTRSRAKAITQSTRPRSSAPSLSSASQPPDSSIVSDVTPAAAVASSSSDEFFSPPTSPLPPPARRRGRGRPPASIGPRGPPASDRVPAPGGSVQRMRWTLTMNENCMRAYFGATEGGTNLTAYRGRMLSLFQVLEPTVNVSAQRLSDQVRVIQRDHRLTDAALDRLRSEVQSNRIISLQSQTAAQPQAPTVVPPLPIHADEESDDRVTNVSTQCNDQLRSALELAIREYRFTPPNIRPRIPRLPMHRKNRALMCALDSLLSSYFDNSENLEDTHSILYCAAVAACRVAHAKFDNNDRATRPKPAVPAWQCRIERRINEARALIGKLICFREGNTRPRVMRFVRRAFSGTDINPRDYLSRVTERIDFLKQKVYAWANRIRRYKRRVERYTQNRMFHSDERWVYRTWERPDHDVSDTHLPDNDVMNTFWRNIWSMPVTHIEGDWMQEVQRACEPIEEMGDITIVPQDVTNAVRPMANWKSPGPDGLHNFWLKWLRSSHARLASQFQSSLESGSFPEFLTTGVTHLLHKSGSTAEPKNYRPITCLPTVYKLLTSILRAKINSHMINNSIMSVSQNGCKNGSRGTKELLLIDMAISQQVRRSRKDLSTCWIDYKKAYDSVPHTWLMRVLELYKVNTTLCAFLASCMGQWRTVLHYPGCRQIQGRGEPIRIERGIFQGDSLSPLWFCLALNPLSTLLEGSGLGYRLRRGGQVISHLLYMDDLKLFAPNNLQLVKLLKVTETFSNSIRMEFGVDKCAVMHVKRGGIMESVGTQLSDSIHLRSLSSTETYKYLGMSEALGINETDMKQSLRERFYGRLKKVLKSLLSGGNKVRAFNGWVMPVLMYSFGILKWTQTELDALDRRVRTLLTAYRMHHPRSSVMRLYIPRKCGGRGFLNAKTLHNREVCSLREYFLHADVGMHRDVVAVDKGFTPLSLAKENWRKPVVLDTNGRREVWQSKELHGRFYRALHGPDVDFLASVAWLRFGDLFGETEGFVCAIMDEVILTNNYRKYIVKDGTVDICRACHCPGESIRHIISGCSRLANGEYLHRHNLVARIIHQQLALKYNLVDAEVPYYKYVPDPVLENGHITLYWDRSIITDRTIVANKPDIVVIDRSERLAMIVDITVPHDENLVKAEKDKEIKYQDLAHEVVDMWEVDSAVIVPIVVTANGLIAKSLDQHLTRLALGSWIKGLIQKAVLLDTARIVRKFLSLRP

SEQ ID NO: 13349 - protein, 1197 aa, Noctua janthe
MLTRSATRRARLSPPDPSLSSASPPPESSPIVSAVTPAVAVASSSSDEYFSPPTTPPPVRRRGGRRPPDGLGPRGPPASDRVPAPGGSVPRMRWTQSINANVMRAYYGATEGGNNLTAYRVRMLSLFQVLEPAVNVSAQRLSDQVRVIQRNGMLDDTVLDRLRTEMQSSHVIATPPQTVVPPQSTIIPTHDNNVSNDMVTNVSTQCNEEMRCALEGAIREYRFMQPDLRPRVPRLPMHNKNKVLVAVLDSQLSNYFDNCENLTDAHSVLYCAAVAACRVAHVKFSDDRATRPNPAVPSWQYRIERRIGEARALIGKLICFREGNTRPRVMRFVRRAFSGIDISARDYMSRVTERIDFLKQKVYAWANRIRRYKRRVDRYTQNRTFQRDERWVYRAWERPDQGVADTHLPDDDAMCSFWRSIWSVPVSHTEGEWTREVERACDLVPEMGAITISPQDVVRAVRPLPNWKSPGPDGLHNFWIKWFTRSHARLAILFQSALESGSLPEFLTTGITHLLHKSGSTAEPKNYRPIACLPTVYKVLTSILRAKINKHIDDNSVMSASQNGCRNGSRGTKELLLIDMAISQQVRRSRRDLSTCWIDYKKAYDSVPHTWLMRVLELYKVDSTLRIFLMSCMGQWRTVLRYPGCRQIQRNSEPIRIERGIFQGDSLSPLWFCLALNPLSTLLEDSGLGYRLRRGGQVISHLLYMDDLKLFAPNDLQLMELLKVTETFSSAIRMEFGVDKCAVMHVKRGEIVESVGTQLSDSINLRSLSATETYKYLGMSEALGINVADMKQSLKERFFGRLKKVFNSLLSGGNKVRAFNGWVMPVLMYSFGILKWTQTELDALDRRVRTLLTTYRMHHPRSSVMRLYIPRRCGGRGFLNAKTLHNREIYSLREYFLETDVGMHRDVVAVDKGLTPLSLAKENWRKPVVLDTNDRMEVWQSKELHGRFFRALHGPDVDLPASVAWLRSGDLFGETEGFVCAIMDEVMMTNNYRRFIVKDGTVDICRACHRPGESIRHIISGCSRLANGEYLHRHNLVARIIHQQLALKYNLVESEVPYYKYVPDPVLENGNITLYWDRSIVTDRTIVANKPDIVVVDRSERRAMIVDITVPHDGNLVKAEKDKQIKYLDLAHEVVDMWDVDSAIIVPIVVSAHGLIAKSLDQYLRRLSLGSWIKGLIQKAVLLDTARIVRRFLSLEP

SEQ ID NO: 13350 - protein, 1197 aa, Noctua janthe
MLTRSATRRARLSPPDPSLSSASPPPESSPIVSAVTPAVAVASSSSDEYFSPPTTPPPVRRRGGRRPPDGLGPRGPPASDRVPAPGGSVPRMRWTQSINANVMRAYYGATEGGNNLTAYRVRMLSLFQVLEPAVNVSAQRLSDQVRVIQRNGMLDDTVLDRLRTEMQSSHVIATPPQTVVPPQSTIIPTHDNNVSNDMVTNVSTQCNEEMRCALEGAIREYRFMQPDLRPRVPRLPMHNKNKVLVAVLDSQLSNYFDNCENLTDAHSVLYCAAVAACRVAHVKFSDDRATRPKPAVPSWQYRIERRIGEARALIGKLICFREGNTRPRVMRFVRRAFSGTDISARDYMSRVTERIDFLKQKVYAWASRIRRYKRRVDRYTQNRTFQRDERWVYRAWERPDQGVADTRLPDDDAMCSFWRSIWSVPVSHTEGEWTREVERACDLVPEMGAITISPQDVVRAVRPLPNWKSPGPDGLHNFWIKWFTRSHARLAILFQSALESGSLPEFLTTGITHLLHKSGSTAEPKNYRPIACLPTVYKVLTSILRAKINKHIDDNSVMSASQNGCRNGSRGTKELLLIDMAISQQVRRSRRDLSTCWIDYKKAYDSVPHTWLMRVLELYKVDSTLRIFLMSCMGQWRTVLRYPGCRQIQRNSEPIRIERGIFQGDSLSPLWFCLALNPLSTLLEDSGLGYRLRRGGQVISHLLYMDDLKLFAPNDLQLMELLKVTETFSSAIRMEFGVDKCAVMHVKRGEIVESVGTQLSDSINLRSLSATETYKYLGMSEALGINVADMKQSLKERFFGRLKKVFNSLLSGGNKVRAFNGWVMPVLMYSFGILKWTQTELDALDRRVRTLLTTYRMHHPRSSVMRLYIPRRCGGRGFLNAKTLHNREICSLREYFLETDVGMHRDVVAVDKGLTPLSLAKENWRKPVVLDTNDRMEVWQSKELHGRFFRALHGPDVDLPASVAWLRSGDLFGETEGFVCAIMDEVMMTNNYRRFIVKDGTVDICRACHRPGESIRHIISGCSRLANGEYLHRHNLVARIIHQQLALKYNLVESEVPYYKYVPDPVLENGNITLYWDRSIVTDRTIVANKPDIVVVDRSERRAMIVDITVPHDGNLVKAEKDKQIKYLDLAHEVVDMWDVDSAIIVPIVVSAHGLIAKSLDQYLRRLSLGSWIKGLIQKAVLLDTARIVRRFLSLEP

SEQ ID NO: 13351 - protein, 1197 aa, Noctua janthe
MLTRSAARRARLSPPDPSLSSASPPPESRPVVSAVTPAVAVASSSSDEYFSPPTTPPPVRRRRGHRPPDGLGPRGPSASDRVPAPGGSVPRMRWTQSINANVMRAYYGATEGGNNLTAYRVRMLSLFQVLEPAVNVSAQRLSDQVRVIQRNGMLDDTVLDRLRTEMQSSHVIATPPQTVVPPQSTIIPTHDNNVSNDMVTNVSTQCNEEMRCALEGAIREYRFMQPDLRPRVPRLPMHNKNRVLVAVLDSQLSNYFDNCEDLTDAHSVLYCAAVAACRVAHVKFSDDRATRTKPAVPSWQYRIERHIGEARALIGKLICFREGNTRPRVMRFVRRAFSGTDISPRDYMSRVTERIDFLKQKVYAWANRIRRYKRRVDRYTQNRTFQRDERWVYRAWERPDQGVADTRLPDDDAMCSFWRSIWSVPVSHTEGEWTREVERACDLVPEMGAITISPQDIVRAVRPLPNWKSPGPDGLHNFWIKWFTRSHARLAILFQSALESGSLPEFLTTGITHLLHKSGSTAEPKNYRPITCLPTVYKVLTSILRAKINKHIDDNSVMSASQNGCRNGSRGTKELLLIDMAISQQVRRSRRDLSTCWIDYKKAYDSVPHTWLMRVLELYKVDSTLRIFLMSCMGQWRTVLRYPGCRQIQRNSEPIRIERGIFQGDSLSPLWFCLALNPLSTLLEDSGLGYRLRRGGQVISHLLYMDDLKLFAPNDLQLMELLKVTETFSSAIRMEFGVDKCAVMHVKRGEIVESVGTQLSDSINLRSLSATETYKYLGMSEALGINVADMKQSLKERFFGRLKKVFNSLLSGGNKVRAFNGWVMPVLMYSFGILKWTQTELDALDRRVRTLLTAYRMHHPRSSVMRLYIPRRCGGRGFLNAKTLHNREICSLREYFLETDVGMHRDVVAVDKGLTPLSLAKENWRKPVVLDTNDRMEVWQSKELHGRFFRALHGPDVDLPASVAWLRSGDLFGETEGFVCAIMDEVMMTNNYRRFIVKDGTVDICRACHRPGESIRHIISGCSRLANGEYLHRHNLVARIIHQQLALKYNLVESEVPYYKYVPDPVLENGSITLYWDRSIVTDRTIVANKPDIVVVDRSERRAMIVDITVPHDGNLVKAEKDKQIKYLDLAHEVVDMWDVDSAIIVPIVVSAHGLIAKSLDQYLRRLSLGSWIKGLIQKAVLLDTARIVRRFLSLEP

SEQ ID NO: 13352 - protein, 1197 aa, Noctua janthe
MLTRSAARRARLSPPDPSLSSASPPPESRPVVSAVTPAVAVASSSSDEYFSPPTTPPPVRRRGGRRPPDGLGPRGPPASDRVPAPGGSVPRMRWTQSINANVMRAYYGATEGGNNLTAYRVRMLSLFQVLEPAVNVSAQRLSDQVRVIQRNGMLDDTVLDRLRTEMQSSHVIATPPQTVVPPQSTIIPTHDNNVSNDMVTNVSTQCNEEMRCALEGAIREYRFMQPDLRPRVPRLPMHNKNRVLVAVLDSQLSNYFDNCEDLTDAHSVLYCAAVAACRVAHVKFSDDRATRPKPAVPSWQYRIERRIGEARALIGKLICFREGNTRPRVMRFVRRAFSGTDISARDYMSRVTERIDFLKQKVYAWANRIRRYKRRVDRYTQNRTFQRDERWVYRAWERPDQGVADTRLPDDDAMCSFWRSIWSVPVSHTEGEWTREVERACDLVPEMRAITISPQDVVRAVRPLPNWKSPGPDGLHNFWIKWFTRSHARLAILFQSALESGSLPEFLTTGITHLLHKSGSTAEPKNYRPITCLPTVYKVLTSILRAKINKHIDDNSVMSASQNGCRNGSRGTKELLLIDMAISQQVRRSRRDMSTCWIDYKKAYDSVPHTWLMRVLELYKVDSTLRIFLMSCMGQWRTVLRYPGCRQIQRNSEPIRIERGIFQGDSLSPLWFCLALNPLSTLLEDSGLGYRLRRGGQVISHLLYMDDLKLFAPNDFRLMELLKVTETFSSAIRMEFGVDKCAVMHVKRGEIVESVGTQHSDSINLRSLSATETYKYLGMSEALGINVADMKQSLKERFFGRLKKVFNSLLSGGNKVRAFNGWVMPVLMYSFGILKWTQTELDALDRRVRTLLTAYRMHHPRSSVMRLYIPRRCGVRGFLNAKTLHNREICSLREYFLETDVGMHRDVVAVDKGLTPLSLAKENWRKPVVLDTNDRMEVWQSKELHGRFFRALHGPDVDLPASVAWLRSGDLFGETEGFVCAIMDEVMMTNNYRRFIVKDGTVDICRACHRPGESIRHIISGCSRLANGEYLHRHNLVARIIHQQLALKYNLVESEVPYYKYVPDPVLENGSITLYWDRSIITDRTIVANKPDIVVVDRSERRAMIVDITVPHDENLVKAEKDKQIKYLDLAHEVVDMWDVDSAIIVPIVVSAHGLIAKSLDQYLRRLSLGSWIKGLIQKAVLLDTARIVRRFLSLEP

SEQ ID NO: 13353 - protein, 1197 aa, Noctua janthe
MLKRSATRRARLSPPDPSLISALPPPESSPVVSAVTPAVAVASSSSDEYFSPPMTPPPVRRRVGRRPPDGLGPRGPPASDRVPAPVGSVQRMRWTQSINKNVMRSCYGATEGGNNLTAYRVRMLSLFQVLEPAVNVSAQRLSDQVRVIQRNRMLDDTVLDRLRTEMQSSHVITPSVQAVVLPQSSTISNRANDVSNDMVTNVSTQCNEEMRSALEGTIRGYRFMQPDLRPRISRLPMHNKNRALVAVLDSQLSNYFDNCEDLTDAHSILYCAAVAACRVAHVNFSDDKATRPKPAVPAWQYRIERRTGGARALIGKLICFREGNTRPRVMRFVRRAFSGTDISPRDYVSRVTERIDFLKQKVYAWANRIRRYKRRVDRYTQNRTFQRDERWVYRAWERPDQGVADTRLPDDDTMCSFWRSIWSVPVSHTEGEWTREVERACDLVPEMGAITISPQDVVRAVRPLPNWKSPGPDGLHNFWIKWFTRSHARLAILFQSALESGSRPEFLTTGITQLLHKSGSTAEPKNYRLITCLPTVYKVLTSILRAKINKHIDENSVMSASQNGCRNGSHGTKELPLIDMAISQQVRRSRKDLSTCWIDYKKAYDSVPHTWLMRVLELYKVDATLRTFQMSCMGQWRTVLRYPGCRQIQRNSEPIRIERGIFQGDSLSPLWFCLALNPLSKLLEDSGLGYRLRRGGQVISHLLYMDDLKLFAANDLQLMELLKVTETFSSAISMEFGVDKCAVMHVKRGEIVESVGPQLSDSINLRSLSATETYKYLGMSEALGINVAEMKQSLKERFFGRLKNLFNSLLPGGNKVRAFNGWVMPVSIYSFGILKWTQTELDALDRRVRTLLTAYRMHHPRSSVMRLYIPRRCGGRGFLNAKTLHNREIRSLREYFLETDVGMHRDVVAVDKGLTPLSLAKENWRKPVVLDTNDRMEVWQSKELHGCFFRALHGPDVDLSASVAWLRSGDLFGETEGFVCAIMDEVMMTNNYRRFIVKDGTVDICRACHRPGESIRHIISGCSRLANGEYLHRHNLVARIIHQQLALKYNLVESEVPYYKYVPDPVLENGSITLYWDRSIITDRTIVANKPDIVVVDRSERRAMIVDITVPHDENLVKAEKDKQIKYLDLAREVVDMWDVDSAIIVPIVVSAHGLIAKSLDQYLRRLSLGSWIKGLIQKAVLLDTARIVRRFLSLEP

SEQ ID NO: 13354 - protein, 1143 aa, Noctua janthe
MLTRSATRRARLSPPDPSLSSASPPPESSPIVSAVTPAVAVASSSSDEYFSPPTTPPPVRRRGGRRPPDGLGPRGPPASDRVPAPGGSVPRMRWTQSINANVMRAYYGATEGGNNLTAYRVRMLSLFQVLEPAVNVSAQRLSDQVRVIQRNGMLDDTVLDRLRTEMQSSHVIATPPQTVVPPQSTIIPTHDNNVSNDMVTNVSTQCNEEMRCALEGAIREYRFMQPDLRPRVPRLPMHNKNKVLVAVLDSQLSNYFDNCENLTDAHSVLYCAAVAACRVAHVKFSDDRATRPKPAVPSWQYRIERRIGEARALIGKLICFREGNTRPRVMRFVRRAFSGTDISARDYMSRVTERIDFLKQKVYAWANRIRRYKRRVDRYTQNRTFQRDERWVYRAWERPDQGVADTHLPDDDAMCSFWRSIWSVPVSHTEVERACDLVPEMGAITISPQDVVRAVRPLPNWKSPGPDELHNFWIKWFTRSHARLAILFQSALESGSLPEFLTTGITHLLHKSGSTAEPKNYRPIACLPTVYKVLTSILRAKINKHIDDNSIMSASQNGCRNGSRGTKELLLIDMAISQQVRRSRRDLSTCWIDYKKAYDSVPHTWLMRVLELYKVDSTLRIFLMSCMGQWRTVLRYPGCRQIQRNSEPIRIERGIFQGDSLSPLWFCLALNPLSTLLEDSGLGYRLRRGGQVISHLLYMDDLKLFAPNDLQLMELLKVTETFSSAIRMEFGVDKCAVMHVKRGEIVESVGTQLSDSINLRSLSATETYKYLGMSEALGINVADMKQSLKERFFGRLKKVFNSLLSGGNKVRAFNGWVMPVLMYSFGILKWTQTELDALDRRVRTLLTTYRMHHPRSSVMRLYIPRRCGGRGFLNAKTLHNREIYSLREYFLETDVGMHRDVVAVDKGLTPLSLAKENWRKPVVLDTNDRMEVWQSKELHGRFFRALHGPDVDLPASVAWLRSGDLFGETEGFVCAIMDEVMMTNNYRRFIVKDGTVDICRACHRPGESIRHIISGCSRLANGEYLHRHNLVARIIHQQLALKYNLVESEVPYYKYVPDPVLENGNITLYWDRSIVTDRTIVANKPDIVVVDRSERRAMIVDITVPHDGNLVKAEKDKQIKYLDLTWLTRLSTCGMWTQRSLCR

SEQ ID NO: 13355 - protein, 1200 aa, Mythimna ferrago
MLTRSRAQQLNTHLTTSGSSLSSASQPPGPAPAVSPEIPVAAVASSSSDEYFSPPTTPPPTRRRGRGRPPACLGPRGPPASDRVPAAGGSVQRMRWTQSINENVMRSYFGATEGGTNLTAYLGRMLSLFQVLEPAVNVSAQRLSDQVRVIQRNRMLDDAVLDRLRLESRNGRVSPVSPPAAVQRQLSVSPRPDHVGEDDDDGAISVSTQCNARLRSALEDAFREYRSIPPELRPRLPRLPMHRKNRALVCALDSQLSNCFDSSEDLTDTHSILYCAAAAACRVAHVKIPNSDRATRSAKPAWQCRIERRIGEARALIGKLICFREGNTRPRVMRFVRRAFSGTDISPRDYLPRITERIDFLRQKVYAWANRIRRYKRRVERYTQNRAFQSNERWVYRAWERPDQSVIDTHLPDDDAMYSFWRSIWSVPVNHTEGDWTREVERECELIPEMGAITISPQDVARAVRPLPNWKSPGPEGLHNFWLKWFKSSHARLASQFQSALESGSLPQFLTTGITHLLYKSGSTAEPKNYRPITCLPTVYKVLTSILRAKINSHIETNSIMSASQNGCRNGSRGTKELLLIDVAISQQVRRSRRDLSICWIDYKKAYDSVPHTWLMRVLELYKIDVTLRTFLMSCMGQWRTVLHYPGCRRVSENSEPLRIERGIFQGDSLSPLWFCLALNPLSTLLEGSGLGYRLRREGQVISHLLYMDDLKLFASNNLQLMELLKVTETFSSAIRMEFGLDKCAVMHVKRGEIMESVGTQLSDSIHLRSLCSTETYKYLGMSEALGINAADVKQSLRERFFGRLNKVLKSLLSGGNKVRAFNDWVMPVLMYSFGILKWTQTELDALDRRVRTLLTANRMHHPRSSVMRLYIPRKCGGRGFLNAKTLHNREVCSLREYFLETDVGMHRDVVAVDKGLTPLSLANENWRKPIVMDTNERKEVWKGKELHGRFYRALHGPDVDLLASVSWLRFGDLFGETEGFVFAIMDEVMMTNNYRKYIVKDGTVDICRACHRPGESIRHIISGCSHLANGDYLHRHNLVARIIHQQIALKYNLVESEVPYYRYVPDPVLENGSVTLYWDRSIITDRTIVANKPDIVVIDRLERRTMIVDIAVPHDENLVKAEKDKQTKYLDLAREVVDMWEVDRAIIVPIVVTANGLIAKSLDQHLRRLSLGSWIKGLIQKAVLLDTARIVRRFLSQEP

SEQ ID NO: 13356 - protein, 1026 aa, Mythimna ferrago
MVVSHLFHHRPRCNVNPVFHVGEDDDDGAISVSTQCNVRLRSALEDAFREYRSIPPELRPRLPRLPMHRKNRALVCALDSQLSNCFDSSEDLTDTHSILYCAAAAACRVAHVKIPNSDRATRPAKPAWQCRIERRIGAARALIGKLICFREGNTRPRVMRFVRRAFSGTDISPRDYLPRITERIDFLRQKVYAWANRIRRYKRRVERYTQNRAFQSNERWVYRAWERPDQSVIDTRLPDDDAMYSFWRSIWSVPVNHTEGDWTRKVERECELLPEMGAVTISPQDVARAVRPLPNWKSPGPDGLHNFWLKWFKSLHARLASQFQSALESGSLLQFLTTGITHLLHKSGSTAEPKNYRPITCLPTVYKVLTSILRAKINSHIETNSIMSASQNGCRNGSRGTKELLLIDVAISQQVRRSRRDLSTCWIDYKKAYDSVPHTWLMRVLELYKIDVTLRTFLMSCIGQWRTVLHYPGCRRVSENSEPLRIERGIFQGDSLSPLWFCLALNPLSTLLEGSGVGYRLRREGQVISHLLYMDDLKLFASNNLQLMELLKVTETFSSAIRMEFGLDKCAVMHVKRGEIMESVGTQLSDSIHLRSLCSTETYKYLGMSEALGINAADVKQSLRERFFGRLNKVLKSLLSGGNKVRAFNGWVMPVLMYSFGILKWTQTELDALDRRVRTLLTANRMHHPRSSVMRLYIPRKCGGRGFLNAKTLHNREVCSLREYFLETDVGMHRDVVAVDKGLTPLSLANENWRKPIVMDTNERKEVWKGKELHGRFYRALHGPDVDLLASVSWLRFGDLFGETEGFVFAIMDEVMMTNNYRKYIVKDGTVDICRACHRPGESIRHIISGCSYLANGDYLHRHNLVARIIHQQLALKYNLVESEVPYYRYVPDPVLENGSVTLYWDRSIITDRTIVANKPDIVVIDRLERRTMIVDIAVPHDENLVKAEKDKQTKYLDLAREVVDMWEVDRAIIVPIVVTANGLIAKSLDQHLRRLSLGSWIKGLIQKAVLLDTARIVRRFLSQEP

SEQ ID NO: 13357 - protein, 1032 aa, Mythimna ferrago
MIIVYQKRMNKEEIIIIIIQIIIIIIIDKIIIIIIISNQCNSELRSALECAIREYRNIPPELRPRIPRLPMCNKNRALVAALDSQLSNYFDDCEDLTDTHSIMYCAAVAACRVAHVKFPNSVVATRPKPAVPAWQCRIERRIGGARALIGKLICFREGNTRPRVMRFVRRAFSGTDISPRDYMSRVTERIDFLKQKVYAWANRIRRYKRRVERYTQNRTFRSNERWVYRAWERPDQGVTDARLPDDDAMSSFWRNIWSVPVSHTEGDWTREVERACDPIPQMGAIDISPQDVARAVRPLPNWKSPGPDGLHNFWIKWFTRSHARLAYQFQSALESGSLPQFLTTGITHLLHKSGSTAEPKNYRPITCLPTVYKVLTSILRSKINSHIDENSIMSPSQNGCRNGSRGTKELLLIDMTISQQVRRSRKDLSTCWIDYRKAYDSVPHTWLMRVLELYKIDTTLRTFLMSCMRQWSTVLRYPGCRNIQRNSEPVRIERGIFQGDSLSPLWFCLALNPLSTLLENSGLGYRLKRGGQVISHLLYMDDLKLFAPNNLQLMELLKVTEIFSSAIRMEFGVDKCAVMHVKRGEAVESVSTQLTDSINLRSLSPTETYKYLGMSEALGISITGMKQSLRERFFGRLKKVFNSLLSGGNKVRAFNGWVMPVLMYSFGVLKWTQTELDALDRRVRTLLTAYRMHHPRSSVMRLYIPRKCGGRGFLNAKTLHNREVCSLREYFLAADVGMHRDVVAVDKGLTPLSLANENWRKPIVLDTNDRREVWQSKELHGRFYRALHGPDVDQLASVAWLRFGDLFGETEGFVCAIMDEVIMTNNYRRFIVKDGTVDICRACHRPGESIRHIISGCSRLANGEYLHRHNLVARIIHQQLALKYSLVESEVPYYRYEPDPVLDNGHITLYWDRPIITDRTIVANKPDIVVVDRSERRAMIVDISVPHDENLVKAEKDKQIKYIDLAREVVDMWEVDSAVIVPIVVSANGLIAKSLDQHLRRLSLGDWIKGLIQKAVLLDTARIVRRFLSLEP

SEQ ID NO: 13358 - protein, 1200 aa, Mythimna ferrago
MLTRAAARRARPPPPASSLSSASPPPEPSLNASAVTPAATVASSSSDEFYSPPTSPPPARRRRGRRPPSSLGPRGPPASDRVPAPGGSVQRMRWTQSINENVMRSYYGATEGGNNLTAYRVRMLSLFQVLEPAVNVSAQRLSDQVRVILRNHMLDDSVLDRLRTEMSDRVITPPSQPVVPVVVPPSSHISFHTDEVSTDMVTNVSTQCNNELRSALECAIREYRNIPPELRPRIPRLPMCNKNRALVAALDSQLSNYFDDCEDLTETHSIMYCAAVAACRVAHVKFPDSDEATRPKSAVPAWQCRIERRIGGARALIGKLICFREGNTRPRVMRFVRRAFSGTNISPRDYMSRVTERIDFLKQKVYAWANRIRRYKRRVERYTQNRTFRSNERWVYRAWERPDQGVTGAHLPEDDAMCSFWRSIWSVPVSHTEGDWTREVERACDPIPQKGAIDISPQDVARAVRPLPNWKSPGPDGLHNFWIKWFTRSHARLAYQFQSALESGSLPQFLTTGITHLLHKSGSTAEPKNYRPITCLPTVYKVLTSILRSKINSHIDENSIMSPSQNGCRNGSRGTKELLLIDMTISQQVRRSRKDLSTCWIDYKKAYDSVPHTWLIRVLELYKVDATLCTFLMSCMRQWRTVLRYPGCRNIQRNSEPVRIERGIFQGDSLSPLWFCLALNPLSTLLENSGLGYRLKRGGQVISHLLYMDDLKLFAPNNLQLMELLKVTETFSSAIRMEFGVDKCAVMHIKRGEIVESVGTQLSDSIHLRSLSPTETYKYLGMSEALGINATDMKQSLRERFFGRLKKVLNSLLSGGNKVRAFNGWVMPVLMYAFGVLKWTQTELDALDRKVRTLLTAYRMHHPRSSVMRLYIPRKCGGRGFLNAKTLHNREVCSLREYFLAADVGMHRDVVAVDKGLTPLSLANENWRKPVVLDTNVRKEVWQSKELHGRFFRALHGPDVDQLASVAWLRVGDLFGETEGFVCAIMDEVIMTNNYRRFIVKDGTVDICRACHRPGESIRHIISGCSRLANGEYLHRHNLVARIIHQQLALKYSLVESEVPYYRYVPDPVLDSGDITLYWDRSIITDRTIVANKPDIVVVDRSERRAMIVDISVPHDENLVKAEKDKQIKYIDLAREVVDMWEVDSAIIVPIVVSANGLIAKSLDQHLRRLSLGDWIKGLIQKAVLLDTARIVRRFLSLEP

SEQ ID NO: 13359 - protein, 1107 aa, Mythimna ferrago
MRWTQSINENVMRSYFGATEGGTNLTAYRGRMLSLFQVLEPAVNVSAQRLSDQVRVIQRNRMLDDAVLDRLRLESRNGRVSPVSPPAAVQLQPSVSPRPDHVGEDDDDGAISVSTQCNARLRSALEDAFREYRSIPPELRPRLPRLPMHRKNRALVCALDSQLSNCFDSSEDLTDTHSILYCAAAAAYRVAHVKIPNSDRATRPVKPAWQCRIERRIGEARALIGKLICFREGNTRPRVMRFVRRAFSGTDVSPRDYLPRITERIDFLRQKVYAWANRIRRYKRRVERYTQNRAFQSNERWVYRAWERPDQSVIDTRLPDDDAMYSFWRSIWSVPVSHTEGDWTREVERECELIPEMGAITISPQDVARAVRPLPNWKSPGPDGLHNFWLKWFKSSHARLASQFQSALESGSLPQFLTTGITHLLHKSGSTAEPKNYRPITCLPTVYKVLTSILRAKINSHIETNSIMSASQNGCRNGSRGTKELLLIDVAISQQVRRSRRDLSTCWIDYKKAYDSVPHTWLMRVLELYKIDVTLRTFLMSCMGQWRTVLHYPGCRRVSENSEPLRIERGIFQGDSLSPLWFCLALNPLSTLLEGSGLGYRLRREGQVISHLLYMDDLKLFASNNLQLMELLKVTETFSSAIRMEFGLDKCAVMHVKRGEIMESVGTQLSDSIHLRSLCSTETYKYLGMSEALGINAADVKQSLRERFFGRLNKVLNSLLSGGNKVRAFNGWVMPVLMYSFGILKWTQTELDALDRRVRTLLTANRMHHPRSSVMRLYIPRKCGGRGFLNAKTLHNREVCSLREYFLETDVGMHRDVVAVDKGLTPLSLANENWRKPIVMDTNERKEVWKGKELHGRFYRALHGPDVDLLASVSWLRFGNLFGETEGFVFAIMDEVMMTNNYRKYIVKDGTVDICRACHRPGESIRHIISGCSHLANGDYLHRHNLVARIIHQQLALKYNLVESEVPYYKYVPDPVLENGSVTLYWDRSIITDRTIVANKPDIVVIDRLERRTMIVDIAVPHDENLVKAEKDKQTKYLDLAREVVDMWEVDRAIIVPIVVTANGLIAKSLDQHLRRLSLGSWIKGLIQKAVLLDTARIVRRFLSQEP

SEQ ID NO: 13360 - protein, 868 aa, Mythimna ferrago
MRFVRRAFSGTDISPRDYMSRVTERIDFLKQKVYAWANRIRRYKRRVERYIQNSTFRSNERWVYRAWERPDQGVTDTRPPDDDAMCSFWRNIWSVPVSHTEGGWTREVERACESVTEMGAITISPQDVARAVRPLPNWKSPGPDGLHNFWIKWLQRSHARLASQYQAALESGSLPEFLTTGVTHLLHKSGSTAEPKNYRPITCLPTVYKVLTSILRAKINHHVDNNAIMSASQNGCRNGSRGTKELLLIDMAISQQVRRSRKDLSTCWIDYKKAYDSVPHTWLMRVLELYKVDATLRTFLMSCMRQWRTVLRYPGCRNIQRNSEPVRIERGIFQGDSLSPLWFCLALNPLSTLLENSGLGYRLKRGGQVISHLLYMDDLKLFAPNNLQLMELLKVTETFSSAIRMEFGVDKCAVMHIKRGEIVESVGIQLSDSIHLRSLSPTETYKYLGMSETLGINATDMKQSLRERFFGRLKKVLNSLLSGGNKVRAFNGWVMPVLMYAFGVLKWTQTELDALDRRVRTLLTAYRMHHPRSSVMRLYIPRKCGGRGFLNAKSLHNREVCSLREYFLAADGGMHRDVVAVDKGLTLLSLANENWRKPVVLDTNVRREVWQSKELHGRFFRALHGPDVDQLASVAWLRVGDLFGETEGFVCAIMDEVIMTNNYRRFIVKDGTVDICRACHRPGESIRHIISGCSRLANGEYLHRHNLVARIIHQQLALKYSLVESEVPYYRYVPDPVLDSGDITLYWDRSIITDRTIVANKPDIVVVDRSERRAMIVDISVPHDENLAKAEKDKQIKYIDLAREVVDMWEVDSAIIVPIVVSANGLIAKSLDQHLRRLSLGDWIKGLIQKAVLLDTARIVRRFLSLEP

SEQ ID NO: 13361 - protein, 1076 aa, Acronicta aceris
MLSLFQALEPTIDVSTQRLSDQVRVIRRNHMLDDSVLDQLRSEVQSSRAIAHPSQSVAPSATLPQTNLAEVGSDDRVTNVSTQYNEKLRSALEGAFREYRSSPPELRPRLPRLPMNNKNLALVCALDSLLSDYFDSSEDLADTHSILYCAAVAACRVAHVKFPESDRATRPKPMIPAWQSRIEQRIGEARALIGKLICFREGNTRPRVMRFVRRAFSGTNIDPRDYASCVTERIDFLKQKVYAWANRIRRYKRRAERYSLNRTFQGDQRWVYRTWDRPDNGVSDVCRPNDDAMSSFWRNIWSVPVNHTEDDWICDVERACESLPAMDEINISPQDVACAVHSVPNWKAPGPDGLHNFWIKWLRSSHARLASQFQSSLESGTLPQFLTTGITHLLHKSGDTADPKNYRPITCLPTVYKLLTSILRAKICYHIDESSIMSASQNGCRNGSRGTKELLLIDMTISQQVRRLRKNLSTCWIDYKKAYDSVPHTWLMRVLELYKVDVSLRTFLQSCMGQWRTVLHYPGCRQIQRISEPIRIERGIFQGDSLSPLWFCLALNPLSTLLEESRLGYRLRRGGQVISHLLYMDDLKLFASSDLHLMELLKITENFSNSIRMEFGVEKCAVMHVKRGGIVESVGIQLSDSTQLRSLASTETYKYLGMAEALGINVADMKQSLQVRFFGRLTKVLKSLLSGGNKVRAFNGWVMPVLMYSFGVLKWTQTELETLDRKVRTLLTAYRMHHPRSSVMRLYIPRKCGGRGFLNAKNLHNREVCSLREHFLKTEMGMHRDVVAVDNGLTPLSMAKENWRKPVVLSTNDRRNVWQGKELHGRYYRALHEPGVDTLASVSWLRFGDLFGETEGFVCAIMDEVMMTNNYRKFIVKDGTVDICRACHRPGESIRHIISGCSRLANGEYLHRHNLVARIIHQQLALKYNLVESEVPYYKYVPDPVLENGHATLYWDRSIITDRTIIANKPDIVVIDRLERRAMIVDITVPHDENLFKAEKEKEIKYLDLAHEVVDMWGVDAAIIVPIVVSANGLIAKSLDRHLKRLSLGGWIKGLIQKVVLLDTARIVRRFLSLGP

SEQ ID NO: 13362 - protein, 975 aa, Eilema sororculum
MPIHVRPRLPRLPIHRRNIALVSALDSLLPKYLENSENLGDTHSILYCTAVAACRMAGAKFPIKDPAIRPKPAIPAWQCRIERRVAEARVLIGKLICFRSGNTRPRVMRYVTRAFAGTNISPQDYTSRVTERIDFLKQKVCAWANRIRRYKKRVDRYTVNRMFQRDQRWVYRSWERTDESVDDLRRPDAEATNAFWRSIWSVPVSHTEGDWMREVERACETIPEMEEIYIDATDVDCAVRSLSNWKSPGPDGLHNFWLKWLRSSHVVLASQFQSAIESGTLPAFMTTGVTHLLHKTGSTLEPNNYRPITCLPTVYKLLTSILRAKINNHINNNSIMCTSQNGCRNGARGTKELLLIDMTISQQARRNRKDLVACWIDYKKAFDSVPHTWLLRVLELYKVNTTLCTFLRSCMGQWRTVLLYPGCRQALGSGEPITIERGIFQGDSLSPLWFCLALNPLSTLLVNSGLGYRLRREGQMVSHLFYMDDLKLFAHTNPQLIALLKVTETFSNSIKMAFGVDKCAVIHVKRGRVVESEGIQLSDSTNLRSLLVTETYKYLGMSQALCINEVGMKQMLQERFFGRLKKVLNSLLSGGNKVRACNSWVMPLLMYSFGILKWTQTELDTIDRKVRTQLTAFRMHHPRSSVMRLYIPRKCGGRGFLNAKTLHNREVCNLRDYFLKSNVDMHRDVVNVDTGLTPLGLAKENWRRPTIVGTDSRREVWQSKELHGRFYRALHRPEVDLLASVSWLRFGDLFGETEGFVCAIADEVIKTNNYRKYIMRDGTIDICRACHQPGESLRHITSGCSRLANGEYLHRHNQVARIIHQRLALKYNLVEVEVPYYRYVPEPVLENSHITLYWDRSIITDRTVVANKPDIVVIDRSERRALIVDVTIPHDENLVKAEKDKQVKYLDLAHEVVDMWNVDSAIIVPIVVSVNGLIAKSLDQHLKRLGLDGWVKGQMQKAVLLDTARIVRKFLSLEP

SEQ ID NO: 13363 - protein, 1192 aa, Eilema sororculum
MLTRAQASRNRSAPTTSPDSSLSSAAQPPAVEPAASSSSSSDEFFSPPTSPTPVRRPGRGRPPTCLGPRRPPASNRAPAAGGNVHRMRWTNSINENVMRAYFAATEGGTNLSAYRTRMLPLFQALEPSINVSAQRLSDQVRVIQRNRLLNETVLETLRLECLRNICVTPAPAPAPASTVEINDDTCVAPDDTPIPVSIQYNEEIKEALECALREYRSMPVHVRPRLPRMPIHRRNIALVSALDSLLPRYLENSENLGDTHSILYCTAVAACRMAGAKFPKKDPAIRLKSAIPAWQCRIERRVTEARVLIGKLICFRSGNTRPRVMRYVTRAFAGTDISPQDYTSRVTERIDFLKQKVYAWANRIRRYKKRVDRYTVNRMFQRDQRWVYRSWERTEESVDDVRRPDAETTNAFWRSIWSVPVNHTEGDWMREVERACETIPEMEKINIDAIDVDCAVRSLSNWKSPGPDGLHNFWLKWLRSSHVVLASQFQSAVESGTLPAFMTTGVTHLLHKTGSTLEPNNYRPITCLPTVYKLLTSILRAKINNHINNNSIMCASQNGCRNGARGTKELLLIDMAISQQARRNRKDLTACWIDYKKAFDSVPHTWLLRVLELYKVNTTLCTFLRSCMGQWRTVLFYPGCRQALGSGEPITIERGIFQGDSLSPLWFCLALNPLSTLLVNSGLGYRLRREGQMVSHLFYMDDLKLFAHTNPQLIALLKVTETFSNSIKMAFGVDKCAVIHVKRGRVVESEGIQLSDSTNLRSLLVTETYKYLGMSQALCINEVDMKQMLRERFFGRLKKVLNSLLSGGNKVRACNSWVMPLLMYSFGILKWTQTELDTIDRKVRTQLTAFRMHHPRSSVMRLYIPRKCGGRGFLNAKTLHNREVCNLRDYFLKSNVDMHRDVVNVDTGLTPLGLAKENWRRPTIVGTNSRREVWQSKELHGRFYRALHRPEVDLLASVSWLRFSDLFGETEGFVCAIADEVIKTNNYRKYIMRDGTIDICRACHQPGESLRHITSGCSRLANGEYLHRHNQVARIIHQRLALKYNLVEVEVPYYRYVPEPVLENSHITLYWDRSIITDRTVVANKPDIVVIDRSERRALIVDVTIPHDENLVKAEKDKQVKYLDLAHEVVDMWNVDSAIIVPIVVSVNGLIAKSLDQHLKRLGLDGWVKGQMQKAVLLDTARIVRKFLSLEP

SEQ ID NO: 13364 - protein, 985 aa, Eilema depressum
MECALREYRSMPLNDRPRLPRLPIHRRNMALVGALDSLLPGYLDNSENLGDTHSILYCTAVAACRMAGVKFPNKDPAIRPKSTIPAWQCRIERRVAEARVLISKLICFRSGNTRPRVMRYVTRAFAGTGISPQEYTSRITERIDFLKQKVCAWANRIRRYRKRVDRFTVNRMFRRDQRWVYRSWEQPDESVDDVRRPEAAATNTFWRSIWSVPVSHIEGDWMCEVERACESIPEMEDIYIDAIDVDCAVRPLSNWKSPGPDGLHNFWLKWLRSSHALLASQFQSAVESGTLPAFMTTGVTHLLHKTGSTLEPNNYRPITCLPTVYKLLTSILRVKINNHINNNSIMCASQNGCRNGARGTKELLLIDMAISQQARRRTKDLAACWIDYKKAFDSVPHTWLLRVLELYKVNATLCTFLRSCMRQWRTVLFYPGCCQALGDGEPITIERGIFQGDSLSPLWFCLALNPLSTLLVNSGLGYRLRREGQMVSHLLYMDDLKLFAHTNPQLMALLKITENFSNSIKMGFGVEKCAVIHVKRGRVVESQGIQLSDSTSLRSLLVTETYKYLGMSQALCINEAGMKQMLQERFFGRLKKVLNSLLSGGNKVRACNSWVMPLLMYSFGILKWTQTELDTIDRRVRTQLTAFRMHHPRSSVMRLYIPRKCGGRGFLNAKTLHNREVCNLRDYFLKSNVDMHRDVVSVDTGLTPLGLAKENWRRPIVVGTDSRREVWQSKELRGRFYRALHRPEVDLLASVSWLRFGDLFGETEGFVCAIADEVIKTNNYRKYIMRDGTIDICRECHQPGESLRHITSGCSRLANGEYLHRHNQVARIIHQRLALKYNLVELEVPYYRYVPEPVLENSHITLYWDRSIITDRTVVANKPDIVVIDRSERRALIVDVTIPHDENLVKAEKDKQVKYLDLAHEIVDMWNVDSAIIVPIVVTVNGLIAKSLDQHLKRLGLDGWVKGQMQKAVLLDTARIVRKFLSLEP

SEQ ID NO: 13365 - protein, 1113 aa, Ptilodon capucinus
MRWTSSINENVMRAYYEATEGGTNLTAYRNRMLPLFQSLEPAVNVSAQRLSDQVRVIQRGNMLADTVLDRLRSEMQSRRVVPVASSQPAAQPVASATVTSRLASDSDVDRDNAPINVSNQYNELLRSTLEDVVRVYRSMPNHLRPRIPRLPMHKGNRALVGALDSLLSIYFDSSDNLADTHSILYCAAITVCRVARVKVFNTDTATRPKPAVPAWQCRIERRISEARALIGKLSCFREGNTRPRVMRFVKRAFAGTDVSPREYISRVTERIDFLKQKIYAWANRIRRYKVRVDRYSQNSMFQRDQRWVYRSWERPSEPVSELQRPDDNATTTFWRDIWSVPVTHYEGDWIGDVERICEPIKEMEAISIGPLDVANAVRSLPNWKAPGPDGLHNFWLKWLRSSHVRLASQFQSALQSGSLPEFITTGVTHLLHKTGSTTDPKNYRPITCLPTIYKTLTSILRAKIARHVEDNSIMSASQNGCRSGSRGTKELLLIDMTICQQARRNRKDLSTCWIDYKKAYDSVPHTWLVRVLELYKIDTTLRTFLESCMRQWKTVLLCPGSRQILGNGEPIRIERGIFQGDSLSPLWFCLALNPLSTLLEESGFGFRLRRGGQVISHLLYMDDLKLFAPTALQLTGLLKVTETFSNSIRMEFGVDKCAVMHAKQGRLVESEGIQLSDSIQLRSLAATETYKYLGMSQGLGISETDMKQLLRDRFLGRLKKVLKSLLSGGNKVRAYNGWVMPVLMYSFGILKWTQTELDTLDRTVRTTLTSYRMHHPRSSVMRLYIPRKCGGRGFLNVKTLHNREICSLREYFLRADGEMHVDVVAVDNGLTPLSLAKENWRKPVVLTTDDRRLVWQGKELHGRYYRALHGPDVDLAASVAWLRFGDLFGETEGFVCAIMDEVVMTNNYRKYILRDGTIDICRACHRPGESLRHIISGCSRLANGQYLHRHNQVARIIHQQLALKYRLVTSEVPYYRYEPQPVLEEGHISLYWDRSIITDRTIVANKPDIVLIDRQERRAMIVDITVPHDENLVKAEKDKESKYLDLAHEVVDMWDIDAAIIVPIVVSAHGLLAKSLDKHLKRLALGGWIKGQIQKAVLLETARIVRKFLSLEP

SEQ ID NO: 13366 - protein, 1212 aa, Ptilodon capucinus
MTDAPRRNPRRLCRQRTVNEPNAQSTPPDPSPRSASPSPASIIRTSVTAVASSESDEYFSPPTSPPPVRRQRGRPPGHLGLLGQPAPNRVLVPSGVVRRMRWTSSMNENVMRAYYEATEGGTNLTAYRDRMLPLFQSLEPAVNVSAQRLSDQVRVIQRGNMLADTVLDRLRSEVQSRRVVPVASSQPAAQPVARATVTSRLAADSDVDRDNAPIDVSTQYNNLLRSTLEDVVREYRSMPNHLRPRIPRLPMHKGNRALVGALDSLLSIYFDSSDDLVDTHSILYCAAITVCRVARVKVFNTDTTTRPKPAVPAWQCRIERRISEARALIGKLSCFREGNTRPRVMRFVKRAFAGTDVSPREYISRVTERIDFLKQKIYAWANRIRRYKARVDRYSQNSMFQRDQRWVYRSWERPNEPVSELQRPDDNAMTTFWRDIWSVPVTHYEGNWIGDVERMCEPIKEMEAISIGPLDVANAVRSLPNWKAPGPDGLHNFWLKWLRSSHVRLASQFQSALQSGSLPEFITTGVTHLLHKTGSTTDPKNYRPITCLPTIYKTLTSILRAKIARHVEDNSIMSASQNGCRSGSRGTKELLLIDMTICQQARRNRKDLSTCWIDYKKAYDSVPHTWLVRVLELYKIDTTLRTFLESCMRQWKTVLLCPGSRQILGNGEPIRIERGIFQGDSLSPLWFCLALNPLSTLLEESGFGFRLRRGGQVISHLLYMDDLKLFAPTALQLSGLLKVTETFSNSIRMEFGVDKCAVMHAKQGRMVESEGIQLSDSIQLRSLAATETYKYLGMSQGLGISETDMKQLLRDRFLGRLKKVLKSLLSGGNKVRAYNGWVMPVLMYSFGILKWTQTELDALDRTVRTTLTAYRMHHPRSSVMRLYIPRKCGGRGFLNVKTLHNREICSLREYFLRADGEMHVDVVAVDNGLTPLSLAKENWRKPVVLTTDDRRVVWQGKELHGRYYRALHGPDVDLAASVAWLRFGDLFGETEGFVCAIMDEVVMTNNYRRYILRDGTIDICRACHRPGESLRHIISGCSRLANGQYLHRHNQVARIVHQQLALKYRLVTSEVPYYRYEPQPVLEEGHITLYWDRSIITDRTIVANKPDIVLIDRQERRAMIIDITVPHDENLVKAEKDKESKYLDLAHEVVDMWDIDAAIIVPIVVSAHGLLAKSLDKHLKRLALGSWIKGQIQKAVLLETARIVRKFLSLEP

SEQ ID NO: 13367 - protein, 1082 aa, Ptilodon capucinus
MLPLFQSLEPAVNVSAQRLSDQVRVIQRGNMLADTVLDRLRSEVQSRRVVPVASSQPAAQPVASATVTSRLAADSDVDRDNAPIDVSTQYNDLLRSTLEDVVREYRSMPNHLRPRIPRLPMHNGNRALVGALDSLLSIYFDSSDDLVDTHSILYCAAITVCRVARVKVFNTDTATRPKPAVPAWQCRIERRISEARALIGKLSCFREGNTRPRVMRFVKRAFAGTDVSPREYISRVTERIDFLKQKIYAWANRIRRYKARVDRYSQNSMFQRDQRWVYRSWERPNEPVSELQRPDDNAMTTFWRDIWSVPVTHYEGNWIGDVERMCEPIKEMEAISIGPLDVANAVRSLPNWKAPGPDGLHNFWLKWLRSSHVRLASQFQSALQSGSLPEFITTGVTHLLHKTGSTTDPKNYRPITCLPTIYKTLTSILRVKIARHVEDNSIMSASQNGCRSGSRGTKELLLIDMTICQQARRNRKDLSTCWIDYKKAYDSVPHTWLVRVLELYKIDTTLRTFLESCMRQWKTVLLCPGSRQILGNGEPIRIERGIFQGDSLSPLWFCLALNPLSALLEESGFGFRLRRGGQLISHLLYMDDLKLFAPTALQLSGLLKVTETFSNSIRMEFGVDKCAVMHAKQGRMVESEGIQLSDSIQLRSLAATETYKYLGMSQGLGISETDMKQLLRDRFLGRLKKVLKSLLSGGNKVRVYNGWVMPVLMYSFGILKWTQTELDTLDRTVRTTLTAYRMHHPRSSVMRLYIPRKCGGRGFLNVKTLHNREICSLREYFLRADGEMHVDVVAVDNGLTPLSLAKENWRKPVVLTTDDRRVVWQGKELHGRYYRALHGPDVDLAASVAWLRFGDLFGETEGFVCAIMDEVVMTNNYRRYILRDGTIDICRACHRPGESLRHIISGCSRLANGQYLHRHNQVARIVHQQLALKYRLVTSEVPCYRYEPQPVLEEGHITLYWDRSIITDRTIVANKPDIVLIDRQERRAMIIDITVPHDENLVKAEKDKESKYLDLAHEVVDMWDIDAAIIVPIVVSAHGLLAKSLDKHLKRLALGSWIKGQIQKAVLLETARIVRKFLSLEP

SEQ ID NO: 13368 - protein, 1052 aa, Ptilodon capucinus
MLADTVLDRLRSEMQSRRVVPVASSQPAAQPVASATVTSRLAADSDVDRDNAPINVSNQYNELLRSTLEDVVRVYRSMPNHLRPRIPRLPMHKGNRALVGALDSLLSIYFDSSDNLADTHSILYCAAITVCRVARVKVFNTDTATRPKPAVPAWQCRIERRISEARALIGKFSCFREGNTRPRVMRFVKRAFAGTDVSPREYISRVTERIDFLKQKIYAWANRIRRYKVRVDRYSQSSMFQRDQRWVYRYWERPSEPVSELQRPDDNATTTFWRDIWSVPVTHYEGDWIGDVERMCEPIKEMEAISIGPLDVANAVRSLPNWKAPGPDGLHNFWLKWLRSSHVRLASQFQSALQSGSLPEFITTGVTHLLHKTGSTTDPKNYRPITCLPTIYKTLTSILRAKIARHVEDNSIMSASQNGCRSGSRGTKELLLIDMTICQQARRNRKDLSTCWIDYKKAYDSVPHTWLVRVLELYKIDTTLRTFLESCMRQWKTVLLCPGSRQILGNGEPIRIERGIFQGDSLSPLWFCLALNPLSTLLEESGFGFRLRRGGQVISHLLYMDDLKLFAPTALQLTGLLKVTETFSNSIRMEFGVDKCAVMHAKQGRLVESEGIQLSDSIQLRSLAATETYKYLGMSQGLGISETDMKQLLRDRFLGRLKKVLKSLLSGGNKVRAYNGWVMPVLMYSFGILKWTQTELDTLDRTVRTTLTSYRMHHPRSSVMRLYIPRKCGGRGFLNVKTLHNREICSLREYFLRADGEMHVDVVAVDNGLTPLSLAKENWRKPVVLTTDDRRLVWQGKELHGRYYRALHGPDVDLAASVAWLRFGDLFGETEGFVCAIMDEVVMTNNYRKYILRDGTIDICRACHRPGESLRHIISGCSRLANGQYLHRHNQVARIIHQQLALKYRLVTSEVPYYRYEPQPVLEEGHISLYWDRSIITDRTIVANKPDIVLIDRQERRAMIVDITVPHDENLVKAEKDKESKYLDLAHEVVDMWDIDAAIIVPIVVSAHGLLAKSLDKHLKRLALGGWIKGQIQKAVLLETARIVRKFLSLEP

SEQ ID NO: 13369 - protein, 1203 aa, Hydraecia micacea
MLTRSAAARRARIPPPDSSLSSASPPAPLVSSPTVSAVTTPAAAVASSSSDEYFSPPTTPPPARRWGGRRPPDSLGPRGPPASDRVPAPGGSVQRMRWTRSINENVMRSYYGATEGGSNLTAYRVRMLSLFQVLEPAVNVSAQRLSDQVRVIQRNHMLDDTVLDRLRNEIQSSHAIAPQSQTAVILSQSNTSHADEGSNDRATNVSTQCNEELRSALEDAIQEYRLMSPELRPRLPRLPMHNKNRALVAVLNSQLSKYFDDCEDLTDTHSILYCAAVAACRVAHVKFTNDSRATRPKPAVPAWQCRIEHRIGGARALIGKLICFREGNTRPRVMRYVGRAFLGTDISPQDYTSCVTERIDFLKQKVYAWANRIRRYKRRVERYTQNRTFQSDERWVYRDWERPNQSVADTCLPDDDAMCSFWRSIWSVPVMVSHTEDDWARDVERACDPIPEMEAITICPQDVARAVRPLPNWKSPGPDGLHNFWIKWFSRSHARLASQFQTALESGSLPQFLTTGITHLLHKSGSTAEPKNYRPITCLPTVYKVLTSILRAKINKHIDTNFIMSASQNGCRNGSRGTKELLLIDMTISQQVRRFRKDLSTCWIDYKKAYDSVPHTWLMRVLELYKVDTTLRTFLMSCMGQWRTVLRYPGCRNIQRNSEPIRIERGIFQGDSLSPLWFCLALNPLSTLLEDSGLGYRLRRGGQVISHLLYMDDLKLFAPNNLQLMELLKVTQTFSNAIRMEFGVDKCAVMHVKRGEIVESVGNQLSDSTNLRALSASETYKYLGMSEALGINVTDMKQLLKERFFGRLKKVLNSLLSGGNKVRAFNGWVMPVLMYSFGILKWTQTELDALDRRVRTLLTANRMHHPRSSVMRLYIPRKCGGRGFLNSKTLHNREICSLREYFLETDVGMHRDVVMVDKGLTPLSLAKENWRKPVVLDTNDRMEVWQSKELHGRFFRALHGPDVDLLASVAWLRFGDLFGETEGFVCAIMDEVMMTNNYRRFIVKDGTVDICRACHRPGESIRHIISGCSRLANGEYLHRHNLVARIIHQQLALKYSLVESEVPYYRYVPDPVLENGNITLYWDRSIITDRTIIANKPDIVVVDRSERRAMIVDITVPHDENLVKAEKDKQIKYLDLAREVVDMWDVDSAIIVPIVVTANGLIAKSLDQHLRRLSLGSWIKGLIQKAVLLDTARIVRRFLSLEP

SEQ ID NO: 13370 - protein, 1201 aa, Amphipyra tragopoginis
MLTRARIREARPPPPDSPLSSASQPPESSPTVSAVTPAAAVASSSSDEYFSPPTSPTPVRRQGRRRPPNSLGPRGPPAPSRVLATGGCVQRMKWTQNINENVMRAYYGSTEGGTNLTAYRVRMLTLFQELEPAINVLAQRLSDQVRVIQRNHRLDDAALDRLRLEVQNSRDTLVPSQTAVHHININVVPPRSDCVDGDVDDRAVTVSSQYNDRLRSALEDAIREYRANPELRPRLPRLPMHNKNRALVCALDSLLSSYFESSEDLVDTHSILYCAAVAACRVANVKFNNSERATRPKPAIPAWQCRIERRIDGARALIGKLICFREGNTRPRVMRFVRRAFSGTDTSPRDYMSCVTERIDFLKQKVYAWANRIRRYKRRVERYAQNRMFQCDQRWVYRAWERPDQGVSDGRLPDDDAMSSFWRSIWSVPVTHTEGDWTRDIERACEPIEEMGEILISPQDVASAARPLPNWKSPGPDGLHNFWIKWLRSSHARLASQFQSSLESGSLPQFLTTGVTHLLHKSGSTAEHKNYRPITCLPTVYKLLTSILRTKINTHVENNSIMSPSQNGCRNGSRGTKELLLIDMAISQQVRRSRKNLSTCWIDYKKAYDSVPHTWLMRVLELYKINTTLRTFLTSCMRQWRTVLRYPGCRPILGSGEPISIERGIFQGDSLSPLWFCLALNPLSTLLEGSGLGYPLRRGGQVVSHLLYMDDLKLFAPTKLQLVELLKVTETFSNSIRMEFGVDKCAVMHVRRAGIMESEGLQLSDSIYLRSLSANDTYKYLGMSEGLGISEADMKQSLRERFFGRLKKVLKSLLSGGNKVRAFNGWVMPVLMYSFGILKWTQTELDALDRRVRTLLTANRMHHPRSSVMRLYIPRKCGGRGLLNAKTLHNREVCSLREYFLHADAGMHRDVVAVDKGLTPLNLAKENWRKPVVLSTNDRREVWQSKELHGRFYRALHGPDVDFLASVSWLRFGDLFGETEGFVCAIMDEVIMTNNYRKYIVKDGTVDICRACHCPGESLRHIISGCSRLANGEYLHRHNQVARIIHQQLALKYNLVESEVPYYKYVPDPVLENGHITLYWDRSIITDRTIVANKPDIVVIDRSERRTVIVDVTIPHDENLVKAEKDKQIKYLDLAHEVVNMWDVDSATIVPIVVTANGLMAKSLDQHLKRLSLGGWIKGLIQKAVLLDTARIVRRFLSLEP

SEQ ID NO: 13371 - protein, 989 aa, Amphipyra tragopoginis
MRSALEDALREFRSTPPELRPRLPRLPMHNKNRALVCALDLLLSNVFESSEDLGDTHSILYCAAVAACRVAHVKFPNDNRATRPKSAVPAWQCRIERRIDEARVLIGKLTCFREGNRRPRVMRFVRRAFSGTDIGPGEYVSRITERIDFLKQKVYAWANRIRRYRRRVDRYTQNRIFQSDQRWVYRTWERPDQGVSDTHLPDNDVMNAFWRNIWSVPVTHTESDWMQEVQRACEPIQEMGAVTIGPQDVASAVRPMPNWKSPGPDGLHNFWIKWLRSSHARLASQFQSSLESGSLPSFLTTGVTHLLFKSGSTAEPKNYRPITCLPTVYKLLTSILRAKLNHHIDSKAIMCATQNGCKNGSRGTKELLLIDMAISQQVRRSRKDLSTCWIDYKKAYDSVPHTWLMRVLELYKINATLRTFLMSCMGQWRTVLHYPGCRQIQGNGELIRIERGIFQGDSLSPLWFCLALNPLSTLLEGSGLGYRLRRGGQVISHLLYMDDLKLFAPNNLQLVELLKVTETFSNSIRMEFGVDKCAVMHVKRGRIMESVGTQLSDFIHLRSLSSTETYKYLGMSEALGINEADMKQSLRERFFGRLIKVLKSLLSGGNKVRAFNGWVMPVLMYSFGILRWTQTELDALDRRVRTLLTAYRMHHPRSSVMRLYIPRKCGGRGFLNAKTLHNREVCSLREYFSQADVGMHRDVVAVDKGLTPLSLAKENWRKPVVLDTNGRRDVWRSKELHGRFYRALHGPDVDFLASVAWLRFGDLFGETEGFVCAIMDEVMMTNNYRKYIVKDGTVDICRACHCPGESIRHIVSGCSRLANGEYLHRHNLVARIIHQQLALKYNLVDTEVPYYRYVPDPVLENGHVTLYWDRSIITDRTIVANKPDIVVIDRLERRTMIVDITVPHDENLVKAENDKKIKYLDLAHEVVDMWDVDSAVIVPIVVTANGLIAKSLDQHLMRLSLGSWIKGLIQKAVLLDTARIVRKFLSLEP

SEQ ID NO: 13372 - protein, 1207 aa, Amphipyra tragopoginis
MLTRSRAKTLQRTHPTPSASSLSSASQPPEPASIVSDVTPAAAVASSSSDEYFSPATSPSPPPARRRGRGRPPTCLGPRGPPASDRVPAPGGSVQRMRWTQSMNENCMRAYFGATEGGTNLTAYRGRMLSLFRTLEPAVNVSAQRLSDQVRVIQRDHRLDDAALGRLRDEMQNSHATPPPSQIRTQPLVPPAVPLQPNHADEEEQDRAIFAGTQYSEIMRSALEDALREFRSTPPELRPRLPRLPMHNKNRALVCALDSLLSNVLESSKDIGDTHSILYCAAVAACRVAHVKFPNDNRATRPKSTVPAWQCRIERRIDEARVLIGKLTCFREGNIRPRVMRFVRRAFSGTDFSPGEYVSRVTERIDFLKQKVYAWANRIRRYRRRVDRYTQNRIFQSDQRWVYRTWERPDQGVSDTHLPDNDVMNAFWRNIWSVPVTHTEGDWMQEVQRACEPIQEMGAVTIGPQDVTSAVRPMPNWKSPGPDGLHNFWIKWLRSSHARLASQFQSSLESGSLPSFLTTGVTHLLFKSGSTAEPKNYRPITCLPTVYKLLTSILRAKINNHIDNNAIMSDSQNGCRNGSRGTKELLLIDMAISQQVRRSRKDLSTCWIDYKKAYDSVPHTWLMRVLELYKINATLRTFLMSCMGQWRTVLHCPGCRQIQGNGELIRIERGIFQGDSLSPLWFCLALNPLSTLLEGSGLGYRLRRGGQVISHLLYMDDLKLFAPNNLQLVELLKVTETFSNSIRMEFGVDKCAVMHVKRGRIMESVGTQLSDAIHLRSLSSTETYKYLGMSEALGINEADMKQSLKERFFGRLIKVLKSLLSGGNKVRAFNGWVMPVLMYSFGMLRWTQTELDALDRRVRTLLTAYRMHHPRSSVMRLYIPRKYGGRGFLNAKTLHNREVCSLREYFSQADVGMHRDVVAVDKGLTPLSLAKENWRKPVVLDTNGRREVWRSKELHGRFYRALHGPDVDFLASVAWLRFGDLFGETEGFVCAIMDEVMMTNNYRKYIVKDGTVDICRACHCPGESIRHIVSGCSRLANGEYLHRHNLVARIIHQQLALKYNLVDTEVPYYKYVPDPVLENGHVTLYWDRSIITDRTIVANKPDIVVIDRLERRTVIVDIAVPHDENLVKAENDKKINYLDLAHEVVDMWDVDSAVIVPIVVTANGLIAKSLDQHLMRLSLGSWIKGLIQKAVLLDTARIVRRFLSLEP

SEQ ID NO: 13373 - protein, 1205 aa, Amphipyra tragopoginis
MLTRSRAKTQQSTHLPPSASSLSSASQPPEPASIVSDVTPAAAVASSSSDEYFSPATTPPPARRRGRGRPPASLGSRGPPASDRVPAPGGSVQRMRWTQSMNENCMRAYFGATEGGTNLTAYRGRMLSLFRALEPAVNVSAQRLSDQVRVIQRDHRLDDAALDRLRNEMQNSHVTPLPAQIRTQPLVPPAVPLEPNHGDEEEGDRAISAGTQCSELMRSALEDALREFRSTPPELRPRLPRLPMHNKNRALVCALDLLLSNVFESSEDLVDTHSILYCAAVAACRVAHVKFPNDNRATRPKSAVPAWQCRIERRIDEARVLIGKLTCFREGNRRPRVMRFVRRAFSGTDIGPGEYVSRITERIDFLKQKVYAWANRIRRYRRRVDRYTQNRIFQSDQRWVYRTWERPDQGVSDAHLPDNDVMNAFWRNIWSVPVTHTEGDWMQEVQRACEPIQEMGAVTIGPQDVASAVRPMPNWKSPGPDGLHNFWIKWLRSSHARLASQFQSSLESGSLPSFLTTGVTHLLFKSGSTAEPKNYRPITCLPTVYKLLTSILRAKLNHHIDSNAIMCATQNGCKNGSRGTKELLLIDMAISQQVRRSRKDLSTCWIDYKKAYDSVPHTWLMRVLELYKINATLRTFLMSCMGQWRTVLHYPGCRQIQGNGELIRIERGIFQGDSLSPLWFCLALNPLSTLLEGSGLGYRLRRGGQVISHLLYMDDLKLFAPNNLQLLELLKVTETFSNSIRMEFGVDKCAVMHVKRGRIMESVGTQLSDFIHLRSLSSTETYKYLGMSEALGINEADMKQSLRERFFGRLIKVLKSLLSGGNKVRAFNGWVMPVLMYSFGILRWTQTELDALDRRVRTLLTAYRMHHPRSSVMRLYIPRKCGGRGFLNAKTLHNREVCSLREYFSQADVGMHRDVVAVDKGLTPLSLAKENWRKPVVLDTNGRRDVWRSKELHGRFYRALHGPDVDFLASVAWLRFGDLFGETEGFVCAIMDEVMMTNNYRKYVVKDGTVDICRACHCPGESIRHIVSGCSRLANGEYLHRHNLVARIIHQQLALKYNLVDTEVPYYRYVPDPVLENGHVTLYWDRSIITDRTIVANKPDIVVIDRLERRTMIVDITVPHDESLVKAENDKKIKYLDLAHEVVDMWDVDSAVIVPIVVTANGLIAKSLDQHLMRLSLGSWIKGLIQKAVLLDTARIVRKFLSLEP

SEQ ID NO: 13374 - protein, 1208 aa, Noctua pronuba
MSPMLTRRRAKLLETHPPSPGSSLSSASQPPGRATSVSAASPVAAVASSSSDEFFSPPSTPPPPRRRGRGRPPAGLGPRGQQAPNRVPASGGNVSRIRWTQSMNENVMRAYYGATEGGINLTAYRCRMLSLFQALEPTVNVSAQRLSDQVRVIQNNHRLDDATLDRLRSELRISPASNPLPSQNVTHVPAALPLQANQHAEEEDDRAVSAENLCNVELRSALEGAIREYRFMSPDLRPRLPRLPMNKKNRALVCALDALLPNFIESSANLCDTHSILYCTAVAACRVANVKFPNTDSATRPKSAVPVWQCRIERRINKARALIGKLICFREGNTRPRVMRFVRRAFSGTDISPREYMSRVTERIDFLKQKVYAWANRIRRYRRRVDRYTQNRMFQSDERWVYRTWERPVTIQGVTDAHLPENDAMSAFWRSIWSVPVSHTEGDWMRVVEQACDSIPEMEAISISPLDVARAVRPLPNWKSPGPDGLHNFWIKWLQRSHACLASQFQSSLETGSLPSFFTTGVTHLLHKSGSTAEPKNYRPITCLPTVYKVLTSILRAKIVHHIDSNSIMSVSQNGCRNGSRGTKELLLIDMAISQQVRRSRRDLSTCWIDYKKAYDSVPHTWLRRVLELYKIDATLRTFLVSCMGQWSTVLLYPRCRQVLGNDEPIRIERGIFQGDSLSPLWFCLALNPLSTLLEDSGLGYRLRRGGQVISHLLYMDDLKIFAPSNLQLMELLKLTETFSSAIRMEFGVDKCAVMHVKRGEIMESVGTQLSDSIYLRSLSSTETYKYLGMSEALGINAADMKQSLKERFFGRLSKVLKSLLSGGNKVRAFNGWVMPVLMYSYGILKWTQTELDALDRKVRTLLTANRMHHPRSSVMRLYIPRKCGGRGFLNAKTLHNREVCSLREYFLETDVGMHRDVVSVDKGLTPLSLANENWRKPVVLDTNDRKEVWQSKELHGRFFRALHGPDVDLLASVSWLRFGDLFGETEGFVCAIMDEVIMTNNYRKYIVKDGTVDICRACHRPGESIRHIVSGCSRLANGEYLHRHNLVARIIHQQLALQYNLVGTEVPYYKYVPDPVLENGHATLYWDRSIITDRTILANKPDIVVIDRRERCAMIVDITVPHDENLVKAENDKKIKYLDLAHEVVDMWDVDSAIIVPIVVTVNGLIAKSLDLHLRRLSLRGWVKGLIQKAVLLDTARIVRRFLSLEP

SEQ ID NO: 13375 - protein, 1207 aa, Noctua pronuba
MSPMLTRRRAKLLETHPPSPGSSLSSASQPPGRTTSVSAVSPVAAVASSSSDEFFSPPSTPSSPRRRGRRPPAGLGPRGQQAPNRVPAAGGNVSRIRWTQSMNENVMRAYYGATEGGINLTAYRCRMLSLFQALEPAVNVSAQRLSDQVRVIQNNHRLDDATLDRLRSELRISPASNPLPSQNVTHVPAALPLRANQHAEEEDDRAVSADNLCNEELRSALEDAIREYRFTSPDLRPRLPRLPMNKKNRALVCALDALLPNFIASSANLCDTHSILYCTAVAACRVANVKFPNTDSATRPKSAVPVWQCRIERRINEARALIGKLICFREGNTRPRVMRFVRRAFSGTDISPREYMSRVTERIDFLKQKVYAWANRIRRYRRRVDRYTQNRMFQSDERWVYRTWERPVTIQGVTDTHLPDNDAMSAFWRSIWSVPVSHTEGDWMRVVEQACDSIPEMEAISISPLDVARAVRPLPNWKSPGPDGLHNFWIKWLQRSHACLASQFQSSLETGSLPSFFTTGVTHLLHKSGSTAEPKNYRPITCLPTVYKVLTSILRAKIVRHIDNNSIMSVSQNGCRNGSRGTKELLLIDMAISQQVRRSRRDLSTCWIDYKKAYDSVPHTWLRRVLELYKIDATLRTFLVSCMGQWSTVLLYPGCRQVLGNDEPIRIERGIFQGDSLSPLWFCLALNPLSTLLEDSGLGYRLKRGGQVISHLLYMDDLKIFAPSNLQLMELLKVTETFSSAIRMEFGVDKCAVMHVKRGEIMESVGTQLSDSIYLRSLSSTETYKYLGMSEALGINATDMKQSLKERFFGRLIKVLKSLLSGGNKVRAFNGWVMPVLMYSYGILKWTQTELDALDRKVRTLLTANRMHHPRSSVMRLYIPRKCGGRGFLNAKTLHNREVCSLREYFLETDVGMHRDVVSVDKGLTPLSLANENWRKPVVLDTNDRKEVWQSKELHGRFFRALHGPDVDLLASVSWLRFGDLFGETEGFVCAIMDEVIMTNNYRKYIVKDGTVDICRACHRPGESIRHIVSGCSRLANGEYLHRHNLVARIIHQQLALQYNLVGTEVPYYKYVPDPVLENGHATLYWDRSIITDRTILANKPDIVVIDRRERRAMIVDITVPHDENLVKAENDKKIKYLDLAHEVVDMWDVDSAIIVPIVVTVNGLIAKSLDQHLRRLSLRGWVKGLIQKAVLLDTARIVRRFLSLEP

SEQ ID NO: 13376 - protein, 1111 aa, Noctua pronuba
MRWTQSINENVMRAYYGATEGGSNLTAYRGRMLSLFQVLEPGVSVSAQRLSDQVRVIQRNHMLDDTVLDRLRFDSRSNLVTPASPMIAVQLQNVSSAPPRSDHDGEEDDDEVISVSTQCNAQLRSALEGAFREYRSIPPELRPRLPRLPMHKKNKALVCALDSQLSTCFDSSKDLADTHSILYCGAVAACRVAHVKFPNNDRATRPKLAVPAWQRRIERRIGEARALIGKLICFREGNTRPRVMRFVRRAFSGTGISFRDYLARVTERIDFLKQKICAWANRIRRYKRRVERYTQNRTFQSDERWVYRAWERPDQGVTDTRLPDADAMCLFWRSIWSVPVSHTEGDWTREVEQACDPIPEMGAIIISPQDVACAVRPLPNWKSPGPDGLHNFWIKWFQRSHARLASQFQSALESGSLPQFLTTGITHLLHKSGSTAEPKNYRPITCLPTVYKVLTSILRAKINHHIDSNSIMSASQNGCRNGSRGTKELLLIDMAISQQVRRSRRDLSTCWIDYKKAYDSVPHTWLMRVLELYKVDATLRTFLKSCMGHWRTVLRYPGCRQIQGNSEPIRIERGIFQGDSLSPLWFCLALNPLSTLLEGSGLGYRLRRGGQVISHLLYMDDLKLFAPNNLQLMKLLKVTETFSSAIRMEFGVDKCAVMHVKRGEIMESVGTQLSDSIHLRSLSSTETYKYLGMSEALGINTTDMKQSLRERFFGRLNKVLGSLLSGGNKVRAFNGWVMPVLMYSFGILKWTQTELDALDRRVRALLTANRMHHPRSSVMRLYIPRKCGGRGFLNAKTLHNREVCSLREYFLEADVGMHRDVVSVDKGLTPLSLANENWRKPRVLDTNDRKEVWQGKELHGRFYRALHGPDVDFLASVSWLRFGDLFGETEGFVCAIMDEVMMTNNYRKYIVKDGTVDICRACHRPGESIRHIISGCSRLANGEYLHRHNLVARIIHQQLALKYNLVESEVPYYKYAPDPVLDDGNITLYWDRSIITDRTIVANKPDIVVIDRLERRAMIVDITVPHDENLVKAEKDKQFKYLDLAREVVDMWDVSTAVIVPIVVSANGLIAKSLDQHLRRLSLGSWIKRLIQKAVLLDTARIVRRFLSQEP

SEQ ID NO: 13377 - protein, 1204 aa, Noctua pronuba
MITRSRAKQQKAHPPSPGSSLSSASQPPGRATSVSSVSPVAAVASSSSDEFFSPPSTPSPPRRRGRGRPPAGLGPRGQQAPNRVPAAGGNVSRMRWTQSINENVMRAYYGATEGGSNLTAYRGRMLSLFQVLEPGVSVSAQRLSDQVRVIQRNHMLDDTVLDRLRFDSRSNLVTPASPMIAVQLQNVSSAPPRSDHDGEEDDDEVISVSTQCNAQLRSALEGAFREYRSIPPELRPRLPRLPMHKKNKALVCALDSQLSTCFDSSKDLADTHSILYCGAVAACRVAHVKFPNNDRATRPKLAVPAWQRRIERRIGEARALIGKLICFREGNTRPRVMRFVRRAFSGTGISFRDYLARVTERIDFLKQKICAWASRIRRYKRRVERYTQNRTFQSDERWVYRAWERPDQGVTDTRLPDADAMCLFWRSIWSVPVSHTEGDWTREVEQACDPIPEMGAIIISPQDVAWAVRPLPNWKSPGPDGLHNFWIKWFQRSHARLASQFQSALESGSLPQFLTTGITHLLHKSGSTAEPKNYRPITCLPTVYKVLTSILRAKINHHIDSNSIMSASQNGCRNGSRGTKELLLIDMAISQQVRRSRRDLSTCWIDYKKAYDSVPHTWLMRVLELYKVDATLRTFLKSCMGHWRTVLRYPGCRQIQGNSEPIRIERGIFQGDSLSPLWFCLALNPLSTLLEGSGLGYRLRRGGQVISHLLYMDDLKLFAPNNLQLMKLLKVTETFSSAIRMEFGVDKCAVMHVKRGEIMESVGTQLSDSIHLRSLSSTETYKYLGMSEALGINTTDMKQSLRERFFGRLNKVLGSLLSGGNKVRAFNGWVMPVLMYSFGILKWTQTELDALDRRVRALLTANRMHHPRSSVMRLYIPRKCGGRGFLNAKTLHNREVCSLREYFLEADVGMHRDVVSVDKGLTPLSLANENWRKPRVLDTNDRKEVWQGKELHGRFYRALHGPDVDFLASVSWLRFGDLFGETEGFVCAIMDEVMMTNNYRKYIVKDGTVDICRACHRPGESIRHIISGCSRLANGEYLHRHNLVARIIHQQLALKYNLVESEVPYYKYAPDPVLDDGNITLYWDRSIITDRTIVANKPDIVVIDRLERRAMIVDITVPHDENLVKAEKDKQFKYLDLAREVVDMWDVSTAVIVPIVVSANGLIAKSLDQHLRRLSLGSWIKRLIQKAVLLDTARIVRRFLSQEP

SEQ ID NO: 13378 - protein, 1200 aa, Tinea trinotella
MLTRSRARNQSAQLTSSGSSLSSASQPPGSTPTVSQVISVAAVASSSSDECFSPPTTPPSAHRRGGGRPPASLEPRGPSASGGVPATSGRVQRMRWTQSINENVMRSYFGATEGGSSLTAYRGRMLTLFQVLEPAVNVSAQRLSDQVRVIQRNRMLDDVVLDRLRLESRSSHVSPVSPPVAVQLQPSALPRPNNIEENDDDVTISVSNQYNEQLRSALEDAFREYRSTPPGLRPRIPRLPMHKKNRALVCALDSQLVNHFKSSKDLADTHSILYCAAVAVCRVAHVKFPNNDRAARLAVPAWQCRIERRIGEARALIGKLISFREGNTRPRVMRFVRRAFSGTDISSRDYQTRVTERIDFLKQKIYAWANRIRRYKRRVERYTQNRTFQSNERWVYRAWERPDQDVSDMCLPDDDAMSLFWRNIWSVPVGHTEGEWTREVERACDFIPEMGAIIISPQDVACAVRPLSNWKSPGLDGLHNFWIKYFQRSHARLAAQFQSALELGSLPQFLTTGITHLLHKSGSTAEPKNYRPITCLPTVYKVLTSILRAKIDKHIDTNCIMSASQNGCRSGSRGTKELLLIDVAISQQVRRSRRDLSTCWIDYKKAYDSVPHTWLMRVLELYKVDAALRTFLVSCMGQWRTVLHYPGCRRILGNGEPIKIERGIFQGDSLSPLWFCLALNPLSTLLDGSGQGYRLRRDGQVISHLLYMDDLKLFAPNNLQLMKLLKVTETFSSAISMEFGVDKCAIMHVKRGEIMESVGTQLSDSIHLRSLCSTETYKYLGMSEALGINAVDVKQSLRDRFFGRLNKVLNSLLSGGNKVRAFNGWVMPVLMYSFGILKWTQTELDALDRRVRTLLTANRMHHPRSSVMRLYIPRKCGGRGFLNAKTLHNREVCSLREYFLKTDVGMHRDVVAVDKGLTSLSLANENWRKPVVLDANDRREVWQSKELHGRFYRALHGPDVDFLASVSWLRFGDLFGETEGFVCAIMDEVMMTNNYRKYIVKDGTVDICRACHRPGESIRHIISGCSRLANGDYLHRHNLVARIIHQQLALKYNLVESEVPYYRYVPDPVLENGNITLYWDRSIITDRTIVANKPDIVVIDRLERRTIIVDVAVPHDENLVKAEKDKQIKYLDLAREVVDMWEVDTAIIVPIVVTANGLIAKSLDEHLKRLSLGSWIKRLIQKAVLLDTARIVRRFLSQEP

SEQ ID NO: 13379 - protein, 1076 aa, Tinea trinotella
MLTLFQVLEPAVNVSAQRLSDQVRVIQRNRMLDDVVLDRLRLESRSSHVSPVSPPVAVQLQPSALPRPNNIEENDDDVTISVSNQYNEQLRSALEDAFRECRSTPPGLRPRIPRLPMHKKNRALVCALDSQLVNHFKSSKDLADTHSILYCAAVAVCRVAHVQFPNNDRAARLAVPAWQCRIERRIGEARALIGKLISFREGNTRPRVMRFVRRAFSGTDISSRDYQTRVTERIDFLKQKIYAWANRIRRYKRRVERYTQNRTFQSNERWVYRAWERPDQDVSDMCLPDDDAMSLFWRNIWSVPVGHTEGEWTREVERACDLIPEMGAIIISPQDVACAVRPLSNWKSPGLDGLHNFWIKYFQRSHARLAAQFQSALELGSLPQFLTTGITHLLHKSGSTAEPKNYRPITCLPTVYKVLTSILRAKINKHIDTNCIMSASQNGCRSGSRGTKELLLIDVAISQQVRRSRRDLSTCWIDYKKAYDSVPHTWLMRVLELYKVDAALRTFLVSCMGQWRTVLHYPGCRRILGNGEPIKIERGIFQGDSLSPLWFCLALNPLSTLLDGSGQGYRLRRDGQVISHLLYMDDLKLFAPNNLQLMKLLKVTETFSSAISMEFGVDKCAIMHVKRGEIMESVGTQLSDSIHLRSLCSTETYKYLGMSEALGINAVDVKQSLRDRFFGRLNKVLNSLLSGGNKVRAFNGWVMPVLMYSFGILKWTQTELDALDRRVRTLLTANRMHHPRSSVMRLYIPRKCGGRGFLNAKTLHNREVCSLREYFLKTDVGMHRDVVAVDKGLTSLSLANENWRKPVVLDANDRREVWQSKELHGRFYRALHGPDVDFLASVSWLRFGDLFGETEGFVCAIMDEVMMTNNYRKYIVKDGTVDICRACHRPGESIRHIISGCSRLANGDYLHRHNLVARIIHQQLALKYNLVESEVPYYRYVPDPVLENGNITLYWDRSIITDRTIVANKPDIVVIDRLERRTIIVDVAVPHDENLVKAEKDKQIKYLDLAREVVDMWEVDAAIIVPIIVTANGLIAKSLDEHLKRLSLGSWIKRLIQKAVLLDTARIVRRFLSQEP

SEQ ID NO: 13380 - protein, 1198 aa, Spilosoma lubricipeda
MLTRARSRALLPSSDSSLRSALPSSDARTEVPTVAEASSSSSSDEFFSPPTSPTPVRRQGRDRPPTSLGPRGPLTSNRAPAAGGDVRRMKWTQSINENVMRAYFRATELGTNLTAYRVRLVSLFQELEPAVNVSAQRLSDQVRAIQRCHLLDDVVLERIRSDVRGTLTVPSSSHSVDLVATTPQLPHNEYVDEQVESEVMTVSTQCNDRIRRALEDAIQEYRHVDYKNRPRLPRLPIHKRNLALVSALNSLLPDYFGNSEDLSDTHSILYCAAIAVCRVAGVKFVEQITTTRPKNEVPAWQCRIERRITETRTLIGKLITFQSGNTRPRVMRFVKQAFLGTTISPQQYMSSVTERIDFLKQKVYAWANRIRRYRKRVDRFIQNRMFQRNEKWVYRKWEEPSPRVGEGRFPDENVTNTFWRNIWSVPVTHTEGDWYRDVERSCESITSMEPITISKDDIGCAVRSLPNWKSPGPDGLHNFWFKWFRSSHACLASQYQAAVDSGSLPQFLTTGITHLLYKSGSAMDPKNFRPITCLPTMYKLLTSILRLKISTHINNNLIMSVSQNGCRSGSRGTKELLIIDMTISQQVRRNPKSLATCWIDYKKAYDSVPHTWLLRVLELYKIDTTLCTFLKSCMGQWRTVLRYPGCRQTAVNDVLINIERGIFQGDSLSPLWFCLALNPLSALLEDSGLGYRLQKDDQVISHLFYMDDLKLLAPTKLQLTALLKVTENFSNSIKMEFGVDKCAVMYVKKGVIVESEGTELSDSTRLRSLSATETYKYLGFSQSLGIPEPDMKQSLRERFFGRLKKVLKSLLSGGNKVRAYNGWVMPVLMYSFGILRWTQTELDALDRRVRTLLTAFRMHHPRSSVMRLYIPRKFGGRGLLNAKTLHNREIYNLREYFLHTDVGVHRSVVTVDTGLTPLALAKENWRKPVVLSTNDRREVWKGKELHGRFYRALNGPDIDFKASTSWLRYGDLFGESEGFVCAIMDEVIMTNNYRKYILKDGTVDICRACHRPGESIRHIISGCSRLANGEYLHRHNQVARIVHQQLALKYHLVSSEVPYYRYVPDPVLENGRATLYWDRSIITDRTIVANKPDIVVIDRLERRAMIVDIAVPHDENLVKVEKEKQIKYLDLSHEIVDMWNVDSAIIVPIVVSAHGLIAKSLDQHLKRLTLEGWIKGLMQKAVLLDTARIVRRFLSLEP

SEQ ID NO: 13381 - protein, 1199 aa, Spilosoma lubricipeda
MLTRARSRAQLLTPDSSLRSALPSSDARTEVPTVAEASSSSSSDEFFSPPTSPTPVRRQERYRPPDSLGPRGPLTSNRAPAAGGNVRRMKWTHSINENVMRAYFRATELGTNLTAYRVRLVSLFQELEPAVNVSAQRLSDQVRAIQRCHLLDDAVLERIRSDIRNSLAVPSSSHVVDTIVNTTSQLPRSEYIDERVDSEIISVSTQCNDTIRSTLEDAIREYRYVDSNNRPRLSRLPIHKRNLALVSALDSLLPDYFNNSEDLSDTHSILYCAAIAVCRVAGVNFVECKTATRPKNTVPAWQCRIERRIAGTRTLIGKLISFRSGNTRPKVMRFVKQAFLGTTVSPQQYMSCVTERIDFLKQKVYAWANRIRRYRKRTDRYNQNRTFQRNEKWVYQKWEKLSPCMSDEHLPDKNATNYFWRNIWSTPVTHTEGHWCRDVERSCDSITPMEPVRIDKEDVSCAVRSLANWKAPGPDGLHNFWLKWFRSSHAYLASQFQTALDSGSLPQFLTTGITHLLHKSGSTTDPKTFRPITCLPTLYKLLTSILRLKITAHINNNSIISVSQNGCRSGTRGTKELLIIDMTISQQVRRNRKSLATCWIDYKKAYDSVPHTWLLRVLELYKIDTTLCTFLKSCMGQWRTVLRYPGCRQSTMNDVLIKIERGIFQGDSLSPLWFCLALNPLSALLEDSGLGYRLQKDDQVISHLFYMDDLKLLAPTKLQLTALLKVTENFSNSIKMEFGVDKCAVMYVKKGVIVESEGTELSDSTRLRSLSATETYKYLGFSQSLGIPEPDMKQSLRERFFGRLKKVLKSLLSGGNKVRAFNGWVMPVLMYSFGILRWTQTELDAIDRRVRTLLTAFRMHHPRSSVMRLYIPRKLGGRGLLNAKTLHNREIYNLREYFLHTDVGMHRSVVTVDIGLTPLALAKENWRKPVVLSTNDRREVWKGKELHGRFYRALNGPDIDFKASTSWLRYGDLFGETEGFVCAIMDEVIMTNNYRKYILKDGTVDICRACHRPGESIRHIISGCSRLANGEYLHRHNQVARIVHQQLALKYHLVSSEVPYYRYVPDPVLENGRATLYWDRSIITDRTIVANKPDIVVIDRLERRAMIVDIAVPHDENLVKVEKEKQIKYLDLSHEIVDMWNVDSAIIVPIVVSAHGLIAKSLDQHLKRLTLEGWIKGLMQKAVLLDTARIVRRFLSLEP

SEQ ID NO: 13382 - protein, 1196 aa, Spilosoma lubricipeda
MLTRARARALLPSSDSSLRSALPSSDARTEVPTVAEASSSSSSDEFFSPPTSPTPVRRQGRDRPPSSLGSRGPLTSNRAPAAGGDVRRMKWTQSINENVMRAYFRATELGTNLTAYRVRLVSLFQELEPAVNVSAQRLSDQVRAIQRCHLLDDTVLERICSDIRNSLTVPSSPHVVDVVTNSTPQNEDVSELVDSEIISVSTLYSDKIRSTLEDVIREYRYVNFNNRPRLPRLPIHKRNLALVGALDSLLPDYFGNSEDLSDTHSILYCAAIAVCRVAGIKFAENITTTRPENTVPAWQCRIERRIAGARTLIGKLISFRSGNTRPKVMRFVKQAFLGTTISPQQYMSCVTERIDFLKQKVYAWANRIRRYRKRIDRYNQNRMFQRNEKWVYRKWENLSPCMSDGQVPDENATNSFWRSIWSVPVAHTEGDWYRDVERSCESLLPMELINIDKEDVSCAVRSLPNWKAPGPDGLHNFWLKWFRSSHACLASQFQTALDSGSLPQFLTTGITHLLYKSGSAMDPKNFRPITCLPTLYKLLTSILRLKITTHINQNSILSVSQNGCRSGTRGTKELLIIDMTISQQVRRNRKNLATCWIDYKKAYDSVPHTWLLKVLELYKIDTTLCTFLKSCMGQWRTVLRYPGCRQTAVNDVPIKIERGIFQGDSLSPLWFCLALNPLSTLLESSGLGYRLQKDAALISHLFYMDDLKLFAPTKLQLTALLRVTENFSNSIKMEFCVDKCAVMHVKKGVIVESEGIELSDSTKLRFLSATETYKYLGFSQSLGIPEPDMKQSLRERFFGRLKKVLKSLLSGGNKVRAYNGWVMPVLMYSFGILRWTQTELDAIDRRVRTLLTAFRMHHPRSSVMRLYIPRKLGGRGLLNAKTLHNREIYNLREYFLHTDVGVHRSVVTVDTGLTPLALAKENWRKPVVLSTNDRREVWKGKELHGRFYRALNGPDIDFKASTSWLRYGDLFGETEGFVCAIMDEVIMTNNYRKYILKDGTVDICRACHRPGESIRHIISGCSRLANGEYLHRHNQVARIVHQQLALKYHLVSSEVPYYRYVPDPVLENGRATLYWDRSIITDRTIVANKPDIVVIDRLERRAMIVDIAVPHDENLVKVEKEKQIKYLDLSHEIVDMWNVDSAIIVPIVVSAHGLTAKSLDQHLKRLTLEGWIKGLMQKAVLLDTARIVRRFLSLEP

SEQ ID NO: 13383 - protein, 1108 aa, Spilosoma lubricipeda
MKWTQSINENVMRAYFRATELGTNLTAYRVRLVSLFQELEPAVNVSAQRLSDQVRAIQRCHLLDDTVLERICSDIRNSLTVPSSPHVVDVVTNSTPQNEDVSELVDSEIISVSTLYNDKIRSTLEDVIREYRCVNFNNRPRLPRLPIHKRNLALVSALDSLLPDYFGNSEDLSDAHSILYCAAIAVCRVAGIKFAENITTTRPENTVPAWQCRIERRIAGARTLIGKLISFRSGNTRPKVMRFVKQAFLGTTISPQQYMSCVTERIDFLKQKVYAWANRIRRYRKRIDRYNQNRMFQRNEKWVYRKWENLSPCMSDGQVPDENATNSFWRSIWSVPVAHTEGDWYRDVERSCESLLPMELINIDKEDVSCAVRSLPNWKAPGPDGLHNFWLKWFRSSHACLASQFQTALDSGSLPQFLTTGITHLLYKSGSAMDPKNFRPITCLPTLYKLLTSILRLKITTHINQNSILSVSQNGCRSGTRGTKELLIIDMTISQQVRRNRKSLATCWIDYKKAFDSVPHTWLLKVLELYKIDTTLCTFLKSCMRQWRTVLRYPGCRQTAVNDVPIKIERGIFQGDSLSPLWFCLALNPLSTLLEGSGLGYRLQKEAPVISHLFYMDDLKLFAPTKLQLTALLRVTENFSNSIKMEFGIDKCAVMHVKKGVIVESEGIELSDSTRLRSLSVTETYKYLGFSQSLGIPESDMKQSLRERFFGRLKKVLKSLLSGGNRVRAYNGWVMPVLMYSFGILRWTQTELDALDRRVRTLLTAFRMHHPRSSVMRLYIPRKFGGRGLLNVKTLHNREIYNLREYFLHTDVGVHRSVVAMDTGLTPLALAKENWRKPVVLGTNERREVWKGKELHGRFYRALNGPDIDFKASTSWLRYGDLFGETEGFVCAIMDEVIMTNNYRKYILKDGTVDICRACHRPGESIRHIISGCSRLANGEYLHRHNQVARIVHQQLALKYKLVNSEVPYYRYVPDPVLENGRATLYWDRSIITDRTIVANKPDIVVIDRSERRAMIVDIAVPHDENLVKVEKEKQIKYLDLSHEIVDMWDVDSVIIVPIVVSVHGLIAKSLDQHLKRLTLDGWIKGLMQKAVLLDTARIVRRFLSLEP

SEQ ID NO: 13384 - protein, 1194 aa, Autographa pulchrina
MLTRSRSRRPAPPPSPDSSPSSASQLPDHVPAPAPAVASSSSDEYYSPPTSPTPVRRQGRRRPPSSLAPAGQPASNRAPAPGGDVRRMKWTQGINENVMRAYYGATEGGTNLTAYRARMLSLFQGLEPDVNVSAQRLSDQVRVIQRNHRLDDATLDRLRSEVQRSPAASTPSPAVVPVIGSPPTNPADGEEEDGAITVSTQCSEHIRSTLEDTIREFRSTPPGLRPRLPRLPMHNRNKAIMGVLDSLLLVYFGSSEDLSDTHSILYCAALAACRVANVKINNINLDTRPKPAVPAWQCRIERRVAEARALIGKLIAFKDGNSRPRVMRFVRRAFTGTNVSPSEYTARVTERIDFFKQKVCAWASRIRRYKCRVDRFHQNRMFQRDQRWVFRTWERPVLGMDDRRLPDEDATNSFWRNIWSVPVSHSEGVWMRDVEESCEPIQEMRAITIGPQDVANAIRPMSNWKAPGPDGLQNFWLKWFRSSHGCLASQFQYAIESDALPQFFTTGSTHLLHKTGSTTDPKNYRPITCLPTIYKLLTSILRVKINEHIDSHSIMSASQNGCRNGSRGTKELLLIDMTICQQVRRSKKNLSTCWIDYKKAYDSVPHSWLMRVLELYKINTTLRAFLSSCMRRWTTVLRYPGCRDIQQSGEPIRIERGIFQGDSLSPLWFCLALNPLSTLLENSRLGYSLRRGSQVISHLLYMDDLKLFASNELQLMGLLKITESFSNSIRMEFGVDKCAVMHVKQGGIVESQGIQLSDSINLRSLSAADTYKYLGMSEALGIDVADMKQSLLTRFFGRLNKVLKSLLSGGNRVRAFNGWVMPVLMYSFGILKWTQTELDALDRRVRTLLTANRMHHPRSSVMRLYIPRKCGGRGFLNAKTLHNREVCNLREYFLQVDVGMHRDVVVVDKGFTPLSLGKENWHKPVVLSVKDRRDVWQSKELHGRFYRSLHGPDVDFLASVAWLRFGDLFGETEGFVCAIMDEVIMTNNYRKYIIKDGTVDICRACHCPGESIRHIISGCSRLANGEYLHRHNQVARIIHQQLALRYKLVEAEVPYYRYVPDPVLDNGHVTLYWDRSIITDRTIVANKPDIVVIDRSERRAMIVDVTIPHDENLVKAEKEKQMKYLDLAHEVVDMWEVDSAIIVPIVITANGIIAKSLDQHLKRLSLGIWVKGLIQKAVLLDTARIVRRFLSLEP

SEQ ID NO: 13385 - protein, 1198 aa, Ochropleura plecta
MITRLAARQHARLPPPDSPLSSASPPPEPSLIVSAVTPAVAVASSSSDEYFSPPTTPPPACRRGGRRPPDGLGLRGPPASDRVPAPGGSVQRMRWTSSINENVMRSYYGATEGGNNLTAYRVRMLSLFQVLEPAVNVSAQRLSDQVRVIQRNRMLDDTVLDRLRTEMQSSQVITSSSQAVVPPQSHQLVSHDDEVSNDMATNVSTQCNEEMRIALEGAIREYRYISPELRRRLPRLPMHNKNRALVAVLDSQLSNYFDNCENLTDAHSILYCAAVAACRVAHVKFPDDGATRPKPVVPFWQCRIERRIGVARALIGKLICFREGNTRPRVMRFVRRAFAGTDISPPDYMSRITERIDFLKQKVYAWANRIRRYKRRVERYTLNRTFQSDERWVYRAWERPDQGVSDTHLPDDDAMCLFWRNIWSVPVSHTEGEWTREVERACDPIPEMGALTISPQDVACAVRPLPNWKSPGPDGLHNFWLKWIQRSHARLATLFQTALESGSLPKFLTTGITHLLHKSGSTTEPKNYRPITCLPTIYKVLTSILRAKITKHIDDNSIMSASQNGCRNGSRGTKELLLIDMAISQQVRRSRRHLSTCWIDYKKAYDSVPHTWLMRVLELYKVDTTLRTFLSSCMRQWNTVLRYPGCRQIQRNSEPIRIERGIFQGDSLSPLWFCLALNPLSTLLEDSGLGYRLRRGGRVISHLLYMDDLKLFAPNDSQLMELLKVTETFSSAISMEFGVDKCAVMHVKRGEIVESVGTQLSDSIHLRSLSANETYKYLGMSEALGINVADMKQSLKERFFGRLRKVFNSLLSGGNKVRAFNGWVMPVLMYSFGILKWTQTELDALDRKVRTLLTAYRMHHPRSSVMRLYIPRSCGGRGFLNAKTLHNREICSLREYFLEADVGMHRDVVTVDKGFTPLSLAKENWRKPVVLDTNDRREVWQSKELHGRFFRALHGPDVDQPASVAWLRSGNLFGETEGFVCAIMDEVMMTNNYRRFIVKDGTVDICRACHRPGESIRHIISGCSRLANGEYLHRHNLVARIIHQQLALKYSLVESEVPYYRYEPDPVLEHGNITLYWDRSIITDRTIVANKPDIVVVDRSERRAMIVDITVPHDENLVKAEKDKQIKYIDLAREVVDMWDVDSAIIVPIVVSANGLIAKSLDQHLRRLSLGSWIKGLIQKAVLLDTARIVRRFLSLEP

SEQ ID NO: 13386 - protein, 1140 aa, Ochropleura plecta
MGGRKGGLCPAVGHNWLIIIIIIRVPAPGGSVQRMRWTQSINENVMRSYYGATEGGNNLTAYRVRMLSLFQVLEPAVNVSAQRLSDQVRVIQRNRMLDDTVLDRLRTEMQSSQVITSSSQAVAPPQPHQLVNRANEVSNDMATNVSTQCSEEMRSTLEGAIREYRYMSPELRPRLPRLPMHNKNRALVAALDSQLSNYFDNCENLTDAHSILYCAAVAVCRVAHVKFPDDRATRPKPAVPFWQCRIERRIGAARALIGKLICFREGNTRPRVMRFVRRAFSGTNITPPDYMSRIAERIDFLKQKVYAWANRIRRYKRRVERYTQNRTFQSDERWVYRAWERPDQGVSDTHLPDDNAMCLFWRSIWSVPVSHTEGEWTREVERACDPIPEMGALTISPKDVACAVRPLPNWKSPGPDGLHNFWIKWIQRSHVRLAALFQTALESGSLPKFLTTGITHLLHKSGSTAEPKNYRPITCLPTLYKVLTSILRAKITKHIDDNSIMSASQNGCRNGSRGTKELLLIDMAISQQVRRSRRHLSTCWIDYKKAYDSVPHTWLMRVLELYKIDATLRTFLISCMRQWSTVLRYPGCRQIQRNSEPIRIERGIFQGDSLSPLWFCLALNPLSTLLENSGLGYRLRRGGQVISHLLYMDDLKLFAPNDLQLMELLKVTETFSSSIRMEFGVDKCAVMHVKRGEIVESVGTQLSDSINLRSLSATETYKYLGMSEALGINVADMKQSLKERFFGRLRKVFNSLLSGGNKVRAFNGWVMPVLMYSFGILKWTQTELDALDRKVRTLLTAFRMHHPRSSVMRLYIPRSCGGRGFLNAKTLHNREICSLREYFLETDVGMHRDVVAVDKGFTPLSLAKENWRKPVVLDTNDRREVWQSKELHGRFFRALHGPDVDQPASVAWLRSGDLFGETEGFVCAIMDEVMMTNNYRRFIVKDGTVDICRACHRPGESIRHIISGCSRLANGEYLHRHNLVARIIHQQLALKYSLVESEVPYYRYEPDPVLEHGNITLYWDRSIITDRTIVANKPDIVVVDRSERRAMIVDITVPHDENLVKAEKDKQIKYIDLAREVVDMWDVDSAIIVPIVVSANGLIAKSLDQHLRRLSLGSWIKGLIQKAVLLDTARIVRRFLSLEP

SEQ ID NO: 13387 - protein, 1106 aa, Hecatera dysodea
MRWTQSINENVMRSYFGATEGGTNLTAYRGRMLSLFQVLEPAVNVSAQRLSDQVRVIQRNRMLDDAVLDRLRLESRSSRVSPVSPPAAVQIQPSISPRPDHVSEDDDGAITVSTQCNERLRSALEDAFREYRSTPPGLRPRLPRLPMHNKNRALVCALDSQLENCFNSSKDLADTHSILYCAAAAARRVAHVKFPNSDRAARPAVPAWQCRIERRIGEARALIGKLICFREGNTRRRVMRFVRRAFSGTDISPRDYLTRVTERIDFLKQKVYAWASRIRRYKRRVERYTQNRTFQSNERWVYRAWERPDQVVTDTHLPDDDAMCSFWRSIWSVPVSHTEGDWTREVERTCDPIPEMGAITISPQDVARAVRPLPNWKSPGPDGLHNFWIKWFTRSHARLASQFQSALESRSLPQFLTTGITHLLHKSGSTAEPKNYRPITCLPTVYKVLTSILRAKINDHIESNSIMSTSQNGCRNGARGTKELLLIDVAISQQVRRSRKDLSTCWIDYKKAYDSVPHTWLMRVLELYKVNTVLRTFLMSCMGQWRTVLHYPGCRQTQANSEPIRIERGIFQGDSLSPLWFCLALNPLSTLLEGSGQGYRLRRGGQVISHLLYMDDLKLFAPNNLQLMKLLKVTETFSSDISMEFGVDKCAVMHVKRGEIMESVGTQLSDSIYLRSLCSTETYKYLGMSEALGINATSVKQSLKERFFGRLNKVLNSLLSGGNKVRAFNGWVMPVLMYSFGILKWTQTELDALDRRVRSLLTANRMHHPRSSVMRLYIPRKCGGRGFLNAKTLHNREVCSLREYFLEADVGMHRDVVAVDKGFTPLSLANENWRKPVVLDTNDRREVWQSKELHGRFYRVLHGPDVDFLASVAWLRFGDLFGETEGFICAITDEVMMTNNYRKYIVKDGTVDICRACHRPGESIRHIISGCSSLANGDYLHRHNLVTRIIHQQLTLKYNLVESEVPYYRYVPDPVLENGNCTLYWDRSIITDRAIVANKPDIVVIDRLERRAMIVDIAVPHDENLVKAEKDKQSKYLDLAREVVDMWNVNTAVIVPIIVTANGIIAKSLDQHLKRLSLGSWIKGLIQKAVLLDTARIVRRFLSREP

SEQ ID NO: 13388 - protein, 1191 aa, Hecatera dysodea
MLTRSRAQAQTAQATSSGSSLSSASQPPGPAPPVSPEIPVAAVASSSSDEYFSPPTTPPPARRRGRGRPPTSLGPRGPPASDRVPAIGGSVQRMRWTQSINVNVMRSYFGATEGGTNLTAYRGRMLSLFQVLEPAVNVSAQRLSDQVRVIQRNNMLDDAVLDRLRLESRSSCVSTASPPVTAQQRTSVLPRPDHDGEEDEDRAISVSSQCNEQLRSALEDAFREYRSTPPELRPRLPRLPMHNKNRALVCALDSQLSIYFDSSENLTDTHSILYCGAAAACRVAHVKLPNSDRVARLAIPAWQYRIERRIGEARALIGKLICFRGGNTRPRVMRFVRRAFSGTDISPRDYLTRVTERIDFLKQKVYAWANRIRRYKRRVERYTQNRTFQRNERWVYRAWERPDQGVTDTRLPDDEAMLSFWRNIWSVPVSHTEGDWTREVERACDPIPEMGAINISPQDVARAVRPLPNWKSPGPDGLHNFWIKWFKGSHARLASQFQTALGSGSLPEFLTTGITHLLHKSGSTSEPKNYRPITCLPTVYKVLTSILRAKINNHIDSNSIMSASQNGCRNGSRGTKELLLIDVAISQQVRRSRRDLSTCWIDYKKAYDSVPHTWLMRVLELYKVDAVLRTFLMSCMGQWRTVLHYPGCRQTQANSEPIRIERGIFQGDSLSPLWFCLALNPLSTLLEGSGQGYRLRRGGQVISHLLYMDDLKLFAPNNLQLMKLLKVTETFSSDISMEFGVDKCAVMHVKRGEIMESVGTQLSDSINLRSLCSTETYKYLGMSEALGINATGVKQSLKERFFGRLNKVLNSLLSGGNKVRAFNGWVMPVLMYSFGILKWTQTELDALDRRVRSLLTANRMHHPRSSVMRLYIPRKCGGRGFLNAKTLHNREVCSLREYFLEADVGMHRDVVVVDKGLTPLSLANENWRKPVVLDTNDRREVWKSKELHGRFYRVLHGPDVDFLASVAWLRFGDLFGETEGFICAITDEVMMTNNYRKYIVKDGTVDICRACHRPGESIRHIISGCSSLANGDYLHRHNLVARIIHQQLALKYNLVESEVPYYRYAPDPVLENGNCTLYWDRSIITDRTIVANKPDIVVIDRLERRAMIVDIAVPHDENLVKAEKDKQSKYLDLAHEVVDMWNVNTAVIVPIVVTANGIIAKSLDQHLKRLSLGSWIKGLIQKAVLLDTAYR

SEQ ID NO: 13389 - protein, 1196 aa, Hecatera dysodea
MLTRAAARRARLPPPASSLSSASPPPDPSPTVSAATPAVAVASSSSDEYFSPPTSPPPARRRRGRRPPDGLGPRGPPASDRVPAPGASVQRMRWTQTINENVMRSYYGATEGGTNLTAYRGRMLSLFQVLEPAVNVSAQRLSDQVRVIQRNRMLDDSVLDRLRTEICSHVIVPSPQTVAPTKLTQIPCHADEENNDRVTNVSTQCNDELRSALESAIREYRYVSPELRPRIPRLPMHNKNRALVAALDSQLSNYFDNCEDLTDAHSIMYCAAVAACRVAHVKMPSDRVTRPKVAVPAWQCRIERRIGGARALIGKLICFREGNTRPRVMRFVRRAFSGTDISPSDYLSRVTERIDFLKQKVYAWANRIRRYKRRVERYTQNRTFRSNERWVYKAWERPDQDVTDMHPPDDDAMCSFWRNIWSVPVSHTEGDWIREVERACDPLPEMGAIIISPQDVARAVRPLPNWKSPGPDGLHNFWIKWFKGSHACLASRYQAALESGSLPEFFMTGVTHLLHKSGSTAEPKNYRPITCLPTVYKVLTSILRDKINQHINSNNIMSASQNGCRNGSRGTKELLLIDMVISQQVRRSRKDLSTCWIDYKKAYDSVPHSWLMRVLELYKIDTTLRTFLMSCMGQWRTVLRYPGCRNIQRNSEPVRIERGIFQGDSLSPLWFCLALNPLSTLLENSGLGYRLRRGGQVISHLLYMDDLKLFAPTNLQLMELLKVTETFSNAIRMEFGVDKCAVMHVKRGEIMESVGTQLSDSINLRSLSSTETYKYLGMSEALGINVTDMKQSLRERFFGRLKKVLNSLLSGGNKVRAFNGWVMPVLMYSFGVLKWTQTELDALDRRVRTLLTAYRMHHPRSSVMRLYIPRKCGGRGFLNAKTLHNREICSLREYFLAVDVGMHRDVVAVDKGLTPLSLANENWRKPAVLDTNDRRAVWQSKELHGRFFRALHGPDVDQLASVAWLRFGDLFGETEGFVCAIMDEVIMTRNYRRFIVKDGTVDICRACHRPGESIRHIVSGCSSLANGEYLHRHNLVARIIHQQLALKYSLVESEVPYYRYVPDPVLDNGNITLYWDRSIITDRTIVANKPDIVVVDRIVRRAMIVDITVPHDENLVKAEKDKQIKYLDLAREVVDMWDVDSAIIVPIVVSVNGLIAKSLDQYLRRLTLGGWIKGLIQKAVLLDTARIVRRFLSLEP

SEQ ID NO: 13390 - protein, 1200 aa, Mythimna impura
MLTRSRAQKLHTHPTSSGSSLSSASQPPGPAPTVSPEIPVAAVASSSSDEYFSPPTTPPPARRRGRGRPPASLGPRGPPASDRVPAAGGSVQRMRWTSSINENVMRSYFGATEGGINLTAYRGRMLSLLQVLEPAVNVSVQRLSDQVRVIQRNRMLDDAVLDRLRLESQSSRVSPATTPAAVQRLPTASPRPVQVGDADDDAAISVSTQCNDRLRGALEDAFREYRSTPPGLRPRLPRLPMHKRNRALVCALDSQLSNCFDSSKDLTDTHSILYCAAVAACRVAHVKFPNCDRATRPAVPAWQCRIEHRIGEARALIGKLICFREGNTRPRVMRFVRRAFSGTDISPRDYLPCVTERIDFLKQKIYAWANRIRRYKRRVERYTRNRTFQSNERWVYRDWERSDQGVTDTRLPDDDAMCSFWRSIWSAPVSHTEGDWIREVERACDLLPEMGAITISSQDVARAVRPLPNWKSPGPDGLHNFWVKWFQRSHARLASQFQSALESGSLPQFLTTGITHLLHKSGSTAEPKNYRPITCLPTVYKVLTSILRAKINSHIETNSIMSASQNGCRNGSRGTKELLLIDIAISQQVRRSRKNLSACWIDYKKAYDSVPHTWLMRVLELYKVDATLRTFLMSCMGQWRTVLHYPGCRQIQENNEPIRIERGIFQGDSLSPLWFCLALNPLSTLLEGSGLGYRLKRGGQVISHLLYMDDLKLFAPNNLQLVELLKVTETFSSAIRMEFGVDKCAVIHVKRGEIMESVGIQLSDSIHLRSLCSTETYKYLGMSESLGINTDDVKQSLKERFFGRLNKVLNSLLSGGNKVRAFNGWVMPVLMYSFGILKWTQTELDALDRRVRTLLTANRMHHPRSSVMRLYIPRKCGGRGFLNAKTLHNREVCSLREYFLKTDVGMHRDVVAVDKGLTPLSLANENWRKPIVLDTNDRREVWQSKELHGRFYRALHGPDVDLLASVSWLRFGDLFGETEGFVFAIMDEVMMTNNYRKYIVKDGTVDICRACHRPGESIRHIISGCSHLANGDYLHRHNLVARIIHQQLALKYNLVESEVPYYRYVPDPVLDNGNITLYWDRSIITDRTIVANKPDIVVIDRLERRTMIVDIAVPHDENLVKAEKDKQTKYLDLAREVVDMWEVDRAIIVPIVVTANGLIAKSLEQHLRRLSLGSWIKGLIQKAVLLDTARIVRRFLSQEP

SEQ ID NO: 13391 - protein, 1200 aa, Mythimna impura
MLTRSRAQKLHTHPTSSGSSLSSASQPPGPAPTVSPEIPVAAVASSSSDEYFSPPTTPPPARRRGRGRPPASLGPRGPPASDRVLAAGGSVQRMRWTSSINENVMRSYFGATEGGINLTAYRSRMLSLFQVLEPAVNVSVQRLSDQVRVIQRNRMLDDAVLDRLRLESQSSRVSPATTPAAVQRLPTASPRPVQVGDADDDAAISVSTQCNDRLRGALEDAFREYRSTPPGLRPRLPRLPMHKRNRALVCALDSQLSNCFDSSKDLTDTHSILYCAAVAACRVAHVKFPNCDRATRPAVPAWQCRIEHRIGEARALIGKLICFREGNTRPRVMRFVRRAFSGTNISPRDYLPCVTERIDFLKQKIYAWANRIRRYKRRVERYTRNRTFQSNERWVYRDWERSDQGVTDTRLPDDDAMCSFWRSIWSAPVSHTEGDWIREVERACDLLPEMGAITISPQDVARAVRPLPNWKSPGPDGLHNFWVKWFQRSHARLASQFQSALESGSLPQFLTTGITHLLHKSGSTAEPKNYRPITCLPTVYKVLTSILRAKINSHIETNSIMSTSQNGCRNGSRGTKELLLIDIAISQQVRRSRKNLSACWIDYKKAYDSVPHTWLMRVLELYKVDATLRTFLMSCMGQWRTVLHYPGCRQIQENNEPIRIERGIFQGDSLSPLWFCLALNPLSTLLEGSGLGYRLKRGGQVISHLLYMDDLKLFAPNNLQLVELLKVTETFSSAIRMEFGVDKCAVIHVKRGEIMESVGIQLSDSIHLRSLCSTETYKYLGMSESLGINTDDVKQSLKERFFGRLNKVLNSLLSGGNKGRAFNGWVMPILMYSFGILKLTQTELDALDRRVRTLLTANRMHHPRSSVMRLYIPRKCGGRGFLNAKTLHNREVCSLREYFLKTDVGMHRDVVAVDKDLTPLSLANENWRKPIVLDTNDRREVWQSKELHGRFYRALHGPDVDLLASVSWLRFGDLFGETEGFVFAIMDEVMMTNNYRKYIVKDGTVDICRACHRPGESIRHIISGCSHLANGDYLHRHNLVARIIHQQLALKYNLVESEVPYYRYVPDPVLDNGNITLYWDRSIITDRTIVANKPDIVVIDRLERRTMIVDIAVPHDENLVKAEKDKQTKYLDLAREVVDMWEVDKAIIVPIVVTANGLIAKSLEQHLRRLSLGSWIKGLIQKAVLLDTARIVRRFLSQEP

SEQ ID NO: 13392 - protein, 1200 aa, Mythimna impura
MLTRAAARRARPPPPASSLSSASPPPEPCLTVSAVTPAVAAASSSSDEYYSPPTTPPPTRRRGERRPPACLGSRGPPASDRVPATGGCVSRMRWTQSINENVMRAYYGATEGGNNLTAYRVRMLSLFQVLEPAVNVSAQRLSDQVRVIQRNHMLDDTVLDRLRTEMGSHAIASSSQTAVPSQVSPSNHLPNHADEESTDMVTHVSTQCSNELRSALECAIREYRNMPLELRSRLPRLPMCNKNKALVAALDSQLSNYFDDCEDLTDTHSIMYCAAVAACRVAHVKFPNSDVATRPKPAVPAWQCRIERRIGGARALIGKLICFREGNTRPRVMRFVRRAFSGTDISPRDYMSCVTERIDFLKQKVYAWANRIRRYKRRVERYTQNRTFRSNERWVYRAWEQPGQSVTDTRLPDDDAMSSFWRNIWSVPVSHSEGGWTREVERACEPIPEMGAITISPQDVARAVRPLPNWKSPGPDGLHNFWIKWLQRSHARLASQYQTALESGSLPEFLTTGVTHLLHKSGSTAEPKNYRPITCLPTVYKVLTSILRAKINHHVDNNAIMSASQNGCRNGSRGTKELLLIDMAISQQVRRSRKDLSTCWIDYKKAYDSVPHTWLMRVLELYKIDTTLRTFLMSCMRQWRTVLRYPGCRHIQRNSEPVRIERGIFQGDSLSPLWFCLALNPLSTLLENSGLGYRLKRGGQVISHLLYMDDLKLFAPNNLQLMELLKVTETFSSAIRMEFGVDKCAVMHVKRGEIVEPMGTQLSDSINLRSLSPTETYKYLGMSEALGINAIDMKQTLKERFFGRLKKVFNSLLSGGNKVRAFNGWVMPVLMYSFGVLKWTQTELDALDRRVRTLLTAYRMHHPRSSVMRLYIPRKCGGRGFLNAKTLHNREVCSLREYFLAADVGMHRDVVAVDKGLTPLSLANESWRKPVVLDTNDRREVWQSKELHGRFFRALHGPDVDQLASVAWLRVGDLFGETEGFVCAIMDEVIMTNNYRRFIVKDGTVDICRACHRPGESIRHIISGCSRLANGEYLHRHNLVARIIHQQLALKYSLVESEVPYYRYMPDPVLDNGDITLYWDRSIITDRTIVANKPDIVVVDRRERRTMIVDISVPHDENLVKAEKDKQIKYIDLAREVVDMWDVDSAIIVPIVVSANGLIAKSLDQHLRRLALGGWIKGLIQKAVLLDTARIVRRFLSLEP

SEQ ID NO: 13393 - protein, 1200 aa, Mythimna impura
MLTRSRAKKANTHPTSSGSSLSSASQPPGPAPTVSPEIPVAAVASSSSDEYFSPPTTPPPARRRGRGRPPASLGPRGPPASDRVLAAGGSVQRMRWTQSINENVMRSYFGATEGGSNLTAYRGRMLSLFQVLEPAVNVSAQRLSDQVRVIQRNRMLDDAVLDRLRLESRSSRVSPASPQAAVQLQSNVSLRPDHVGEDDDDGAIPVSNQCNVRLRSALEDAFREYRFTPAELRPRLPRLPMHKKNRALVCALDSQLSNCFDSSEDLTDTHSILYCAAVAACRVAQVKFPKSDRVTRPAVPAWQCRIERRIGEARALIGKLICFREGNTRPRVMRFVRRAFSGTNISPRDYLPHITERIDFLKQKVYAWANRIRRYKRRVERYTQNRTFQRNERWVYRAWERPDQGVIDTCLPDDDAMCSFWRSIWSVPVSHTEGDWTREIERTCDLIPEMEPITISPQDVARAVRPLPNWKSPGPDGLHNFWLKWFQRSHARLASQFQSALESGSLPQFLTTGITHLLHKSGSTAEPKNYRPITCLPTVYKVLTSILRAKINSHIETNSIMSASQNGCRNGSRGTKELLLIDVAISQQVRRSRRDLSTCWIDYKKAYDSVPHTWLMRVLELYKVDATLRTFLMSCMRQWRTALHYPGCRQIRESSEPIRIERGIFQGDSLSPLWFCLALNPLSTLLEGSGLGYRLKRGGQVISHLLYMDDLKLFASNNLQLMELLKVTETFSSAIRMEFGLDKCAVMHVKRGEIMESVGTQLSDSIYIRSLCSTETYKYLGISEALGINVADMKQSLRERFFGRLNKVLNSLLSGGNKVRAFNGWVMPVLMYSFGILKWTQMELDALDRRVCSLLTANRMHHPRSSVMRLYIPRKCGGRGFLNAKTLHNREICSLREYFLKTDVGMHRDVVAVDKGLTPLSLVNENWRKPTVMDTNERRAVWQGKELHGRFYRALHGPDVDLLASVSWLRFGDLFGEIEGFVFAIMDEVMMTNNYRKYIVKDGTVDICRACHRPGESIRHIISGCSHLANGDYLHRHNLIARIIHQQLALKYNLVESEVPYYRYVPDPVLENGSVTLYWDRSIITDRTIVANKPDIVVIDRLERRTMIVDIAVPHDENLVKAEKDKQTKYLDLAREVVDMWEVDRAVIVPIVVTANGLIAKSLEQHLRRLSLGSWIKGLIQKAVLLDTARIVRRFLSQEP

SEQ ID NO: 13394 - protein, 1107 aa, Mythimna impura
MRWTQSINENVMRSYFGATEGGSNLTAYRGRMLSLFQVLEPTVNVSAQRLSDQVRVIQRNRMLDDAVLDRLRLESQRSRASSATPPAAVQLQPSALPRPDHVGDADDDAAISVSTQCNERLRSALEDAFREYRSTPPGLRPRLPRLPMHKRNRALVCALDSQLSNCFDSSKDLADTHSILYCAAAAACRVAHVKFPNCDRATRPAVPAWQRRIERRIGEARALIGKLICFREGNTRPRVMRFVRRAFLGTDISPQNYLPCVRERIDFLKQKVYAWASRIRRYKRRVERYTQNRTFQSNERWVYRTWERPDQDVTDTRLPDDDAMCSFWRRIWSVPVSHIEGDWIREVERTCDLLPEMGAITISPQDVARAVRPLPNWKSPGPDGLHNFWIKWFQGSHARLASQFQSALESGSLPEFLTTGITHLLHKSGSTADPKNYRPITCLPTVYKVLTSILRAKINTHIETNSIMSASQNGCRNGSRGTKELLLIDMAISQQVRRSRKDLSTCWIDYKKAYDSVPHTWLMRVLELYKVDTTLRTFLMSCMRQWRTVLHYPGCRQIRENSEPIRIERGIFQGDSLSPLWFCLALNPLSTLLEGSGLGYRLKRGGQVISHLLYMDDLKLFAPNNLHLMELLKVTETFSNAIRMEFGVDKCAVMHVKRGEIMESVGTQLSDSIYLRSLCSTETYKYLGMSEALGINAADVKQSLKERFFGRLNRVLKSLLSGGNKVRAFNGWVMPVLMYSFGILKWTQTELDALDRRVRTLLTANRMHHPRSSVMRLYIPRKCGGRGFLNAKTLHNREVCSLREYFLETDVGMHRDVVAVDKGLTPLSLANGNWRKPIILDTNDRREVWQSKELHGRFYRALHGPDVDLLASVSWLRFGDLFGETEGFVCAIMDEVVMTNNYRKYIVKDGTADICRACHRPGESIRHIISGCSHLANGDYLHRHNLVAKIIHQQLALKYNLVESEVPYYKYVPDPVLDNGSITLYWDRSIITDRTIVANKPDIVAIDRLERRTVIVDIAIPHDDNLVKAEKDKQTKYLDLAREVVDMWEVDTAVIVPIVVTANGLISKSLDQHLRRLSLGSWIKGLIQKAVLLDTARIVRRFLSQEP

SEQ ID NO: 13395 - protein, 1200 aa, Mythimna impura
MLTRAAARRARLPPPASSLSSASPPPESSPTVSAVTPAVAVASSSSDEYFSPPTLPPPARRRRGRRPPSGLGPRGPPASDRVPAPGGSVQRMRWTQSINENVMRAYYGATEGGNNLTAYRVRMLSLFQVLEPAVNVSAQRLSDQVRVIQRNHMLDDTVLDRLRTEMSNHAIAPSSQPVVPVMVPPSYHLSDHADEEITDMVTHVSTQCNNELRSALECAIREYRNMPLELRPRLPRLPMHNKNKALVAALDLQLSNYFDDCEDLTDTHSIMYCAAVAACRVAHVKFPSCDVSTRPKPAVPAWQCRIERRIGGARALIGKLICFREGNTRPRVMRFVRRAFSGTDISPRDYMSRVTERIDFLKQKVYAWANRIRRYKRRVERYTQNRTFRSNERWVYRAWERPDQGVTDTRLPDDDAMSSFWRSIWSVPVSHTEGDWTREVERACDPIPQMGAIDISPQDVARAVRPLPNWKSPGPDGLHNFWIKWFTRSHARLAYQFQSALESGSLPQFLTTGITHLLHKSGSTAEPKNYRPITCLPTVYKVLTSILRSKINSHIDKNLIMSPSQNGCRNGSRGTKELLLIDMTISQQVRRFRKDLSTCWIDYKKAYDSVPHTWLMRVLELYKIDTTLRTFLMSCMRQWSTILRYPGCRHIQRNSEPVRIERGIFQGDSLSPLWFCLALNPLSTLLENSGLGYRLKRGGQVISHLLYMDDLKLFAPNNLQLMELLKVTETFSSAIRMEFGVDKCAVMHVKRGEVVESVGTQLTDSINLRSLSPTETYKYLGMSEALGINITDMKQSLKERFFGRLKKVFNSLLSGGNKVRAFNGWVMPVLMYSFGVLKWTQTELDALDRRVRTLLTAYRMHHPRSSVMRLYIRRKCGGRGFLNAKTLHNREVCSLREYFLATDVGMHRDVVAVDKGLTPLSLANENWRKPVVLDTNDRREVWQSKELHGRFFRAFHGPDVDQLASVAWLRFGDLFGETEGFVCAIMDEVIMTNNYRRFIVKDGTVDICRACHRPGESIRHIISGCSRLANGEYLHRHNLVARIIHQQLALKYSLVESEVPYYRYEPDPVLDNGHITLYWDRSIITDRTIVANKPDIVVVDRSERRAMIVDISVPHDENLVKAEKDKQIKYIDLAREVVDMWDVDSAIIVPIVVSANGLIAKSLDQHLRRLALGGWIKALIQKAVLLDTARIVRRFLSLEP

SEQ ID NO: 13396 - protein, 1076 aa, Mythimna impura
MLSLFQVLEPAVNVSVQRLSDQVRVIQRNRMLDDAVLDRLRLESQSSRVSPATPPAAVQHLPTASPRPDHVGDADDDAAISVSTQCNDRLRGALEDAFREYRSTPPELRPRLPRLPMHKRNRALVCALDSQLSNCFDSSEDLTDTHSILYCAAVAACRVAHVKFPNCDGATRPAVPAWQCRIEHRIGEARALIGKLICFREGNTRPRVMRFVRRAFSGTDISPRDYLPCVTERIDFLKQKIYAWANRIRRYKRRVERYTQNRTFQSNERWVYRDWERPDQGVTDTRLPDDDAMCSFWRSIWSTPVSHTEGDWIREVERACDLLPEMGAITISPQDVTRAVRPLPNWKSPGPDGLHNFWLKWFQRSHARLASQFQSALESGSLPQFLTTGITHLLHKSGSTAEPKNYRPITCLPTVYKVLTSILRAKINSHIETNSIMSASQNGCRNGSRGTKELFLIDVAISQQVRRSRKNLSACWIDYKKAYDSVPHTWLMRVLELYKVDATLRTFLMSCMGQWRTVLHYPGCRQIQENSEPIRIERGIFQGDSLSPLWFCLALNPLSTLLEGSGLGYRLKRGGQVISHLLYMDDLKLFAPNNLQLVELLKVTETFSSAIRMEFGVDKCAVIHVKRGEIMESVGIQLSDSIHLRSLCSTETYKYLGMSESLGINTDDVKQSLKERFFGRLNKVLNSLLSGGNKVRAFNGWVMPVLMYSFGILKWTQTELDALDRRVRTLLTAHRMHHPRSSVMRLYIPRKCGGRGFLNAKTLHNHEVCSLREYFLKTDVGMHRDVAAVDKGLTPLSLANGNWRKPIVLDTNDRREVWQSKELHGRFYRALHGPDVDLLASVSWLRFGDLFGETEGFVFAIMDEVMMTNNYRKYIVKDGTVDICRACHRPGESIRHIISGCSHLANGDYLHRHNLVARIIHQQLALKYNLVESEVPYYRYVPDPVLDNGNITLYWDRSIITDRTIVANKPDIVVIDRLERRTMIVDIAVPHDENLVKAEKDKQTKYLDLAREVVDMWEVDRAIIVPIVVTANGLIAKSLEQHLRRLSLGSWIKGLIQKAVLLDTARIVRRFLSQEP

SEQ ID NO: 13397 - protein, 1200 aa, Mythimna impura
MLTRSRAQKLHTHPTSSGSSLSSASQPPGPAPTVSPEIPVAAVASSSSDEYFSPPTTPPPARRRGRGRPPASLGPRGPPASDRVPAAGGSVQRMRWTSSINENVMRSYFGATEGGINLTAYRSRMLSLFQVLEPAVNVSVQRLSDQVRVIQRNRMLDDAVLDRLRLESQISRVSPATTPAAVQRLPTASPRPVQVGDADDDAAISVSTQCNDRLRGALEDAFREYRSTPPGLRPRLPRLPMHKRNRALVYALDSQLSNCFDSSKDLTDTHSILYCAAVAACRVAHVKFPNCDRATRPAVPAWQCRIEHRIGEARALIGKLICFREGNTRPRVMRFVRRAFSGTDISPRDYLPCVTERIDFLKQKIYAWANRIRRYKRRVERYTRNRTFQSNERWVYRDWERSDQGVTDTRLPDDDAMCSFWRSIWSAPVSHTEGDWIREVERACDLLPEMGAITISPQDVARAVRPLPNWKSPGPDGLHNFWVKWFQRSHARLASQFQSALESGSLPQFLTTGITHLLHKSGSTAEPKNYRPITCLPTVYKILTSILRAKINSHIETNSIMSASQNGCRNGSRGTKELLLIDIAISQQVRRSRKNLSACWIDYKKAYDSVPHTWLMRVLELFKVDATLRTFLMSCMGQWRTVLHYPGCRQIQENNEPIRIERGIFQGDSLSPLWFCLALNPLSTLLEGSGLGYRLKRGGQVISHLLYMDDLKLFAPNNLQLVELLKVTETFSSAIRMEFGVDKCAVIHVKRGEIMESVGIQLSDSIHLRSLCSTETYKYLGMSESLGINTDDVKQSLKERFFGRLNKVLNSLLSGGNKVRAFNGWVMPVLMYSFGILKWTQTELDALDRRVRTLLTANRMHHPRSSVMRLYIPRKCGGRGFLNAKTLHNREVCSLREYFLKTDVGMHRDVVAVDKGLTPLSLANENWRKPIVLDTNDRREVWQSKELHGRFYRALHGPDVDLLASVSWLRFGDLFGETEGFVFAIMDEVMMTNNYRKYIVKDGTVDICRACHRPGESIRHIISGCSHLANGDYLHRHNLVARIIHQQLALKYNLVESEVPYYRYVPDPVLDNGNITLYWDRSIITDRTIVANKPDIVVIDRLERRTMIVDIAVPHDENLVKAEKDKQTKYLDLAREVVDMWEVDKAIIVPIVVTANGLIAKSLEQHLRRLSLGSWIKGLIQKAVLLDTARIVRRFLSQEP

SEQ ID NO: 13398 - protein, 1107 aa, Mythimna impura
MRWTSSINENVMRSYFGATEGGINLTAYRSRMLSLFQVLEPAVNVSVQRLSDQVRIIQRNRMLDDAVLDRLRLESQSSRVSPATTPAAVQRLPTASPRPVQVGDADDDAAISVSTQCNDRLRGALEDAFREYRSTPPGLRPRLPRLPMHKRNRALVCALDSQLSNCFDSSKDLTDTHSILYCAAVAACRVAHVKFPNCDRATRPAVPAWQCRIEHRIGEARALIGKLICFREGNTRPRVMRFVRRAFSGTDISPRDYLPCVTERIDFLKQKIYAWANRIRRYKRRVERYTRNRTFQSNERWVYRDWERSDQGVTDTRLPDDDAMCSFWRSIWSAPVSHTEGDWIREVERACDLLPEMGAITISPQDVARAVRPLPNWKSPGPDGLHNFWVKWFQRSHARLASQFQSALESGSLPQFLTTGITHLLHKSGSTAEPKNYRPITCLPTVYKVLTSILRAKINSHIETNSIMSASQNGCRNGSRGTKELLLIDIAISQQVRRSRKNLSACWIDYKKAYDSVPHTWLMRVLELYKVDATLRTFLMSCMGQWRTVLHYPGCRQIQENNEPIRIERGIFQGDSLSPLWFCLALNPLSTLLEGSGLGYRLKRGGQVISHLLYMDDLKLFAPNNLQLVELLKVTETFSSAIRMEFGVDKCAVIHVKRGEIMESVGIQLSDSIHLRSLCSTETYKYLGMSESLGINTDDVKQSLKERFFGRLNKVLNSLLSGGNKVRAFNGWVMPVLMYSFGILKWTQTELDALDRRVRTLLTANRMHHPRSSVMRLYIPRKCGGRGFLNAKTLHNREVCSLREYFLKADVGMHRDVVAVDKGLTPLSLANENWRKPIVLDTNDRREVWQSKELHGRFYRALHGPDVDLLASVSWLRFGDLFGETEGFVFAIMDEVMMTNNYRKYIVKDGTVDICRACHRPGESIRHIISGCSHLANGDYLHRHNLVARIIHQQLALKYNLVESEVPYYRYVPDPVLDNGNITLYWDRSIITDRTIVANKADIVVIDRLERRTMIVDIAVPHDENLVKAEKDKQTKYLDLAREVVDMWEVDKAIIVPIVVTANGLIAKSLEQYLRRLSLGSWIKGLIQKAVLLDTARIVRRFLSQEP

SEQ ID NO: 13399 - protein, 868 aa, Mythimna impura
MRFVRRAFSGTDISPRDYLPCVTERIDFLKQKIYAWANRIRRYKRRVERYTRNRTFQSNERWVYRDWERSDQGVTDTRLPDDDAMCTFWRSIWSAPVSHTEGDWIREVEHACDLLPEMGAITISPQDVARAVRPLPNWKSPGPDGLHNFWVKWFQRSHARLASQFQSALESGSLPQFLTTGITHLLHKSGSTAEPKNYRPITCLPTVYKVLTSILRAKINSHIETNSIMSASQNGCRNGSRGTKELLLIDIAISQQVRRSRKNLSACWIDYKKAYDSVPHTWLMRVLELYKVDATLRTFLMSCMGQWRTVLHYPGCRQIQENNEPIRIERGIFQGDSLSPLWFCLALNPLSTLLEGSGLGYRLKRGGQVISHLLYMDDLKLFAPNNLQLVELLKVTETFSSAIRMEFGVDKCAVIHVKRGEIMESVGIQLSDSIHLRSLCSTETYKYLGMSESLGINTDDVKQSLKERFFGRLNKVLNSLLSGGNKVRAFNGWVMPVLMYSFGILKWTQTELDALDRRVRTLLTANRMHHPRSSVMRLYIPRKCGGRGFLNAKTLHNREVCSLREYFLKTDVGMDRDVVAVDKGLTPLSLANENWRKPIVLDTNDRREVWQSKELHGRFYRALHGPDVDLLASVSWLRFGDLFGETEGFVFAIMDEVMMTNNYRKYIVKDGTVDICRACHRPGESIRHIISGCSHLANGDYLHRHNLVARIIHQQLALKYNLVESEVPYYRYVPDPVLDNGNITLYWDRSIITDRTIVANKPDIVVIDRLERRTMIVDIAVPHDENLVKAEKDKQTKYLDLAREVVDMWEVDRAIIVPIIVTANGLIAKSLEQHLRRLSLGSWIKGLIQKAVLLDTARIVRRFLSQEP

SEQ ID NO: 13400 - protein, 1110 aa, Laspeyria flexula
MRWSSSVNENVIRAYFAATEGGINLTAYRSRMLALFQDLEPTTKVTAQRLSDQVRAIQRCRMLDDTVLDRLRLECLQNNPTVPLQVNNLNNIISNAITIQADHNLEEVDGISSVDTQCNEEVRVALERALREYRFTSLQFRPRLPRLPMHKKNLALVITLDSLLSDYFDNSENLGDTHSILYCAAVAACRLAGVKFLGIEPPSHERPSTPAWQCRIERRIAGARILIGKLISFRAGNTRPRVMRFVNQAFSGTDVSPNEYLSRVTERIDFLKQKVYAWANRIRRFKKRVDRYTVNRLFQRDQRRVYRNWERPTQEVSDERLPNATATNEFWSSIWSEPVLHSEGEWIWDVERACERIPLMESVVISAEDIASAVRPMANWKSPGPDGLHNFWLRWLRSSHGRLASQFQSALESGSLPEFLTTGCTHLLHKSGSVTEPGNYRPITCLPSVYKLLTSVLRAKITKHIDDTRTMSISQNGCRRGSRGTKELLLVDMTISQQVRRSRKDMATCWIDYKKAFDSVPHSWLLRVLELYKVDITLRTFLESCMRQWRTVLTYPGCRLICGNGEPVRIKRGIFQGDSLSPLWFCLALNPLSTLLESSGLGYRLRRGGHVISHLLYMDDLKLIAPTDLQLKGLLKATEDFSKSIKMDFGVDKCAIMHVKRGEIVESDGIQLSDSINFRSLLVTDTYKYLGMSQALGIKETDMKQSLQERFFGRLKKVLNSLLSGGNKVRACNGWVMPLLMYSFGILKWTQTELDTLDRRVRTMLTAYRMHHPRSSVMRLYIPRKCGGRGFLNAKTFHNREVYNLREYFMGKVEGMHRDVVAVDSGLTPLSLAKDNWRRPIVLSTDDRRQVWQSKELHGRFYKALHGPDVDRVASVAWLRFGDLFGETEGFACAIADEVIKTNNYRKYILRDGTVDICRACHRPGESLRHIVSGCSRLANGEYLHRHNQVARIIHQQLALRYKLVDVEVPYYRYAPEPVLENSHTTLYWDRSIITDRTVIANKPDIVVLDRSKRLAVIVDITVPHDENLVKAEKDKQTKYLDLAHEIVDMWDVDSAIIVPIVVTVNGLVAKSLDQHLKRLGLGSWLKGLIQKAVLLGTARIVRRFLSLEP

SEQ ID NO: 13401 - protein, 1198 aa, Xestia xanthographa
MLTRSAAARRARLPPPDSSLSSTSPPPEPSPIVSAVTPAVAVASSSSDEYFSPPTTPPPARRRGGRRPPDGLGPRGPPASDRVPAPGGSVQRMRWTQSINENVMRAYYGATEGGNNLTAYRVRMLSLFQVLEPAVNVSAQRLSDQVRVIQRNRMLDDTVLDRLRTEIQSSHVIATPSQAVVPPQSSIIPNCDNDVGNDMVTNVSTQCNVEMRSALEGAIREYRFMQPDLRPRIPRLPMHNKNRALVAVLDSQLSNYFDNCEDLTDVHSILYCAAVAACRVAHVKFPSDRATRPKPAVPAWQYRIERRIGGARALIGKLVCFREGNTRPRVMRFVRQAFSGTDISPRDYMSRVTERIDFLKQKVYAWANRIRRYKRRVDRYTQNRTFQKDERWVYRAWERPDQGVADTHLPDDDAMCSFWRSIWSVPVSHAEGEWTRVIERACDPVSEMGGITISPQDVARAVRPLPNWKSPGPDGLHNFWIKWFTRSHARLATLFQSALESGSLPEFLTTGITHLLHKSGSTAEPKNYRPITCLPTVYKVLTSILRTKISKHIDDNSVMSASQNGCRNGSRGTKELLLIDMAISHQVRRSRKDLSTCWIDYKKAYDSVPHTWLMRVLELYKVDATLRTFLMSCMGQWRTVLRYPGCRQIQRNSEPIRIERGIFQGDSLSPLWFCLALNPLSTLLEDSGLGYRLRKDGQVISHLLYMDDLKLFAPNVLQLMELLKVTDTFSSAIRMEFGVDKCAVMHVKRGEIVESVGTQLSDSITLRSLSATETYKYLGMSEALGVNVADMKQSLKERFFGRLKKVFNSLLSGGNKVRAFNGWVMPVLMYSFGILKWTQTELDALDTKVRKLLTAYRMHHPRSSVMRLYIPRKCGGRGFLNAKTLHNREICSLREYFLGTDVGMHRDVVTVDKGLTPLSLAKENWRKPPVLDTNDRREVWQSKELHGRFFRALHGPDVDLPASVAWLRSGDLFGETEGFVCAIMDEVMMTNNYRRFIVKDGTVDICRACHRPGETICHIISGCSRLANGEYLHGHNLVARIIHQQLALKYNLVESEVPYYRYVPDPVLDNGCITLYWDQSIITDRTIVANKPDIVVVDRSERRAMIVDITVPHDENLVKAEKDKQIKYLDLAREVVDMWEVDSAIIVPIVVSAHGLIAKSLDQYLRRLSLGSWIKGLIQKAVLLDTARIVRRFLSLEP

SEQ ID NO: 13402 - protein, 1198 aa, Xestia xanthographa
MLTRSAAARRARLPPPDSSLSSASPPPEPSPIVSAVTPAVAVASSSSDEYFSPPTTPPPARRRGGRRPPDGLGPRGPPASDRVPAPGGSVQRMRWTQSINENVMRAYYGATEGGNNLTAYRVRMLSLFQVLEPAVNVSAQRLSDQVRVIQRNRMLDDTVLDRLRTEIQSSHVIATPSQAVVPPQSSIIPNCDNDVGNDMVTNVSTQCNVEMRSALEGAIREYRFMQPDLRPRIPRLPMHNKNRALVAVLDSQLSNYFDNCEDLTDVHSILYCAAVAACRVAHVKFPSDRATRPKPAVPAWQYRIERRIGGARALIGKLVCFREGNTRPRVMRFVRQAFSGTDISPRDYMSRVTERIDFLKQKVYAWANRIRRYKRRVDRYTQNRTFQKDERWVYRAWERPDQGVADTHLPDDDAMCSFWRSIWSVPVSHAEGEWTRVIERACDPVSEMGAITISPQDVARAVRPLPNWKSPGPDGLHNFWIKWFTRSHARLATLFQSALESGSLPEFLTTGITHLLHKSGSTAEPKNYRPITCLPTVYKVLTSILRTKISKHIDDNSVMSASQNGCRNGSRGTKELLLIDMAISHQVRRSRKDLSTCWIDYKKAYDSVPHTWLMRVLELYKVDATLRTFLMSCMGQWRTVLRYSGCRQIQRNSEPIRIERGIFQGDSLSPLWFCLALNPLSTLLEDSGLGYRLRKDGQVISHLLYMDDLKLFAPNDLQLMELLKVTDTFSSAIRMEFGVDKCAVMHVKRGEIVESVGTQLSDSITLRSLSATETYKYLGMSEALGVNVADMKQSLKERFFGRLKKVFNSLLSGGNKVRAFNGWVMPVLMYSFGILKWTQTELDALDTKVRKLLTAYRMHHPRSSVMRLYIPRKCGGRGFLNAKTLHNREICSLREYFLGTDVGMHRDVVTVDKGLTPLSLAKENWRKPPVLDTNDRREVWQSKELHGRFFRALHGPDVDLPASVAWLRSGDLFGETEGFVCAIMDEVMMTNNYRRFIVKDGTVDICRACHRPGETIRHIISGCSRLANGEYLHRHNLVARIIHQQLALKYNLVESEVPYYRYVPDPVLDNGCITLYWDQSIITDRTIVANKPDIVVVDRSERRAMIVDITVPHDENLVKAEKDKQIKYLDLAREVVDMWEVDSAIIVPIVVSAHGLIAKSLDQYLRRLSLGSWIKGLIQKAVLLDTARIVRRFLSLEP

SEQ ID NO: 13403 - protein, 1196 aa, Xestia xanthographa
MLTRSAAARRARLPPPDSSLSSASPPPESSLIVNAVTPAVAVASSSSDEYFSPPTTPPPARRRGGRRPPDGLGPRGPPASNRVPAPGGSVQRMRWTQSINENVMRAYYGATEGGNNLTAYRVRMLSLFQVLEPAVNVSAQRLSDQVRVIQRNRMLDDTVLDRLRTEIQSSHVIATPPPSQAVVPPIPNCDNDVSNDMVTNVSTQCNVEMRSALEGAIREYRFMQPDLRPRIPRLPMHNKNRALVAVLDSQLSNYFDNCEDLTDVHSILYCAAVAVCRVAHVKFPSDRATRLKPAVPAWQYRIERRIGGARALIGKLVCFREGNTRPRVMRFVRQAFSGTDISPRDYMSRVTERIDFLKQKVYAWANRIRRYKRRVDRYTQNRTFQKDERWVYRAWERPDQGVADTHLPDDDAMCSFWRSIWSVPVSHAEGEWTRVIERACDPVSDMGAITISPQDVARAVRPLPNWKSPGPDGLHNFWIKWFTRSHARLATLFQSALESGSLPEFLTTGITHLLHKSGSTAEPKNYRPITCLPTVYKVLTSILRTKISKHIDDNFVMSASQNGCRNGSRGTKELLLIDMAISHQVRRFQKDLSTCWIDYKKAYDSVPHTWLMRVLELYKVDATLRTFLMSCMGQWRTVLRYPGCRQIQRNSEPIRIERGIFQGDSLSPLWFCLALNPLSTLLEDSGLGYRLRKDGQVISHLLYMDDLKLFAPNDLRLMELLKVTETFSSAIRMEFGVDKCAVMHVKRGEIVESVGTQLSDSITLRSLSATETYKYLGMSEALGVNVADMKQSLKERFFGRLKKVLNSLLSGGNKVRAFNGWVMPVLMYSFGILKWTQTELDALDTKVRKLLTAYRMHHPRSSVMRLYIPRKCGGRGFLNAKTLHNREICSLREYFLGTDVGMHRDVVTMDKGLTPLSLAKENWRKPPVLDTNDRREVWQSKELHGRFFRALHGPDVDLSASVAWLRSGDLFGETEGFVCAIMDEVMMTNNYRRFIVKDGTVDICRACHRPGESIRHIISGCSRLANGEYLHRHNLVARIIHQQLALKYNLVESEVPYYRYVPDPVLDNGCITLYWDQSIITDRTIVANKPDIVVVDRSERRAMIVDITVPHDENLVKAEKDKQIKYLDLAREVVDMWEVDSAIIVPIVVSAHGLIAKSLDQYLRRLSLGSWIKGLIQKAVLLDTARIVRRFLSLEP

SEQ ID NO: 13404 - protein, 962 aa, Cosmia trapezina
MHNKNRALVAALDSQLSNYFDDCEDLTDTHSILYCAAVAACRVAHVKFANDSRATRPKPAVPAWQCRIERRIGGARALIGKLICFREGNTRPRVMRFVKRAFSGTDVSPQDYMSRVTERIDFLRQKVYAWANRIRRYKRRVDRYTQNRTFQSDERWVYRGWERPDQGVTDTRLPDDDAMCSFWRSIWSVPVSHTEGDWAREVRRACDPIPEMGAITICPQDVARAVRPLPNWKSPGPDGLHNFWIKWFLGSHARLAAQYQSALQSGSLPQFLTTGITHLLHKSGSTTEPKNYRPITCLPTVYKVLTSILRAKINEHIDTNSIMSASQNGSRNGSRGTKELLLIDMAISQQVRRSRRDLSTCWIDYKKAYDSVPHTWLMRVLELYKVDATLRTFLMSCMGQWRTVLRYPGCRNIQRNSEPIRIERGIFQGDSLSPLWFCLALNPLSTLLENSGLGYRLRRGGQVISHLLYMDDLKLFAPSNLQLMELLKVTETFSSAIRMEFGVDKCAVMHVKRGEIVESVGTQLPDSINLRTLSAAETYKYLGMSEALGINVADMKQSLKERFFGRLKKVFNSLLSGGNKVRAFNGWVMPVLMYSFGILKWTQTELDALDRRVRTLLTAYRMHHPRSSVMRLYIPRKCGGRGFLNAKTLHNREICSLREYFLETDVGMHRDVVAVDKGLTPLSLAKENWRKPVVLDANDRMEVWQSKELHGRFFRALHGPDVNLLASVAWLRSGDLFGETEGFVCAIMDEVIMTNNYRRFIVKDGTVDICRACHRPGESIRHIISGCSRLANEEYLHRHNLVARIIHQQLALKYSLVESEVPYYRYVPDPVLENGHITLYWDRSIITDRTIVANKPDIVVVDRTERRAMIVDITVPHDGNLVKAEKDKQIKYIDLAREVVDMWDVDSAVIVPIVVSANGLIAKSLDQHLRRLSLGSWIKGLIQKAVLLDTARIVRRFLSLEP

SEQ ID NO: 13405 - protein, 1032 aa, Cosmia trapezina
MQSSRVIAPLSQTIVAPPPPQCNTSQADEGSDGTAANVSTQCNEELRSALEGAIQEYRFVSPELRPRLPRLPMYNKNRALVAALDSQLSNYFDDCEDLTDTHSILYCAAVAACRVAHVKFANDSRATRPKPAVPAWQCRIERRIGGARALIGKLICFREGNTRPRVMRFVRRAFSGTDVSPQDYMSRVTERIDFLRQKVYAWANRIRRYKRRVDRYTQNRTFQSDERWVYRGWERPDQGVTDTRLPDDDAMCSFWRSIWSVPVSHTEGDWAREVRRACDPIPEMGAITICPQDVARAVRPLPNWKSPGPDGLHNFWIKWFIGSHARLAAQYQSALQSGSLPQFLTTGITHLLHKSGSTTEPKNYRPITCLPTVYKVLTSILRAKINEHIDTNSIMSASQNGSRNGSRGTKELLLIDMAISQQVRRSRKDLSTCWIDYKKAYDSVPHTWLMRVLELYKVDATLRTFLMSWMGQWRTVLRYPGCRNIQRNSEPIRIELGIFQGDSLSPLWFCLALNPLSTLLEDSGLGYRLRRGGQVISHLLYMDDLKLFAPSNLQLMELLKVTESFSSAIRMEFGVDKCAVMHVKRGEIVESVGTQLSDSINLRTLSAAETYKYLGMSEALGINVADMKQSLKERFFGRLKKVFNSLLSGGNKVHAFNGWVMPVLMYSFGILKWTQTELDALDRRVRTLLTAYRMHHPRSSVMRLYIPRKCGGRGFLNAKTLHNREICSLREYFLETDVGMHRDVVAVDKGLTPLSLSKENWRKPVVLDANDRMEVWQSKELHGRFFRALHGPDVNLLASVAWLHSGDLFEETEGFVCAIMDEVIMTNNYRRFIVKDGTVDICRACHRPGESIRHIISGCSRLANEEYLHRHNLVARIIHQQLALKYSLVESEVYRYVPDPVLENGNITLYWDRFIITDRTIVANKPDIVVVDRTERRAMIVDITVPHDGNLVKAEKDKQIKYIDLAREVVDMWDVDSAVIVPIVVSANGLIAKSLDQHLRRLSLGSWIKGLIQKAVLLDTARIVRRFLSLEP

SEQ ID NO: 13406 - protein, 1200 aa, Cosmia trapezina
MLTRSATRKARLPPPDSSLSSASPPPVPSLTVSAVSTPAAVVASSSSDEYFSPPTTPPPARRRGGRRPPDGLGPRGPPASDRVPAPGGSVQRMRWTRAINENVMRSYYGATEGGNNLTAYRVRMHSLFQVLEPALNVSAQRLSDQVRVIQRNHMLDDTVLDRLRNEMQSSRVIAPLSQTIVAPPPPQCNTTQADEGSDGTAANVSTQCNEELRSALEGAIQEYRFVSPELRPRLPRLPMHNKNRALVAALDSQLSNYFDDCEDLTDTHSILYCAAVAACRVAHVKFANDSRATRPKPAVPAWQCRIERRIGGARALIGKLICFREGNTRPRVMRFVKRAFSGTDVSPQDYMSRVTERIDFLRQKVYAWANRIRRYKRRVDRYTQNRTFQSDERWVYRGWERPDQGVTDTRLPDDDAMCSFWRSIWSVPVSHTEGDWAREVRRACDPIPEMGAITICPQDVARAVRPLPNWKSPGPDGLHNFWIKWFLGSHARLADQYQSALQSGSLPQFLTTGITHLLHKSGSTTEPKNYRPITCLPTVYKVLTSILRAKINEHIDTNSIMSASQNGSRNGSRGTKELLLIDMAISQQVRRSRRDLSTCWIDYKKAYDSVPHTWLMRVLELYKVDATLRTFLMSCMGQWRTVLRYPGCRNIQRNSEPIRIERGIFQGDSLSPLWFCLALNPLSTLLENSGLGYRLRRGGQVISHLLYMDDLKLFAPSNLQLMELLKVTETFSSAIRMEFGVDKCAVMHVKRGEIVESVGTQLPDSINLRTLSAAETYKYLGMSEALGINVADMKQSLKERFFGRLKKVFNSLLSGGNKVRAFNGWVMPVLMYSFGILKWTQTELDALDRRVRTLLTAYRMHHPRSSVMRLYIPRKCGGRGFLNAKTLHNREICSLREYFLETDVGMHRDVVAVDKGLTPLSLAKENWRKPVVLDANDRMEVWQSKELHGRFFRALHGPDVNLLASVAWLRSGDLFGETEGFVCAIMDEVIMTNNYRRFIVKDGTVDICRACHRPGESIRHIISGCSRLANEEYLHRHNLVARIIHQQLALKYSLVESEVPYYRYVPDPVLENGHITLYWDRSIITDRTIVANKPDMVVVDRTERRAMIVDITVPHDGNLVKAEKDKQIKYIDLAREVVDMWDVDSAVIVPIVVSANGLIAKSLDQHLRRLSLGSWIKGLIQKAVLLDTARIVRRFLSLGP

SEQ ID NO: 13407 - protein, 1203 aa, Cosmia trapezina
MLTRSAARARPPPPDSSLSSASPPPVSSPTVSALTTPVAAVASSSSDEYFSPPSSPTPPRRRGRGRPPAGLGPRGQPAPNRVPAAGGNVLRMRWTQSINENVMRAYYGATEGGINLTAYRGRMLSLFQVLEPAVNVSAQRLSDQVRVIQHNHRLDNATLDRLRSEMQSSSASNPPASQNVMHVPAEIPLRANQRDEEENARAISADNLCNVEIRSALEDAIREYRFTSPDLRPRLPRLPMNKKNRALVCALDALLTNFIESSADLCDTHSILYCTAVAACRVACVKFPNTDRATRPKPAAPAWQCRIERRINEARVLIGKLICFREGNTRPRVMRFVRRAFSGTNISPQEYVSRVTERIDFLKQKVYAWANRIRRYRRRVDRYSQNRMFQSDERWVYRAWERPIPTQGVTDVCPPDNESMSAFWRSIWSVPVSHTEGDWMRVVEQACDSIPNMEAVTISPLDVACAVRPLPNWKSPGPDGLHNFWIKWLQRSHACLASQFQSSLETGSLSLLFTTGVTHLLHKSGSTAEPKNYRPITCLPTVYKVLTSILRAKIAHHIYNNSIMSVSQNGCRNESRGTKELLLIDMTISQQVRRSRRDLSTCWIDYKKAYDSVPHTWLIRVLELYKIDATLRTFLMSCMGQWKTVLLCPGCRRIPGIDEPIRIERGIFQGDSLSPLWFCLALNPLSTLLEDSGLGYRLRRGGQVISHLLYMDDLKLFAPNNLRLMELLKVTENFSSAIRMEFGVDKCAVMHVKRGEIMESVGTQLSDSIHLRSLSSTETYKYLGMSEALGINVANMKQSLKERFFGRLKKVFNSLLSGGNKVRAFNGWVMPVLMYSFGVLKWTQTELDALDRRVRTLLTAYRMHHPRSSVMRLYIPRKCGGRGFLNAKTLHNREICSLREYFLEADMGMHRDVVAVDKGLTPLSLAKENWRKPVVLDTNDRREVWQGKELHGRFFRALHGPDVDFLASVSWLRFGDLFGETEGFVCAIMDEVIMTNNYRKYIVKDGTVDICRACHRPGESIRHIVSGCSRLANGEYLHRHNLVARIIHQQLALQYNLVESEVPYYRYVPDPVLENGQATLYWDRSIITDRTIVANKPDIVVIDRRERRAIIVDIAVPHDENLVKAEKDKKIKYLDLAHEVVDMWDVDSAIIVPIIVTVNGLIAQSLDQHLRRLSLRGWIKGLIQRAVLLDTARIVRRFLSLEP

SEQ ID NO: 13408 - protein, 1205 aa, Cosmia trapezina
MLTRSRAQQLRNTQPTSSGSSLSSASQLPEPAPDVSQVIPAAAVASSSSDEYFSPPTTPPPVRRRGRGRPPASLGPRGPSASDRVPAPGGSVQRMRWTQTVNENVMRAYFGATEGGSNLTAYRGRMLSLFQVLEPAVNVSAQRLSDQVRVIQRNHMLDDVVLDRLRLESRNSRVTSVSPMVAVQLQNLPSASPRPDCVGEEDDSGAISVSSQCNVQLRSALEDAFREYRSAPPGLRPRLPRLPMHKKNKALVGALDSQLSNCFDGSKDLADTHSILYCAAVAACRVAHVKFPNSDRVPRPKPAVPAWQCRIERRIGEARALIGKLICFREGNTRPRVMRFVRRAFSGTDISPRDYFTCVTERIDFLKQKICAWANRIRRYRRRVERYTQNRTFQSDERWVYRAWERPDQGVADTRLPDDDAMCSFWRSIWSVPVSHTEGDWTREVERACDHIPQMGALTISPQDVARAVRPLPNWKSPGPDGLHNFWIKWFQRSHARLASQFQSALQSGSLPQFLTTGITHLLHKSGSTAEPRNYRPITCLPTVYKVLTSILRAKINKHIDTNSIMSASQNGCGNGSRGTKELLLIDMTINQQVRRSRKDLSTCWIDYKKAYDSVPHTWLMRVLELYKIDATLRTFLMSCMGQWRTVLRYPGCRNIQRNSEPIRIERGIFQGDSLSPLWFCLALNPLSTLLEDSGLGYRLRRGGQVISHLLYMDDLKLFAPNNLQLMELLKVTETFSSAIRMEFGVDKCAVMHVKRGDIVESVRTQLSDSIHLRSLSSLETYKYLGMSEALGINAADMKQSLRERFFGRLNKVLNSLLSGGNKVRAFNGWVMPVLMYSFGILKWTQTELDALDRRVRTLLTANRMHHPRSSVMRLYIPRKCGGRGFLNAKTLHNREVCSLREYFLEADVGMHRDVVSVDKGLTPLSLANENWRKPVVLDTNDRREVWQSKELHGRFYKVLHGPDVDFLASVSWLRFGDLFGETEGFVFAIMDEVMMTNNYRKYIVKDGTVDICRVCHRPGESIRHIISGCSRLANGDYLHRHNLVARIIHQQLALKYSLVESEVPYYRYVPDPVLENGNITLYWDRSIITDRTIVANKPDIVVIDRLERRTVIVDIAVPHDENLVKAEKDKQIKYLDLAREVVDMWDVDTAIIVPIVVTANGIIAKSLDQHLRRLSLGGWIKGLIQKAVLLDTARIVRRFLSQQP

SEQ ID NO: 13409 - protein, 868 aa, Mamestra brassicae
MRFVRRAFSGTDTSPRDYLTRVTERIDFLKQKIYAWANRICRYKRRVERYTQNRTFQSNERWVYRAWERPDQGVTDTRLPDDDVMCSFWRNIWSVPVSHTEGDWTREVERACDPIPEMGAITISPQDVARAVRPLPNWKSPGPDGLHNFWIKWFKRSHARLASQFQSALESGSLPQFLTTGITHLLHKSGSTAEPKNYRPITCLPTVYKVLTSILRAKINQHIETNSIMSASQNGCRNRSRGTKELLLIDVAISQQVRRSRRDLSTCWIDYKKAYDSVPHTWLMRVLELYKVDAVLRTFLMSCMGQWRTVLRYPGCRQIQANSDPIRIERGIFQGDSLSPLWFCLALNPLSTLLEGSGQGYRLRRGGQVISHLLYMDDLKLFAPNNLQLMKLLKVTETFSSAISMEFGVDKCAVMHVKRGEIMESVGTQLSDSIHLRSFSSTETYKYLGMSEALGINANDVKQSLKERFFGRLNKVLNSLLSGGNKVRAFNGWVMPVLMYSFGILKWTQTELDALDRRVRSLLTANRMHHPRSSVMRLYIPRKCGGRGFLNAKTLHNREICSLREFFLEADVGMHRDVVAVDKGLTALSLANENWRKPVVLDTNDRREVWQSKELHGRFYRVLHGPDVDFLASVAWLRFGDLFGETEGFVCAIMDEVMMTNNYRKYIVKDGTVDICRACHRPGESIRHIISGCSSLANGDYLHRHNLVARIIHQQLALKYNLVESEVPYYRYVPDPVLENGNCTLYWDRSIITDRTIIANKPDIVVIDRLERRAMIVDIAVPHDVNLVKTEKDKQTKYLDLAREVVDMWDVNTAVIVPIVVTANGIIAKSLDQHLKRLSLGSWIKGLIQKAVLLDTARIVRRFLSQGP

SEQ ID NO: 13410 - protein, 1197 aa, Mamestra brassicae
MLTRSRARHLATHPSPSASSLSSASPPPEPSPTVSAVTPAVAVASSSSDGYFSPPTTPPPARRRRGRRPPDGLGPRGPPASDRVPAPGGSVQRMRWTQSINENVMRSYFGATEGGTNLTAYRGRMLSLFQVLEPAVNVSAQRLSDQVRVIQRNRMLDDSVLDRLRMEMCGHVITPPSQTVAPPQSQISSHADEESNDRVTNVSTQCNEELRSALECAIREYRYIPPELRPRLPRLPMHNKNRALVAALDSQLSNYFDDCEDLTDTHSIMYCAAVAACRVAHVKMTNDRVTRPKPAVPAWQCRIERRIGGARALIGKLICFREGNTRPRVMRFVRRAFSGTDISPRDYMSRVTERIDFLKQKVYAWANRISRYRRRVERYTQNRTFRSNERWVYRVWEQPDQGVTDTRLPDDDAMCSFWRNIWSVPVSHTEGGWIREVERACDPLPEMGAITISPQDVARAVRPLPNWKSPGPDGLHNFWIKWLQRSHARLASQYQTALESGSLPEFLTTGVTHLLHKSGSTAEPKNYRPITCLPTVYKVLTSILRAKINNHINSNNIMSVSQNGCRNGSRGTKELLLIDMAISQQVRRSRKDLSTCWIDYKKAYDSVPHTWLMRVLELYKIDTMLRTFLMSCMGQWRTVLRYPGCRNIQRNSEPVRIERGIFQGDSLSPLWFCLALNPLSTLLENSGLGYRLKRGGQVISHLLYMDDLKLFAPSNLQLMELLKVTETFSSAIRMEFGVDKCAVMHVKRGEIMESVGSQLSVSINLRSLSSTETYKYLGMSEALGINVTDMKQSLRERFFGRLKKVFNRLLSGGNKVRAFNGCVMPVLMHSFGVLKWTQMELDALDRRVRTLLTAYRMHHPRSSVMRLYIPRKCGGRGFLNAKTLHNREICSLREYFLAVDVGMHRDVVTVDKGLTPLSLANENWRKPAVLDTNDRRAVWQSKELHGRFFRALHGPDVDQLASVAWLRFGDLFGETEGFVCAIMDEVIMTNNYRRFIVKDGTVDICRACHRPGESIRHIVSGCSRLANGEYLHRHNLVARIIHQQLALKYSLVESEVPYYRYAPDPVLDNGNITLYWDRSIITDRTIVANKPDIVVVDRIERRAMIVDITVPHDENLVKAEKDKQIKYIDLAREVVDMWDVDSAIIVPIVVSANGLIATSLDQHLRRLSLGSWIKGLIQKAVLLDTARIVRRFLSLEP

SEQ ID NO: 13411 - protein, 1200 aa, Mamestra brassicae
MLTRSRARAQTAQPTSSGSSLSSASQPPGPAPAVSPEIPVAAVASSSSDEYFSPPTTPPPARRRGRGRPPTSLGPRGPPASDRVPAIGGSVQRMRWTQTINENVMRSYYGATEGGTNLTAYRGRMLSLFQVLEPAVNVSAQRLSDQVRVILRNRMLDDAVLDRLRLESRSGRVSPASPPAAVQIQSSISPRSNNVGEDDDDGAISVSTQCNERLRSALEDAFREYRSTPPELRPRLPRLPMHNKNRALVCALDSQLTNCFDSSEDLADTHSILYCAAAAACRVAHVKFPNSDRATRPAVPAWQCRIERRIGEARALIGKLICFREGNTRRRVMRFVRRAFSGTDTSPRDYLTRVTERIDFLKQKIYAWANRIRRYKRRVERYTQNRTFQSNERWVYRAWERPDQGVTDTRLPDDDVMCSFWRNIWSVPVSHTEGDWIREVERACDPILEMGATTISPQDVARAVRPLPNWKSPGPDGLHNFWIKWFTGSHARLASQFQSALESGSLPQFLTTGITHLLHKSGSTAEPKNYRPITCLPTVYKVLTSILRAKINHHIESNSIMSASQNGCRNGSRGTKELLLMDIAISQQVRRFRKDLSTCWIDYKKAYDSVPHTWLMRVLELYKVDAVLRTFLMSCMGQWRTVLRYPGCRQIQVNGDPIRIERGIFQGDSLSPLWFCLALNPLSTLLEGSGQGYRLRRGGQVISHLLYMDDLKLFAPNNLQLMELLKVTETFSSAISMEFGVDKCAVMHVKRGEIMESVGTQLSDSIHLRSLSSTETYKYLGMSEALGINANDMKQSLKERFFGRLNKVLNSLLSGGNKVRAFNGWVMPVLMYSFGILKWTQTELDALDRRVRSLLTANRMHHPRSSVMRLYIPRKCGGRGFLNAKTLHNREICSLREFFLEADVGMHRDVVAVDKGLTALSLANENWRKPVVLDTNDRREVWQSKELHGRFYRVLHGPDVDFLASVAWLRFGDLFGETEGFVCAIMDEVMMTNNYRKYIVKDGTVDICRACHRPGESIRHIISGCSSLANGDYLHRHNLVARIIHQQLALKYNLVESEVPYYRYVPDPVLENGNCTLYWDRSIITDRTIVANKPDIVVIDRLERRAMIVDIAVPHDENLVKTEKDKQTKYLDLAREVVDMWDVNTAVIVPIVVTANGIIAKSLDQHLKRLSLGSWIKGLIQKAVLLDTARIVRRFLSQGP

SEQ ID NO: 13412 - protein, 1198 aa, Noctua fimbriata
MLTRSAAARRARLLPPDPSLSSASPPPESSPIVSAVTPAVAVASSSSDEYFSPPTTPPPVRRRGGRRPPDGLGPRGPPASDRVPAPGGSVQRMRWTQSINENVMRSYYGATEGGNNLTAFRVRMLSLFQVLEPAVNVSAQRLSDQVRVIQRNRMLDDTVLDRLRTEMQSSHVITPSAQAVVLPQSSTITNRDNDVSNDMVTNVSTQCNEEMRSALEGAIREYRFMQPDLRPRIPRLPMHNKNRALVAVLDSQLLNYFDNCEDLTDAHSVLYCAAVAACRVAHVNFFDDRATRPKPVVPPWQYRIERRIDGARALIGKLICFREGNTRPRVMRFVRRAFSGTDISPRDYMSRITERIDFLKQKVYAWASRIRRYKRRVDRYTQNRTFQRDERWVYRAWERPDQGVADTRIPDDDAMCSFWRSIWSVPVSHTEGEWTREVERACDLVPEMGAITISPQDVVRAVRPLPNWKSPGPDGLHNFWIKWFTRSHARLAILFQSALESGSLPEFLTTGITHLLYKSGSTAEPKNYRPITCLPTVYKVLTSILRAKINKHIDDNSIMSASQNGCRNGSRGTKELLLIDMAISQQVRRSRRDLSTCWIDYKKAYDSVPHTWLMRVLELYKVDATLRTFLMSCMGQWRTVLRYPGCQQIQRNSEPIRIERGIFQGDSLSPLWFCLALNPLSTLLEDSGLGYQLRRGGQVISHLLYMDDLKLFAPNDLQLMELLKVTETFSSAIRMEFGVDKCAVMHVKRGEIVESVGTQLSDSINLRSLSATETYKYLGMSEALGINVADMKQSLKERFFGRLKKVFNSLLSGGNKVRAFNGWVMPVLMYSFGILKWTQTELDALDRRIRTLLTAYRMHHPRSSVMRLYIPRKCGGRGFLNAKTLHNREICSLREYFLETDVGMHRDVVAVDKGLTPLSLAKENWRKPLVLDTNDRMEVWQSKELHGRFFRALHGPDVDLSASVAWLRSGDLFGETEGFVCAIMDEVMMTNNYRRFIVKDGTVDICRACHRPGESIRHIISGCSRLANGEYLHRHNLVARIIHQQLALKYNLVESEVPYYKYVPDPVLENGSITLYWDQSIITDRTIVANKPDIVVVDRSERRTMIVDITVPHDENLVKAEKDKKIKYLDLAREVVDMWDVDSAIIVPIVVSAHGLIAKSLDQYLRRLSLGSWIKGLIQKAVLLDTARIVRRFLSLEP

SEQ ID NO: 13413 - protein, 1198 aa, Noctua fimbriata
MLTRAAAKRARLSPPDPSLSSASPPPESSPVMSAVTPAVAVASSSSDEYFSPPTTPPPVRRRGGRRPPDGLGPRGPPASDRVPAPGGSVQRMRWTQSINENVMRSYYGATDGGNNLTAYRVRMLSLFQVLEPAVNVSAQRLSDQVRVIQRNRMLDDTVLDRLRTEMQSSHVIATPPPQAVVPPQSTIIPNRDNDVSNDIVTNVSTQCNEEMRSALEGAIREYRFMQPDLRPRIPRLPMHNKNRALVAVLDSQLSNYFDNCEDLTDAHSILYCAAVAACRVAHVKFSNDRATRPKPAVPPWQYRIERRIGGARALIGKLICFREGNTRPRVMRFVRRAFSGTDISPRDYMSRITERIDFLKQKVYAWANRIRRYKRRVDRYTQNRTFQRDERWVYRAWERPDQGVADTRLPDDDAMCSFWRSIWSVPVSHTEGEWTQGVERACDLVPEMGAITISPQDVVRAVRPLPNWKSPGPDGLHNFWIKWFTRSHARLAILFQSALESGSLPEFLTTGITHLLHKSGSTAEPKNYRPITCLPTVYKVLTSILRAKINKHIDDNSIMSASQNGCRNGSRGTKELLLIDMAISQQVRRSRSDLSTCWIDYKKAYDSVPHTWLMRVLELYKVDATLRTFLMSCMGQWRTVLRYPGCRQIQRNSEPIRIERGIFQGDSLSPLWFCLALNPLSTLLEDSGLGYRLRRGGQVISHLLYMDDLKLFAPNDLQLMELLKVTETFSSAIRMEFGVDKCAVMHVKRGEIVESVGTQLSDSINLRSLSATETYKYLGMSEALGINVADMKQSLKERFFGRLKKVFNSLLSGGNKVRAFNGWVMPVLMYSFGILKWTQTELDALDRRVRTLLTAYRMHHPRSSIMRLYIPRQCGGRGFLNAKTLHNREICSLREYFLETDVGMHRDVVAVDKGLTPLSLAKENWRKPLVLDTNDRMEVWQSKELHGRFFRALHGPDVDLSASVAWLRSGDLFGETEGFVCAIMDEVMMTNNYRRFIVKDGTVDICRACHRPGESIRHIISGCSRLANGEYLHRHNLVARIIHQQLALKYNLVESEVPYYKYVPDPVLENGSITLYWDQSIITDRTIVANKPDIVVVDRSERRTMIVDITVPHDENLVKAEKDKKIKYLDLAREVVDMWDVDSAIIVPIVVSAHGLIAKSLDQYLRRLSLGSWIKGLIQKAVLLDTARIVRRFLSLEP

SEQ ID NO: 13414 - protein, 1198 aa, Noctua fimbriata
MLTRSAARRARLSPPDPSLSSASPPPESSPVVSAVTPAVAVASSSSDEYFSPPTTPPPVRRRGGRRPPDGLGPRGPPASDRVPAPGGSVQRMRWTQSINANVMRAYYGATEGGNNLTAYRVRMLSLFQVLEPAVNVSAQRLSDQVRVIQRNRMLDDTVLDRLRTEMQSSHVIATPPPQAVVPPQSTIIPNRDNDVSNDIVTNVSTQCNEEMRSALEGAIREYRFMQPDLRPRIPRLPMHNKNRALVAVLDSQLSNYFDNCEDLTDAHSILYCAAVAACRVAHVKFSDDRATRPKPAVPPWQYRIERRIGGARALIGKLICFREGNTRPRVMRFVRRAFSGTDISPRDYMSRITERIDFLKQKVYAWANRIRRYKRRVDRYTQNRTFQRDERWVYRAWERPDQGVADTRLPDDDAMCSFWRSIWSVPVSHTEGEWTQGVERACDLVPEMGAITISPQDVVRAVRPLPNWKSPGPDGLHNFWIKWFTRSHARLAILFQSALESGSLPEFLTTGITHLLHKSGSTAEPKNYRPITCLPTVYKVLTSILRAKINKHIDDNSIMSASQNGCRNGSRGTKELLLIDMAISQQVRRSRSDLSTCWIDYKKAYDSVPHTWLMRVLELYKVDATLRTFLMSCMGQWRTVLRYPGCRQIQRNSEPIRIERGIFQGDSLSPLWFCLALNPLSTLLEDSGLGYRLRRGGQVISHLLYMDDLKLFAPNDLQLMELLKVTETFSSAIRMEFGVDKCAVMHVKRGEIVESVGTQLSDSINLRSLSATETYKYLGMSEALGINVADMKQSLKERFFGRLKKVFNSLLSGGNKVRAFNGWVMPVLMYSFGILKWTQTELDALDRRVRTLLTAYRMHHPRSSVMRLYIPRKCGGRGFLNAKTLHNREICSLREYFLETDVGMHRDVVAVDKGLTPLSLAKENWRKPLVLDTNDRMEVWQSKELHGRFFRALHGPDVDLSASVAWLRCGDLFGETEGFVCAIMDEVMMTNNYRRFIVKDGTVDICRACHRPGESIRHIISGCSRLANGEYLHRHNLVARIIHQQLALKYNLVESEVPYYKYVPDPVLENGSITLYWDQSIITDRTIVANKPDIVVVDRSERRTMIVDITVPHDENLVKAEKDKKIKYLDLVREVVDMWDVDSAIIVPIVVSAHGLIAKSLDQYLRRLSLGSWIKGLIQKAVLLDTARIVRRFLSLEP

SEQ ID NO: 13415 - protein, 1198 aa, Noctua fimbriata
MLTRSAARRARLSPPDPSLSSASPPPESSPVVSAVTPAVAVASSSSDEYFSPPTTPPPVRRRGGRRPPDGLGPRGPPASDRVPAPGGSVQRMRWTQSINANVMRAYYGATEGGNNLTAYRVRMLSLFQVLEPAVNVSAQRLSDQVRVIQRNRMLDDTVLDRLRTEMQSSHVIATPPPQAVVPPQSTIIPNRDNGVSNDMVTNVSTQCNEEMRSALEGAIREYRFMQPDLRPRVPRLPMHNKNRALVAVLDSELSNYFDNCEDLTDAHSILYCAAVAACRVAHVKFYDDRATRPKPVVPPWQYRIERRIGGARALIGKLICFREGNTRPRVMRFVRRAFSGTDISPRDYMSRITERIDFLKQKVYAWASRIRRYKRRVDRYTQNRTFQRDERWVYRAWERPDQGVADTRIPDDDAMCSFWRSIWSVPVSHTEGEWTREVERACDLVPEMGAITISPQDVVRAVRPLPNWKSPGPDGLHNFWIKWFTRSHARLAILFQSALESGSLPEFLTTGITHLLHKSGSTAEPKNYRPITCLPTVYKVLTSILRAKINKHIDDNSIMSASQNGCRNGSRGTKELLLIDMAISQQVRRSRSDLSTCWIDYKKAYDSVPHTWLMRVLELYKVDATLRTFLMSCMGQWRTVLRYPGCRQIQRNSEPIRIERGIFQGDSLSPLWFCLALNPLSTLLEDSGLGYRLRRGGQVISHLLYMDDLKLFAPNDLQLMELLKVTETFSSAIRMEFGVDKCAVMHVKRGEIVESVGTQLSDSINLRSLSATETYKYLGMSEALGINVADMKQSLKERFFGRLKKVFNSLLSGGNKVRAFNGWVMPVLMYSFGILKWTQTELDALDRRVRTLLTAYRMHHPRSSVMRLYIPRKCGGRGFLNAKTLHNREICSLREYFLETDVGMHRDVVAVDKGLTPLSLAKENWRKPLVLDSNDRMEVWQSKELHGRFFRALHGPDVDLSASVAWLRCGDLFGETEGFVCAIMDEVMMTNNYRRFIVKDGTVDICRACHRPGESIRHIISGCSRLANGEYLHRHNLVARIIHQQLALKYNLVESEVPYYKYVPDPVLENGSITLYWDQSIITDRTIVANKPDIVVVDRSERRTMIVDITVPHDENLVKAEKDKKIKYLDLAREVVDMWDVDSAIIVPIVVSAHGLIAKSLDQYLRRLSLGSWIKGLIQKAVLLDTARIVRRFLSLEP

SEQ ID NO: 13416 - protein, 1188 aa, Noctua fimbriata
MLTRAAAKRARLSPPDPSLSSASPPPKSSPVVSAVTPAVAVASSSSDEYFSPPTTPPPDGLGPRGPPASDRVPAPGGSVQRMRWTQSINANVMRAYYGATEGGNNLTAYRVRMLSLFQVLEPAVNVSAQRLSDQVRVIQRNRMLDDTVLDRLRTEMQSSHVIATPPPQAVVPPQSTIIPNRNNDVSNDIVTNVSTQCNEEMRSALEGAIREYRFMQPDLRPRIPRLPMHNKNRALVAVLDSQLSNYFDNCEDLTDAHSILYCAAVAACRVAHVKFSDDRATRPKPAVPPWQYRIERRIGGARALIGKLICFREGNTRPRVMRFVRRAFSGTDISPRDYMSRITERIDFLKQKVYAWANRIRRYKRRVDRYTQNRTFQRDERWVYRAWERPDQGVADTRLPDDDAMCSFWRSIWSVPVSHTEGEWTQEVERACDLVPEMGAITISPQDVVRAVRPLPNWKSPGPDGLHNFWIKWFTRSHARLAILFQSALESGSLPEFLTTGITHLLHKSGSTAEPKNYRPITCLPTVYKVLTSILRAKINKHIDDNSIMSASQNGCRNGSRGTKELLLIDMAISQQVRRSRSDLSTCWIDYKKAYDSVPHTWLMRVLELYKVDATLRTFLMSCMGQWRTVLRYPECRQIQRNSERIRIERGIFQGDSLSPLWFCLALNPLSTLLEDSGLGYRLRRGGQVISHLLYMDDLKLFAPNDLQLMELLKVTETFSSAIRMEFGVDKCAVMHVKRGEIVESVGTQLSDSINLRSLSATETYKYLGMSEALGINVADMKQSLKERFFGRLKKVFNSLLSGGNKVRAFNGWVMPVLMYSFGILKWTQTELDALDRRVRTLLTAYRMHHPRSSVMRLYIPRKCGGRGFLNAKTLHNREICSLREYFLETDVGMHRDVVAVDKGLTPLSLAKENWRKPLVLDTNDRMEVWQSKELHGRFFRALHGPDVDLSASVAWLRSGDLFGETEGFVCAIMDEVMMTNNYRRFIVKDGTVDICRACHRPGESIRHIISGCSRLANGEYLHRHNLVARIIHQQLALKYNLVESEVPYYKYVPDPVLENGSITLYWDQSIITDRTIVANKPDIVVVDRSERRTMIVDITVPHDENLVKAEKDKKIKYLDLAREVVDMWDVDSAIIVPIVVSAHGLIAKSLDQYLRRLSLGSWIKGLIQKAVLLDTARIVRRFLSLEP

SEQ ID NO: 13417 - protein, 1198 aa, Noctua fimbriata
MLTRAAAKRARLSPPDPSLSSASPPPESSPVMSAVTPAVAVASSSSDEYFSPPTTPPPVRRRGGRRPPDGLGPRGPPASDRVPAPGGSVQRMRWTQSINENVMRSYYGATEGGNNLTAYRVRMLSLFQVLEPAVNVSAQRLSDQVRVIQRNRMLDDTVLDRLRTEMQSSHVIATPPPQAVVPPQSTIIPNRDNDVSNDIVTNVSTQCNEEMRSALEGAIREYRFMQPDLRPRIPRLPMHNKNRALVAVLDSQLSNYFDNCEDLTDAHSILYCAAVAACRVAHVKFSNDRATRPKPAVPPWQYRIERRIGGARALIGKLICFREGNTRPRVMRFVRRAFSGTDISPRDYMSRITERIDFLKQKVYAWANRIRRYKRRVDRYTQNRTFQRDERWVYRAWERPDQGVADTRLPDDDAMCSFWRSIWSVPVSHTEGEWTQGVERACDLVPEMGAITISPQDVVRAVRPLPNWKSPGPDGLHNFWIKWFTRSHARLAILFQSALESGSLPEFLTTGITHLLHKSGSTAEPKNYRPITCLPTVYKVLTSILRAKINKHIDDNSIMSASQNGCRNGSRGTKELLLIDMAISQQVRRSRRDLSTCWIDYKKAYDSVPHTWLMRVLKLYKVDATLRTFLMSCMGQWRTVLRYPGCRQIQRNSEPIRIERGIFQGDSLSPLWFCLALNPLSTLLEDSGLGYRLRRGGQVISHLLYMDDLKLFAPNDLQLMELLKVTETFSSAIRMEFGVDKCAVMHVKRGEIVESVGTQLSDSINLRSLSATETYKYLGMSEALGINVADMKQSLKERFFGRLKKVFNSLLSGGNKVRAFNGWVMPVLMYSFGILKWTQTELDALDRRVRTLLTAYRMHHPRSSIMRLYIPRKCGGRGFLNAKTLHNREICSLREYFLETDVGMHRDVVAVDKGLTPLSLAKENWRKPLVLDTNDRMEVWQSKELHGRFFRALHGPDVDLSASVAWLRSGDLFGETEGFVCAIMDEVMMTNNYRRFIVKDGTVDICRACHRPGESIRHIISGCSRLANGEYLHRHNLVARIIHQQLALKYNLVESEVPYYKYVPDPVLENGSITLYWDQSIITDRTIVANKPDIVVVDRSERRTMIVDITVPHDENLVKAEKDKKIKYLDLAREVVDMWDVDSAIIVPIVVSAHGLIAKSLDQYLRRLSLGSWIKGLIQKAVLLDTARIVRRFLSLEP

SEQ ID NO: 13418 - protein, 1022 aa, Atethmia centrago
MQNLPGGSPRPDHADEEDDDEAISVSSQCNVRLRSALDDAFREYRSTPPGLRPRLPRLLMHKKNKALVCALDSQLSNYFDSSKDLTDTHSILYCAAVAACRVAQVKFPNSDRAPRPKPAVPAWQSRIERRIGETRALIGKLICFREGNTRPRVMRFVKRAFAGTDIRSSRDYLTRVTERIDFLKQKICAWANRIRRYRRRSERYTQNRTFQNDERWVYRTWERPDQGVADTRLPDDDAICSFWRNIWSVPVNHTEGDWTKRIERACDLIPEMGALTILPQDVAHAVRPLPNWKSPGPDGLHNFWIKWFQRSHARLASQFQSALESGSLPLFLTTGITHLLHKSGSTAEPKNYRPITCLPTVYKVLTSILRAKINKHIETNLIMSASQNGCKNGSRGTKELLLIDIAISQQVRRSRKDLSTCWIDYKKAYDSVPHTWLMRVLELYKVDATLRTFLMSCMGQWRTVLCYPGCRYIQRNSEPIRIKRGIFQGDSLSPLWFCLALNPLSTLLENSGLGYRLRRGGQVISHLLYMDDLKLFAPNNLQLMELLKVTKTFSSAIRMEFGVDKCAVMHVKRGGIVESVGTQLSDSIHLRSLSSTETYKYLGMSEALGINAADMKQSLRERFFGRLNKVLNSLLSGGNKVRAFNGWVMPVLMYSFGILKWTQTELDALDRRVRTLLTTNRMHHPRSSVMRLYIPRKCGGRGFLNAKTLHNREICSLREYFLETDVVMHRDVVSVDKGLTPLSLADENWRKPIILDTNDRREVWQSKELHGRFYRVLHGPDVDLLASVSWLRFGDLFGETEGFVFAIMDEVIMTNNYRKYIVKDGTVDICRACHRPGESIRHIISGCSRLANGDYLHRHNLVAKIIHQQLALKYSLVESEVPYYRYAPDPVLENGNITLYWDRSIITDRTIVANKPDIVVIDRLTRRTMIIDIAVPHDENLVKAEKDKQIKYLDLAHEVVDMWDVDTAIIVPIVVTANGIIPKSLDQHLKRLSLGSWIKGLIQRAVLLDTARIVRRFLSQEP

SEQ ID NO: 13419 - protein, 1169 aa, Atethmia centrago
MLTRSAAVRARLPPPDSSLSSASPPPVPSPTMCAVITPTAAVASSSSDEYFSPPTTPPPVRRRGGRRPPDGLGSRGPPASDRVPAPGGSVKRMRWTQSVNENVMRSYYGATEGGNNLTAYRVRMLSLFQVLEPAVNVSAQRLSDQVRVIQRNHMLDDTVLDRLRSEMQRSHVIVPPSQTVVLSPQLSTNQADEGSDDRATNVSTQCNVELRSALEDAIREYRLMSPELRPRLPRLPMHKKNRALVAALDSQLSNYFKDSRTTRPKPTVPAWQCRIESRIGGARALIGKLICFREGNTRPRVMRFVRRAFSGTDIGPQDYMTRVTERIDFLKQKVYAWANRIRRYKRRVERYTQNRTFQSDERWVYRGWERPDQDVTDTRLPDDDVMCSFWRSIWSVPVSHTEGDWARKVERACDPIPEMGAITICPQDVARAVRPLPNWKSPGPDGLHNFWLKWFLRSHARLAAQYQTALESGSLPQFLTTGVTHLLHKSGSTAEPKNYRPITCLPTVYKLLTSILRAKINKHIDTNSIMSASQNGCRNGSRGTKELLLIDMTISQQVRHSRKDLSTCWIDYKKAYDSVPHTWLMRVLELYKVDATLRTFLISCMGQWRTVLRYPGCRNIQRNSEPIRIERGIFQGDSLSPLWFCLALNPLSTLLEDSGLGYSMRRGGQVISHLLYMDDLKLFASNNLQLMELLKITESFSSAIRMEFGVDKCTVMHVKRGKIVESVGTQPSDSINLRTLSASETYKYLGMSEALDINVTDMKQSLKERFFGRLKKVFNSLLSGGNKVRAFNGWVMPVLMYSFGILKWTQTELDALDRRVRTLLTAYRMHHPRSSVMRLYIPRKCEGRGFLNAKTLHNREVCSLREYFLEADVGMHRDVVAVDKGLTPLSLAKENWRKLVVLDTNDRREVWQSKELHGRFFRALHEPDVDFQASVAWLRFGDLFGETEGFDCAIMDEVIMTKNYRRFIVKDGTVDVCRACHRPGESIRHIISGCSRLANEEYLHRHNLVARIIHQQLALKYSLVESEVPYYRYVPDPVLDNGNITLYWDRSIITDRTIVANKPDIVVVDRTERRAMIVDITVPHDGNLVKAEKDKQIKYLDLAREVVDMWDVDSAIIVPIVVSANGLIAKSLDQHLKRLTLDGWIKGLIQKAVLLDTARIVRRFLSLEP

SEQ ID NO: 13420 - protein, 1198 aa, Atethmia centrago
MLTRSATVRARLPPPDSSLSSASPPPVPSPTVCAVTTPTAAVASSSSDEYFSPPTTPPPVRRRGGRRPPDGLGSRGPPASDRVPAPGGSVKRMRWTQSVNENVMRSYYGATEGGNNLTAYRVRMLSLFQVLEPAVNVSAQRLSDQVRVIQRNHMLDDTVLDRLRSEMQRSHVIVPPSQTVVHSPQLSTNQADEGSDDRATNVSTQCNVELRSALEDAIREYRLMSPELRPRLPRLPMHKKNRALVAALDSQLSNYFDDCEDLTDTHSILYCAAVAVCRVAHVKFAKDSRTTRPKPTVPAWQCRIESRIGGARALIGKLICFREGNTRPRVMRFVRRAFSGTDIGPHDYMTRVTERIDFLKQKVYAWANRIRRYKRRVERYTQNRTFQSDERWVYRGWERPDQDVTDTRLPDDDVMCSFWRSIWSVPVSHTEGDWARKVERACDPIPEMGAITICPQDVARAVRPLPNWKSPGPDGLHNFWLKWFLRSHARLAAQYQTALESGSLPQFLTTGVTHLLHKSGSTAEPKNYRPITCLPTVYKLLTSILRAKINKHIDTNSIMSASQNGCRNGSRGTKELLLIDMTISQQVRRSRKDLSTCWIDYKKAYDSVPHTWLMRVLELYKVDATLRTFLISCMGQWRTVLRYPGCRNIQRNSEPIRIERGIFQGDSLSPLWFCLALNPLSTLLEDSGLGYRMRRGGQVISHLLYMDDLKLFASNNLQLMELLKITESFSSAIRMEFGVDKCAVMHVKRGKIVESVGTQLSDSINLRTLSASETYKYLGMSEALGINVTDMKQSLKERFFGRLKKVFNSLLSGGNKVRAFNGWVMPVLMYSFGILKWTQTELDALDRRVRTLLTAYRMHHPRSSVMRLYIPRKCGGRGFLNAKILHNREVCSLREYFLEADVGMHRDVVAVDKGLTPLSLAKENWRKLVVLDTNDRREVWQSKELHGRFFRALHEPDVDFQASVAWLRFGDLFGETEGFVCAIMDEVIMTKNYRRFIVKDGTVDVCRACHRPGESIRHIISGCSRLANEEYLHRHNLVARIIHQQLALKYSLVESEVPYYRYVPDPVLDNGNITLYWDRSIITDRTIVANKPDIVVVDRTERRAMIVDITVPHDGNLVKAEKDKQIKYLDLAREVVDMWDVDSAIIVPIVVSANGLLAKSLDQHLKRLTLDGWIKGLIQKAVLLDTARIVRRFLSLEP

SEQ ID NO: 13421 - protein, 1197 aa, Chilo suppressalis
MILRPRRTRKTRPPSPDSSLSSALQPPPPTEETPSVATTASSSSNEYFSPPTSPTPVRRPGRPRPPASLGSRSHPVPNRAPAAGGCVPRMRWTQTINENVMRAYYGSTEGGTNLTAYRVKMHALFQELEPALNVSAQRLSDQVRVIQRSYRLDDTVLDRLRLEMLSSRVGPVPSLTAVETPARAILPRYEDSDVEEVGRAATVSTQYSDTVRSALEDAIREYRMAPPELRPRLPRLPMHKKNKALVGVLDSLLSSYFESSQNLGDTHSILYCAAVAACRVANVKFPDMTARPKQALPVWQCRIERRIAEARTLIGKLICFREGNTRPRVMRFVRRAFLGTDISPRDYLSCATERIDFLKQRVCAWASRIRRYKRRVERYNLNRMFQCDEKWVYRAWEQPIQGVADGGRPDDSATNSFWRSIWSAPVSHIEGDWMGDVEQACDGISPMEPITITVEDVTCAVSSVPNWKSPGPDGMHNFWLKWLRTSHACLASQFQSCLDSGSLPQLLTTGITHLLHKSGSTMEPKNYRPITCLPTVYKLLTSILRAKILNHIVQNSVMNATQNGCRNGSRGTKELLLIDMAISQQARRSRKNLSTCWIDYKKAYDSVPHTWLMRVLELYKVDTTLRTFLMSCMGQWRTVLCYPGCRPIRENDELIRIERGIFQGDSLSPLWFCLAMNPLSTLLEASGLGFCLRRGGQIISHLLYMDDLKLFAPTKLQLMELLKVTETFSKDINMEFGVDKCAVMHVKRGEIVESEELQLSDSINIRSLSADDTYKYLEMSEGLGINGADMKQSVQERFFGRLNKVLKSVLSGGNKVRAFNGWVMPVLMYSFGILKWTQTELNALDRRVRTLLTANRMHHPRSSVMRLYIPRKCGGRGFLNAKTLHNREVCSLREYFLKADVGMHRDVVAVDSGLTPLSLAKENWRKPVIMTTDERREVWQGKELHGRFFRALHRPEVDLKASMAWLRFGNLFGETEGFVCAIADEVMMTNNYRKYILKDGTVDICRACHCPGESIRHILSGCSRLANGEYLLRHNQVARIIHQQLALKYNLVASEVPYYRYVPDPVLESGYITLYWDRSIITDRTIVANKPDIVMIDREKRLAMIVVVAIPHDENLMKAEKDKQIKYLDLAHEVVAMWDVDSAIIVPIVVTVNGLIAKSFDCHLRRQELGDWIKGLIQKAVLLDTARIVRRFLSLGP

SEQ ID NO: 13422 - protein, 1198 aa, Mesoligia furuncula
MLTRLAARRARLLPPDSSLSSASPPPVPSPTVSAVMTPAAAVASSSSDEYFSPPTTPSPARRRRGRRPPDGLGLRGPPASDRVPALGGSVQRMRWTQSINENVMRSYYGATEGGNILTAYRVRMLSLFQVLEPAVNVSAQRLSDQVRVIQRNHMLDDTVLDRLRSEMQSSHVIAPQSQTAVILPQPNISHTDEGSNDRAINVSTQCNEELRSALEDAIQEYRFMSPELRPRLPRLPMHNKNRALVAVLDSQLSKYFDTCEDLIDTHSILYCAAVAACRVAHVKFANDSRATRPKQAVPAWQCRIERRIGGARTLIGKLICFREGNTRPRVMHFVRRAFSGTDISPQDYMSCVTERIDFLKQKVYAWANRIRRYRRRVERYTQNRTFQSDERWVYRGWERPDQGVAETCLPDDNAMCSFWRSIWSVPVSHTEGDWAREVERACDPIPEMGAITICPQDVARAVRPLPNWKSPGPDGLQNFWIKWFPRSHARLASQFQTALESGSLPQFLTTGITHLLHKSGSTAEPKNYRPITCLPTVYKVLTSILRTKINKHIDTNSIMSASQNGCRNGSRGTKELLLIDMAISQQVRRFRKDLSTCWIDYKKAYDSVPHTWLMRVLELYKVDTTLRTFLMSCMGQWRTVLRYPGCRNIQRNSEPIRIERGIFQGDSLSPLWFCLALNPLSTLLEDSGLGYRLRRGGQVISHLLYMDDLKLFAPNTLQLMELLKITETFSSAIRMEFGVDKCAVMHVKRGEIVESVGTQLLDSTNLRALSASETYKYLGMSEALGINVTDMKQSVKERFFGRLKKVLNSLLSGGNKVRAFNGWVMPVLMYSFGILKWTQTELDALDRRVRTLLTANRMHHPRSSVMRLYIPRKCGGRGFLNAKTLHNREICSLREYFLETNVGMHRDVVIVDKGLTPLSLAKENWRKPVVLDTNDRMEVWQSKELHGRFLRALRGPDVDLQASVAWLRFGNLFGETEGFVCAIMDEVMMTNNYRRFIVKDGTVDICRACHRPGESIRHIISGCSRLANGEYLHRHNLVARIIHQQLALKYNLVESEVPYYRYVPDPVLENGNITLYWDRSIITDRTIVANKPDIVVVDRSERRAMIVDITVPHDENLVKAEKDKQIKYLDLAREVVDMWDVDTAIIVPIVVTANGLIAKSLDQHLRRLSLGSWIKGLIQRAVLLDTARIVRRFLSLEP

SEQ ID NO: 13423 - protein, 1198 aa, Mesoligia furuncula
MLTRSALRKARLPPPDSSLSSASPPPVPSLTVSAVTTPAAAVASSSSDEYFSPPTTPPPARRRGGRRPPDGLGPRGPPASDRVPAPGGSVQRMRWTQSINENVMRSYYGATEGGNNLTAYRVRMLSLFQVLEPTVNVSAQRLSDQVRVIQRNHMLDDTVLDRLRNEMQSSHVIAPQSQTAVVLPQSNTSHADEGSNDRATNVSTQCNEELRSTLEDAIQEYRFMSPELRPRLPRLPMHNKNRALVAVLDSQLSNYFDGCEDLTDTHSILYCAAVAACRVAHVKFANDSRATRPKPAVPAWQCRIERRIGEARALIGKLTCFREGNTRPRVMRFVRRAFLGTDISPQDYMSCVTERIDFLKQKVYAWANRIRRYKRRVERYTQNRTFQSDQRWVYRDWERPDQSVTDTCLPDDDAMCSFWRSIWSVPVSHTESDWTREVERACDPIPEMGAITICPQDVARAVRPLPNWKSPGPDGLHNFWIKWFTRSHARLASQFQTALESGSLPQFLTTGITHLLHKSGSTAEPKNYRPITCLPTVYKVLTSILRVKIDKHINTNSIMSASQNGCRNGSRGTKELLLIDMTISQQVRRFRKDLSTCWIDYKKAYDSVPHTWLMRVLRLYKVDTTLCTFLMSCMGQWRTVLRYPGCRNIQRNSEPIRIERGIFQGDSLSPLWFCLALNPLSTLLEDSGLGYRLRRGGQVISHLLYMDDLKLFAPNNLQLMELLKITETFSSAIRMEFGVDKCAVMHVKRGEIVESVGTQLSDSTNLRALSASETYKYLGMSEALGINVTDMKQSLKERFFGRLKKVFNSLLSGGNKVRAFNGWVMPVLMYSFGILKWTQTELDALDRKVRTLLTANRMHHPRSSVMRLYIPRKCGGRGFLNAKTLHNREICSLREYFLETDVGMHRDVVAVDKSLTPLSLGKENWRKPVVLDTNDRMEVWQSKELHGRFFRALHGPDVDLLASVAWLRFGDLFGETEGFVCAIMDEVMMTNNYRRFIVKDGTVDICRACHWPGESIRHIISGCSRLANGEYLHRHNLVARIIHQQLALKYSLVESEVPYYRYVPDPVLENGNITLYWDRSIITDRTIIANKPDIVVVDRSERHAMIVDITVPHDENLVKAEKDKQIKYLDLAHEVVDMWDVDSAIIVPIVVTANGLIAKSLDQHLKRLSLGSWIKGLIQKAVLLDTARIVRRFLSLEP

SEQ ID NO: 13424 - protein, 880 aa, Spilarctia lutea
MSFRSGNTRPRVMRFVKRAFLGTTISPQEYMSCVTERIDFLKQKVYAWANRIRRYRKRVDRYNQNRMFQRNEKWVYRKWENLSPCMSDGQVPDENATNSFWRNMWSVPVTHTEGDWCRDVERSCESLLPMEPISIDEEDVSCAVRSLPNWKAPGPDGLHNFWLKWFRSSHACLASQFQTALDSGSLPQFLTTGITHLLYKSGDAMDPKNFRPITCLPTLYKLLTSILRLKITTHINHNSILSISQNGCRSGTRGTKELLIIDMTISQQVRRNRKSLATCWIDYKKAFDSVPHTWLLKVLELYKIDTTLCTFLKVCMGQWRTALRYPGCRQSAMNDVLIKIERGIFQGDSLSPLWFCLALNPLSTLLEGSGLGYRLQKDDRVISHLFYMDDLKLLAPTKLQLTALLKVTENFSNSIKMEFGVDKCAVMYVKKGEIMESEGIELSDSTKLRSLSATETYKYLGFSQSLGMPESDMKQTLRERFFSRLKKVLKSLLSGGNKVRACNGWVMPVLMYSFGVLRWTQTELDAIDRRVRTLLTAFRMHHPRSSVMRLYIPRRLGGRGLLNIKTLHNREVYNLREYFLQTDVGVHRSVVTVDTGLTPLALAKENWRKPVVLSTNDRREVWKGKELHGRFYRALHGPDIDFKTSTSWLRYGDLFGETEGFVCAIMDEVIMTNNYRKYILKDGTVDICRACHRPGESIRHIISGCSRLANGEYLHRHNQVARIVHQQLALKYHLVNSEVPYYRYVPDPVLENGRATLYWDRSIITDRTIVANKPDIVVIDRLERRAIIIDIAVPHDENLVKVEKEKQIKYLDLSHEIVDMWNVDSVIIVPIVVSAHGLIAKSLDQHLKRLTLEGWIKGLIQKAVLLDTARIVRRFLSLEP

SEQ ID NO: 13425 - protein, 1199 aa, Spilarctia lutea
MLTRARRRAQLSPPDSSLRSALPSPEEAIEVPAGAEASSSSSSDEFFSPPTSPIPVRRQGRGRPPTSLGSRGPLTSNRAPAAGGDVRRMKWTHSINENVMRAYFRATELGTNLTAYRVRLVSLFQELEPAVNVSAQRLSDQVRAIQRCHLLDDAALERIRSDIRNSLTVPSSSHVLNVVTNSTPQVPQNDDISELVDSEIISVSTQYNDRIRSTLEDAIREYRYVNLNNRPRLSRLPIHKRNLALVSALDSLLPKYFSNSEDLSDTHSILYCAAIAVCRVAGVKFAEYTTTTRQENTLPAWQYRIERRIAEARTLIGKLMSFRSGNTRPRVMRFVKRAFLGTTISPQEYMSCVTERIDFLKQKVYAWANRIRRYRKRVDRYNQNRMFQRNEKWVYRKWENLSPCMSDGQVPDENATNSFWRNMWSVPVTHTEGDWCRDVERSCESLLPMEPISIDEEDVSCAVRSLPNWKAPGPDGLHNFWLKWFRSSHACLASQFQTALDSGSLPQFLTTGITHLLYKSGDAMDPKNFRPITCLPTLYKLLTSILRLKITTHINHNSILSISQNGCRSGTRGTKELLIIDMTISQQVRRNRKSLATCWIDYKKAFDSVPHTWLLKVLELYKIDTTLCTFLKVCMGQWRTALRYPGCRQSAMNDVLIKIERGIFQGDSLSPLWFCLALNPLSTLLEGSGLGYRLQKDDRVISHLFYMDDLKLLAPTKLQLTALLKVTENFSNSIKMEFGVDKCAVMYVKKGEIVESEGIELSDSTKLRSLSATETYKYLGFSQSLGMPESDMKQTLRERFFSRLKKVLKSLLSGGNKVRACNGWVMPVLMYSFGVLRWTQTELDAIDRRVRTLLTAFRMHHPRSSVMRLYIPRRLGGRGLLNIKTLHNREVYNLREYFLQTDVGVHRSVVTVDTGLTPLALAKENWRKPVVLSTNDRREVWKGKELHGRFYRALHGPDIDFKTSTSWLRYGDLFGETEGFVCAIMDEVIMTNNYRRYILKDGTVDICRACHRPGESIRHIISGCSRLANGEYLHRHNQVARIVHQQLALKYHLVNSEVPYYRYVPDPVLENGRATLYWDRSIITDRTIVANKPDIVVIDRLERRAIIIDIAVPHDENLVKVEKEKQIKYLDLSHEIVDMWNVDSVIIVPIVVSAHGLIAKSLDQHLKRLTLEGWIKGLIQKAVLLDTARIVRRFLSLEP

SEQ ID NO: 13426 - protein, 1199 aa, Spilarctia lutea
MLTRARRRAQLSPPDSSLRSALPSPEEAIEVPAGAEASSSSSSDEFFSPPTSPIPVRRQGRGRPPTSLGSRGPLTSNRAPAAGGDVRRMKWTHSINENVMRAYFRATELGTNLTAYRVRLVSLFQELEPAVNVSAQRLSDQVRAIQRCHLLDDAALERIRSDIRNSLTVPSSSHVLNVVTNSTPQVPQNDDISELVDSEIISVSTQYNDRIRSTLEDAIREYRYVNLNNRPRLSRLPIHKRNLALVSALDSLLPKYFSNSEDLSDTHSILYCAAIAVCRVAGVKFAEYTTTTRQENTLPAWQYRIERRIAEARTLIGKLMSFRSGNTRPRVMRFVKRAFLGTTISPQEYMSCVAERIDFLKQKVYAWANRIRRYRKRVDRYNQNRMFQRNEKWVYRKWENLSPCMSDGQVPDENATNSFWRNMWSVPVTHTEGDWYRDVERSCESLLPMEPISIDEEDVSCAVRSLPNWKAPGPDGLHNFWLKWFRSSHACLASQFQTALDSGSLPQFLTTGITHLLYKSGDAMDPKNFRPITCLPTLYKLLTSILRLKITTHINHNSILSISQNGCRSGTRGTKELLIIDMTISQQVRRNRKSLATCWIDYKKAFDSVPHTWLLKVLELYKIDTTLCTFLKVCMGQWRTALRYPGCRQSAMNDVLIKIERGIFQGDSLSPLWFCLALNPLSTLLEGSGLGYRLQKDDRVISHLFYMDDLKLLAPTKLQLTALLKVTENFSNSIKMEFGVDKCAVMYVKKGEIVESEGIELSDSTKLRSLSATETYKYLGFSQSLGMPESDMKQTLRERFFSRLKKVLKSLLSGGNRVRACNGWVMPVLMYSFGVLRWTQTELDAIDRRVRTLLTAFRMHHPRSSVMRLYIPRRLGGRGLLNIKTLHNREVYNLREYFLQTDVGVHRSVVTVDTGLTPLALAKENWRKPVVLSTNDRREVWKGKELHGRFYRALHGPDIDFKTSTSWLRYGDLFGETEGFVCAIMDEVIMTNNYRKYILKDGTVDICRACHRPGESIRHIISGCSRLANGEYLHRHNQVARIVHQQLALKYHLVNSEVPYYRYVPDPVLENGRATLYWDRSIITDRTIVANKPDIVVIDRLERRAIIIDIAVPHDENLVKVEKEKQIKYLDLSHEIVDMWNVDSVIIVPIVVSAHGLIAKSLDQHLKRLTLEGWIKGLIQKAVLLDTARIVRRFLSLEP

SEQ ID NO: 13427 - protein, 1198 aa, Xestia c-nigrum
MLTRAAARRARLPPPDPSLSSASPPPEPSPIVSAVTPAVAVASSSSDEYFSPPTTPPPVRRRGGRRPPDGLGPRGPPASDRVPAPGGSVQRMRWTQSNNENVMRAYYGATEGGNNLTAYRVRMLSLFQVLEPAVNVSAQRLSDQVRVIQRNRMLDDTVLDRLRTEMHSSHVIATPPSQAVVPPQSTTITNRDDDVSSDMITNVGTQYSEDMRSALEGAIREYRFMTPELRPRLPRLPMHNKNRMLVAVLDSQLSNYFDNCEDLTDVHSVLYCAAVAACRVARVKFPDDRATRPKPAVPAWQYRIEQRIGGARALIGKLICFREGNTRPRVMRFVRRAFSGTDINPRDYMSRVTERIDFLKQKVYAWASRIRRYKRRVDRYTQNRTFQRDERWVYRAWERPDQGVADTRLPDDDAMCSFWRSIWSVPVSHAEGEWTRVVERACDPVPEMGAITISPQDVACAVRPLPNWKSPGPDGLHNFWIKWFTRSHARLATLFQSALESGSLPEFLTTGITHLLHKSGSTAEPKNYRPITCLPTVYKVLTSILRAKITKHIDENSVMSASQNGCRNGSRGTKELLLIDMAISQQVRRSRKDLSTCWIDYKKAYDSVPHTWLMRVLELYKVDATLRTFLMSCMGQWRTVLRYPGCRQIQRNSEPIRIERGIFQGDSLSPLWFCLALNPLSTLLEDSGLGYQLRKDGRVISHLLYMDDLKLFATNDFQLMELLKVTETFSSAIRMEFGVDKCAVMHVKRGEIVKSVGTQLSDSINLRSLSATETYKYLGMSEALGINVADMKQSLKERFFGRLKKVFNSLLSGGNKVRAFNGWVMPVLMYSFGILKWTQTELDALDTKVRKLLTAFRMHHPRSSVMRLYIPRKCGGRGFLNAKTLHNREICSLRDYFLEADVGMHRDVVAMDKGLTPLSLAKENWRKPIILTTDDRRKEWQGKELHGRFYRALHGPDVDFLASVSWLRSVDLFGETEGFVCAIMDEVMMTNNYRRFIVKDGTVDICRACHRPGESIRHIISGCSRLANGEYLHRHNLVARIIHQQLALKYNLVESEVPYYRYVPDPVLVNGSITLYWDQSIITDRTVIANRPDIVVMDRSERRAMIVDITVPHDENLVKAEKDKQIKYLDLAREVVDMWEVDSAIIVPIVVSAHGLIAKSLDQHLRRLSLGSWIKGLIQKAVLLDTARIVRRFLSLEP

SEQ ID NO: 13428 - protein, 1198 aa, Griposia aprilina
MLTRSAARRARPPPPDSSLSSASLPPVSSPTVSAVTTPAAVVASSSSDEYFSPPTTPPPVRRRGGHRPPDGLGPRGPPASDRVPAPGGSVQRMRWTRSINENVMRSYYGATEGGNNLTAYRVRMLSLFQVLEPAVNVSAQRLSDQVRVIQRNHMLDDTVLDRLRNEMQSSHVIAPPSQTVVVLSQSNTSQADEESDDRATNVSTQCNDELRSALEDAIREYRFISPELRPRLPRLPMHNKNRVLVAALDAQLSNYFDDCVDLTDTHSILYCAAVAACRVAHVKFANDSRATRPKPAVPAWQCRIERRIGEARALIGKLICFREGNTRPRVMRFVRRAFAGTNISPQDYMSCVTERIDFLKQKVYAWANRIRRYKRRVERYTQNRTFQRDERWVYRGWERPDQGVADTCLPDDDAMCSFWRNIWSVPVSHTEGDWTREVERACDPIPEMGAITICPQDVTRAVRPLPNWKSPGPDGLHNFWIKWFGRSHARLAAQYQVALESGSLPQFLTTGVTHLLHKSGSTAEPKNYRPIACLPTVYKVLTSILRDKINKHIDTNYIMSPSQNGCRNGSRGTKELLLIDMAISQQVRRSRKDLSTCWIDYKKAYDSVPHTWLMRVLELYKVEATLRTFLMSCMGQWRTVLHYPACRNTQRNSEPIRIERGIFQGDSLSPLWFCLALNPLSTLLEDSGLGYRLRRGGQVISHLLYMDDLKLFAPNNSQLMDLLKVTETFSSAIRMEFGVDKCAVMHVKRGEIVESVGTQLSDSINLRALSASETYKYLGMSEALGINGTDMKQSLKDRFFGRLKKVFNSLLSGGNKVRAFNGWVMPVLMYSFGILKWTQTELDALDRKVRTLLTANRMHHPRSSVMRLYIPRKCGGRGFLNAKTLHNREICSLREYFLEADVGMHRDVVTVDKGLTPLSLAKENWRKPVVLDTNDRMEVWQSKELHGRFFRALHGPDVDQLASVAWLRFGDLFGETEGFVCAIMDEVMMTNNYRRFIVKDGTVDICRACHRPGESIRHIISGCSRLANEEYLHRHNLVARIIHQQLALKYSLVESEVPYYRYVPDPVLENGHITLYWDRSIITDRTIVANKPDIVMVDRLERRAMIVDITVPHDGNLVKAEKDKQIKYLDLAREVVDMWDVDSAIIVPIVVTANGLIAKSLDQHLRRLSLGSWIKGLIQKAVLLDTARIVRRFLSLEP

SEQ ID NO: 13429 - protein, 1204 aa, Griposia aprilina
MMLTRSAKRRAHPPPPDSPLSSASPPPVSSPTVSAVTTPAAVVASSSTDEYFSPPTTPPPVRRRGGHRPPDGLGPRGPPASDRVPAPGGSVQRMRWTRSINENVMRSYYGATEGGNNLTAYRVRMLSLFQVLEPAVNVSAQRLSDQVRVIQRNHMLDDTVLDRLRNEMQSSHMTTLHFIAPPSQTVVVLPQSNTSQADEESDDRATNVSTQCNDELRSALEDAIREYRFISPELRPRLPRLPMHNKNRVLVAALDAQLSNYFDDCVDLTDTHSILYCAAVAACRVAHIKFANDSRPTRPKPAVPAWQCRIERRIGGARALIGKLICFREGNTRPRVMRFVRRAFAGTNISPQDYMSCVTERIDFLKQKVYAWANRIRRYKRRVERYTQNRTFQRDERWVYRGWERTDQGVADTCLPDDDAMCSFWRNIWSVPVSHTEGDWGREVERACDPIPEMGAISICPQDVTRAVRPLPNWKSPGPDGLHNFWIKWFGRSHARLAAHYQVAIESGSLPQFLTTGVIHLLHKSGSTAEPKNYRPITCLPTVYKVLTSILRAKINKHIDTNSIMSPSQNGCRNGSRGTKELLLIDMAISQQVRRSRKDLSTCWIDYKKAYDSVPHTWLMRVLELYKVDATLRTFLKSCMGQWRTILHYPGCRNIQRDNEPIRIERGIFQGDSLSPLWFCLALNPLSTLLEDSGLGYRLRRGGQVISHLLYMDDLKLFAPNNLQLMELLKVTETFSSAIRMEFGVDKCAVMHVKRGEIVESVGTQLSYSINLRALSASDTYKYLGMSEALGINGTDMKQSLKERFFGHLKKVFNSLLSGGNKVRALNGWVMPVLMYSFGILKWTQTELDALDRKVRTLLTANRMHHPRSSVMRLYIPRKCGGRGFLNAKTLHNREICSLREYFLEADVGMHTDVVKVDKGLTPLSLAKENWRKPVVLDTNDRMEVWQSKELHGRFFRALHGPDVDQLGSVAWLRFGDLFGETEGFVCAIMDEVILTNNYRRHIMKDGTVDVCRACHRPGESIRHIISGCSRLANEEYLHRHNLVARIIHQQLALKYSLVESEVPYYRYVPDPVLENGHITLYWDRSIITDRTIVANKPDIVVVDRLERRAMIVDITVPHDGNLVKAEKDKQIKYLDLAREIVDMWDVDSAIIVPIVVTANGLIAKSLDQHLRRLSLGSWIKGLIQKAVLLDTARIVRRFLSLEP

SEQ ID NO: 13430 - protein, 1200 aa, Griposia aprilina
MLTRSAARRARPPPPDSSLSSASLPPVSSPTVSAVTTPAAVVASSSSDEYFSPPTTPPPARRRGGHRPPDGLGPRGPPASDRVPAPGGSVQRMRWTRSINENVMRSYYGATERGNNLTAYRVRMLSLFQVLEPAVNVSAQRLSDQVRVIQRNHMLDDTVLDRLRNEMQSSHVIAPPSQTVVVLPQSNTSQADEESDDRATNVSTQCNDELRSALEDAIREYRFISPELRPRLPRLPMHNKNRVLMAALDAQLSNYFDDCVNLTDTHSILYCAAVAACRVAHVKFANDSNSRATRPKPAVPAWQCRIERRIGGARALIGKLICFREGNTRPRVMRFVRRAFAGTNISPQDYMSCVTERIDFLKQKVYAWANRIRRYKRRVERYTQNRTFQRDERWVYRGWERPDQGVADTCLPDDDAMCSFWRNIWSVPVSHTEGDWGREVERACDPIPEMGAISICPQDVTRAVRPLPNWKSPGPDGLQNFWIKWFGRSHARLAAQYQVAIESGSLPQFLTTGVTHLLHKSGSTAEPKNYRPITCLPTVYKVLTSILRAKINKHIDTNSIMSPSQNGCRNGSRGTKELLLIDMAISQQVRRSRKDLSTCWIDYKKAYDSVPHTWLVRVLELYKIDATLRTFLKSCMGQWRTILHYPGCRNIQRDNEPIRIERGIFQGDSLSPLWFCLALNPLSTLLEDSGLGYRLRKGGQVISHLLYMDDLKLFAPNNLQLMELLKVTETFSSAIRMEFGVDKCAVMHVKRGEIVESVGTQLSDSINLRALSASDTYKYLGMSEALGINGTDMKQSLKERFFGRLKKVFNSLLSGGNKVRAFNGWVMPVLMYSFGILKWTQTELDALDRKVRTLLTANRMHHPRSSVMRLYIPRKCGGRGFLNAKTLHNREICSLREYFLEADVGMHTDVVTVDKGLTPLSLAKENWRKPVVLDTNDRMEVWQSKELHGRFFRALHGPDVDQLASVAWLRFSDLFGETEGFVCAIMAEVILTNNYRRHIMKDGTVDVCRACHRPGESIRHIISGCSRLADEEYLHRHILVARIIHQQLALKYSLVESEVPYYRYVPEPVLENGHITLYWDRSIITDRTIVANKPDIVVVDRLERRAMIVDITVPHDGNLVKAEKDKQIKYLDLAREVVDMWDVDSAIIVPIVVTANGLIAKSLDQHLRRLSLGSWIKGLIQKAVLLDTARIVRRFLSLEP

SEQ ID NO: 13431 - protein, 1106 aa, Griposia aprilina
MRWTRSINENVMRSYYGATEGGNNLTAYRVRMLSLFQVLEPAVNVSAQRLSDQVRVIQRNHMLDDTVLDRLRNEMQSSHVIASPSQTVVVLPQSNTSQADEESDDRATNVSTQCNDELRSALEDAIREYRFISPELRPRLPRLPMHNKNRVLVAALDAQLSNYFDDCVDLTDTHSILYCAAVAACRVAHVKFANDSRATRPKPAVPAWQCRIERRIGGARALIGKLICFREGKTRPRVMRFVRRAFAGTNISPQDYMSCVTERIDFLKQKVYAWANRIRRYKRRVERYTQNRTFQRDERWVYRGWERSDQGVADTCLPDDDAMCSFWRNIWSVPVSHTEGDWTREVERACDPIPEMGAITICPQDVTRAVRPLPNWKSPGPDGLHNFWIKWFGRSHARLAAQYQVALESGSLPQFLTTGVTHLLHKSGSTAEPKNYRPVACLPTVYKVLTSILRDKINKHMDTNYIMSPSQNGCRNGSRGTKELLLIDMAISQQVRRSRKDLSTCWIDYKKAYDSVPHTWLMRVLELYKVEATLRTFLMSCMGQWRTVLHYPACRNTQRNSEPIRIERGIFQGDSLSPLWFCLALNPLSTLLEDSGLGYRLRRGGQVISHLLYMDDLKLFAPNNSQLMDLLKVTETFSSAIRMEFGVDKCAVMHVKRGEIVESVGTQLSDSINLRALSASETYKYLGMSEALGINGTDMKQSLKVRFFGRLKKVFNSLLSGGNKVRAFNGWVMPVLMYSFGILKWTQTELDALDRKVRTLLTANRMHHPRSSVMRLYIPRKCGGRGFLNAKTLHNREICSLREYFLEADVGMHRDVVTVDKGLTPLSLANENWRKPVVLDTNDRMEVWQSKELHGRFFRALHGPDVDQLASVAWLRFGDLFGETEGFVCAIMDEVMMTNNYRRFIVKDGTVDICRACHRPGESIRHITFGCSRLANEEYLHRHNLVARIIHQQLALKYSLVESEVPYYRYVPDPVLENGHITLYWDRSIITDRTIVANKPDIVMVDRLERRAMIVDITVPHDGNLVKAEKDKQIKYLDLAREVVDMWDVDSGIIVPIVVTANGLIAKSLDQHLRRLSLGSWIKGLIQKAVLLDTAHIVRRFLSLEP

SEQ ID NO: 13432 - protein, 1198 aa, Griposia aprilina
MLTRSAASRARPPPPDSSLSSASLPPVSSPTVSAVTTPAAVVASSSSDEYFSPPTTPPPVRRRGGHRPPDGLGPRGPPASDRVPAPGGSVQRMRWTRSINENVMRSYYGATEGGNNLTAYRVRMLSLFQVLEPAVNVSAQRLSDQVRVIQRNHMLDDAVLDRLRNEMQSSHVIAPPSQTVVVLPQSNTSQADEESDDRATNVSTQCNDELRSALEDAIREYRFISPELRPRLPRLPMHNKNRVLVAALDAQLSNYFDDCVDLTDTHSILYCAAVAACRVAHVKFANDSRATRPKPAVPAWQCRIERRIGGARALIGKLICFREGNTRPRVMRFVRRAFAGTNISPQDYMSCVTERIDFLKQKVYAWANRIRRYKRRMERYTQNRTFQRDERWVYRDWERPDQGVADTCLPDDDAMCSFWRNIWSVPVSHTEGDWAREVERACDPIPEMGAISICPQDVTRAVRPLPNWKSPGPDGLHNFWIKWFGRSHARLAAQYQVALESGSLPQFLTTGVTHLLHKSGSTAEPKNYRPITCLPTVYKVLTSILRAKINNHIDTNSIMSPSQNGCRNGSRGTKELLLIDMAISQQVRRSRKDLSTCWIDYKKAYDSVPHTWLVRVLELYKVDATLRTFLKSCMGQWRTVLHYPGCRNIQRNNEPIRIKRGIFQGDSLSPLWFCLALNPLSTLLEDSGLGYRLRRGGQVISHLLYMDDLKLFAPNNLQLMELLKVTETFSSAIRMEFGVDKCAVMHVKRGEIVESVGTQLPYSINLRALSASDTYKYLGMSEALGINGTDMKQSLKERFFGRLKKVFNSLLSGGNKVRAFNGWVMPVLMYSFGILKWTQTELDALDRKVRTLLTANRMHHPRSSVMRLYIPRKCGGRGFLNAKTLHNREICSLREYFLEADVGMHTDVVKVDKGLTPLSLAKENWRKPVVLDTNDRMEVWQSKELHGRFFRALHGPDVDQLASVAWLRFGDLFGETEGFVCAIMDEVILTNNYRRHIMKDGTVDVCRACHRPGESIRHIISGCSRLANEEYLHRHNLVARIIHQQLALKYSLVESEVPYYRYVPDPVLENGHITLYWDRSIITDRTIVANKPDIVVVDRLERRAMIVDITVPHDGNLVKAEKDKQIKYLDLAREVVDMWDVDSAIIVPIVVTANGLIAKSLDQHLRRLSLGSWIKGLIQKAVLLDTARIVRRFLSLEP

SEQ ID NO: 13433 - protein, 1198 aa, Griposia aprilina
MLTRSAARRARPPPPDSSLSSASLPPVSSPTVSAVTTPAAVVASSSSDEYFSPPTTPPPVRRRGGHRPPDGLGPRGPPASDRVPAPGGSVQRMRWTRSINENVMRSYYGATEGGNNLTAYRVRMLSLFQVLEPAVNVSAQRLSDQVRVIQRNHMLDDTVLDRLRNEMQSSHVIAPPSQTVVVLPQSNTSQADEESDDRATNVSTQCNDELRSALEDAIREYRFISPELRPRLPRLPMHNKNRVLVAALDAQLSNYFDDCVDLTDTHSILYCAAVAACRVAHVKFANDSRATRPKPAVPAWQCRIERRIGEARALIGKLICFREGNTRPRVMRFVRRAFAGTNISPQDYMSCVTERIDFLKQKVYAWANRIRRYKRRVERYTQNRTFQRDERWVYRGWERPDQGVADTCLPDDDAMCSFWRNIWSVPVSHTEGDWTREVERACDPIPEMGAITICPQDVTRAVRPLPNWKSPGPDGLHNFWIKWFGRSHARLAAQYQVALESGSLPQFLTTGVTHLLHKSGSTAEPKNYRPIACLPTVYKVLTSILRDKINKHIDTNYIMSPSQNGCRNGSRGTKELLLIDMAISQQVRRSRKDLSTCWIDYKKAYDSVPHTWLMRVLELYKVEATLRTFLMSCMGQWRTVLHYPACRNTQRNSEPIRIERGIFQGDSLSPLWFCLALNPLSTLLEDSGLGYRLRRGGQVISHLLYMDDLKLFAPNNSQLMDLLKVTETFSSAIRMEFGVDKCAVMHVKRGEIVESVGTQLSDSINLRALSASETYKYLGMSKALGINGTDMKQSLKDRFFGRLKKVFNSLLSGGNKVRAFNGWVMPVLMYSFGILKWTQTELDALDRKVRTLLTANRMHHPRSSVMRLYIPRKCGGRGFLNAKTLHNREICSLREYFLEADVGMHRDVVTVDKGLTPLSLAKENWRKPVVLDTNDRMEVWQSKELHGRFFRALHGPDVDQLASVAWLRFGDLFGETEGFVCAIMDEVMMTNNYRRFIVKDGTVDICRACHRPGESIRHIISGCSRLANEEYLHRHNLVARIIHQQLALKYSLVESEVPYYRYVPDPVLENGHITLYWDRSIITDRTIVANKPDIVMVDRLERRAMIVDITVPHDGNLVKAEKDKQIKYLDLAREVVDMWDVDSAIIVPIVVTANGLIAKSLDQHLRRLSLGSWIKGLIQKAVLLDTARIVRRFLSLEP

SEQ ID NO: 13434 - protein, 1095 aa, Griposia aprilina
MRSYYGATEGGNNLTAYRVRMLSLFQVLEPAVNVSAQRLSDQVRVIQRNHMLDDTVLDRLRNEMQSSHVIAPPSQTVVVLPQSNTSQADEESDDRATNVSTQCNDELRSALEDAIREYRFISPDLRPRLPRLPMHNKNRVLVAALDAQLSNYFDDCVDLTDTHSILYCAAVAACRVAHVKFANDFRATRPKPAVPAWQCRIERRIGEARALIGKLICFREGNTRPRVMRFVRRAFAGTNISPQDYMSCVTERIDFLKQKVYAWANRIRRYKRRVERYTQNRTFQRDERWVYRGWERPDQGVADTCLPDDDAMCSFWRNIWSVPVSHTEGDWTREVERACDPIPEMGAITICPQDVTRAVRPLPNWKSPGPDGLHNFWIKWFGRSHARLAAQYQVALESGSLPQFLTTGVTHLLHKSGSTAEPKNYRPIACLPTVYKVLTSILRDKINKHIDTNYIMSPSQNGCRNGSRGTKELLLIDMAISQQVRRSRKDLSTCWIDYKKAYDSVPHTWLMRVLELYKVEATLRTFLMSCMGQWRTVLHYPACRNTQRNSEPIRIERGIFQGDSLSPLWFCLALNPLSTLLEDSGLGYRLRRGGQVISHLLYMDDLKLFAPNNSQLMDLLKVTETFSSAIRMEFGVDKCAVMHVKRGEIVESVGTQLSDSINLRALSASETYKYLGMSEALGINGTDMKQSLKERFFGRLKKVFNSLLSGGNKVRAFNGWVMPVLMYSFGILKWTQTELDALDRKVRTLLTANRMHHPRSSVMRLYIPRKCGGRGFLNAKTLHNREICSLREYFLEADVGMHRDVVTVDKGLTPLSLAKENWRKPVVLDTNDRMEVWQSKELHGRFFRALHGPDVDQLASVAWLRFGDLFGETEGFVCAIMDEVMMTNNYRRFIVKDGTVDICRACHRPGESIRHIISGCSRLANEEYLHRHNLVARIIHQQLALKYSLVESEVPYYRYVPDPVLENGHITLYWDRSIITDRTIVANKPDIVMVDRLERRAMIVDITVPHDGNLVKAEKDKQIKYLDLAREVVDMWDVDSAIIVPIVVTANGLIAKSLDQHLRRLSLGSWIKGLIQKAVLLDTARIVRRFLSLEP

SEQ ID NO: 13435 - protein, 1205 aa, Omphaloscelis lunosa
MLTRSRARKLTDTHPTSSGSSLSSASQLPDPAPDVSPVIPVAAVASSSSDEYFSPPTTPPPTRQRGRGRPPASLGLRGPPASDRVPAPGGSVQRMRWTQTVNENVMRAYFGATEGGSNLTAYRGRMLSLFQVLEPAVNVSAQRLSDQVRVIQRNHMLDDVVLDRLRLESRNNHVTPASPLVTVQLQNLPSSSPRSDRVGEEDDDGVISVSSQCNVRLRSALEDAFREYRSIPPGLRPKLPRLPMHKKNKALMCTLDSLLSNCFDGSKDLADTHSILYCAAVAACRVAHVKFPNSDRAPRPKPAVPAWQCRIERRIGEARVLIGKLICFREGNTRPRVMRFVKRAFSGTDISFQDYLTRVTERIDFLKQKIYAWANRIRRYRRRVERYTQNRTFQSDERWVYRAWERPDQGVIDTRLPDDDAMCSFWRSIWSAPVSHTEGDWTREIERACEQIPEMEALTISPQDIARAVRPLPNWKSPGPDGLHNFWIKWFQRSHARLASQFQSALESGSLPQFLTTGITHLLHKSGSTAEPKNYRPITCLPTVYKVFTSILRTKINKHIDTNSIMSASQNGCRNGSRGTKELLLIDMAINQQVRRSRRDLSTCWIDYKKAYDSVPHTWLMRVLELYKVNATLRTFLMSCMGQWRTVLRYPGCRQILRNSEPIRIERGIFQGDSLSPLWFCLALNPLSTLLEDSGLGYRLRRGGQVISHLLYMDDLKLFAPNNLQLLELLKVTETFSSAIRMEFGVDKCAVMHVKRGEIVESVGTQLSDSIQLRSLSSIETYKYLGMSEALGVNAADMKESLKERFFNRLNKVLNSLLSGGNKVRAFNGWVMPVLMYSFGILKWTQTELDALDRRVRTLLTANRMHHPRSSVMRLYIPRKCGGRGFLNAKTLHNREVCSLREYFLEADVGMHRDVVTVDKGLTPLSLANENWRKPIVLDTNDRREVWQSKELHGRFYRALHGPDVDLLASVSWLRFGDLFGETEGFVFAIMDEVMMTNNYRKYIVKDGTVDICRACHRPGESIRHIISGCSRLANGDYLHRHNLVARIIHQQLALKYILVESEVPYYRYVPDPVLENGNITLYWDRSIITDRTIVANKPDIVVIDRLERRTMIIDIAVPHDENLVKAEKDKQIKYLDLAREVVDMWDVDTAIIVPIVVTANGIIAKSLDQHLKRLSLGSWIKGLIQKAVLLDTARIVRRFLSQEP

SEQ ID NO: 13436 - protein, 969 aa, Omphaloscelis lunosa
MSPELRPRLPRLPMHNKNKALVAVLDSQLSNYFDDCEDLTDTHSILYCAAVAACRVAHVKFANDSRATRPKPAAPAWQCRIERRIGGARTLIGKLICFREGNTRPRVMRFVRRAFLGTDISPQDYLTRVTERIDFLKQKVYAWANRIRRYKRRVERYTQNRTFQSDERWVYRAWERPDQGVADTHRPDDDAMCSFWRSIWSVPVNHTEGDWTREVERACDPIPEMGAITICPQYVARAVRPLPNWKSPGPDGLHNFWIKWFLRSHARLAAQYQTALESGSLPQFLTTGVTHLLHKSGSTAEPKNYRPITCLPTVYKVLTSILRAKINKHIDTNSIMSASQNGCRNGSRGTKELLLIDMAINQQVRRSRKDLSTCWIDYKKAYDSVPHTWLMRVLELYKVDTTLRTFLMSCMGQWRTVLRYPGCRNIQRNSEPIRIERGIFQGDSLSPLWFCLALNPLSTLLEASGLGYRLRRGGQVISHLLYMDDLKLFAPNNLQLMELLKVTETFSNAIRMEFGVDKCAVMHVKRGEIVESVGTQLSDSINLRALSASETYKYLGMSEALGINVTDMKQSLKERFFGRLKKVLNSLLSGGHKVRAFNGWVMPVLIYSFGILKWTQTELDALDRRVRTLLTAYRMHHPRSSVMRLYIPRKCGGRGFLNAKTLHNREICSLREYFLGVDVGMHRDVVVVDKGLTPLSLAKENWRKPVVLDTKDRMEIWQSKALHGRYFRALHGPDVDLPASVTWLRFGDLFGETEGFVCAIMDEVMMTNNYRRFIVKDGTVDICRACHRPGESIRHIISGCSCLANEEYLHRHNLVARIIHQQLALKYSLVESEVPDPVLENGNITLYWDRSIITDRTIVANKPDIVVVDRGERRTMIIDITVPHDENLVKAEKDKQIKYLDLAREVVDMWDVDSAIIVPIVVTANGLIAKSLDQHLRRLSLGSWIKGLIQRAVLLDTARIVRRFLSLEP

SEQ ID NO: 13437 - protein, 1200 aa, Sesamia nonagrioides
MLTRSAARRARSPPPDSSPSSASPPPVSSPTVNAVMTPAAAVALSSSDEYFSPPTTPPPVRRRGGRRPPDCLGPRGPPASDRAPATGGNVQRMKWTQSINENVMRAYFGATEGGSNLTAYRGRMLSLFQVLEPAVNVSAQRLSDQVRVIQRNHMLDDVVLDRLRLQSRNSHVTPASSLVAVQLNSVPSRPNLVDEEDDDEAISATPQCNEKVRSALEDAFREYRSTPLELRPRLPRLPMHKKNKALVCALDSQLSNYLKDSKDLADTHSILYCGAVAICRVAHVKFPDSDRATRPKPAVPAWQCRIERRIGETRALIGKLISFREGNTRPRVMRFVRRAFSGTDVSTRDYLLRVTERIDFLKQKIYAWANRIRRYRRRVERYSQNRNFQSDERWVYRAWERSDQGVTDTCLPDDDATRSFWRNIWSVPVSHTEGGWTRDVERACDPVPEMGAITICPQDVARAVRPLPNWKSPGPDGLHNFWIKWFSGSHACLASQFQTALESGSLPQFLTTGITHLLHKSGSTAEPKNYRPITCLPTVYKVLTSILKAKINTHIDSNSIMSASQNGCRNGSRGTKELLLIDMAISQQVRRSRKDLSTCWIDYKKAYDSVPHTWLMRVLELYKVDATLRTFLMTCMSQWRTVLRYPGCRNIQRNSEPIRIERGIFQGDSLSPLWFCLALNPLSTLLEDSGLGYRLRRGGQVISHLLYMDDLKLFAHTNSQLKELLKITETFSSAIRMEFGVDKCAVMHVQRGNIVESVGTQLTGSINLRSLSASETYKYLGMSEALGINVTDMKQSLKERFFGRLKKVLNSLLSGGNKVRAFNGWVMPVLMYSFGILKWTQTELDALDQRVRTLLTANRLHHPRSSVMRLYIPRKCGGRGFLNAKTLHNREVCSLREYFLKTDVGMHRDVVAVDKGLTPLSLAKENWRKPVVLETNDRMEVWQSKELHGRFFRALRGPDVDFQASVAWLRYGDLFGETEGFVCAIMDEVMMTNNYRKFIVKDGTVDICRACHRPGESIRHIISGCSRLANGEYLHRHNLVARIIHQQLALKYNLVESEVPYYRYMPDPVLENGHITLYWDRSIITDRTIVANKPDIVMVDRSERRAMIVDITIPHDENLVKAEKDKQIKYLDLAHEVVDMWEVDSAIIVPIVVTANGLIAKSLDQHLRRLSLGGWIKGLIQKAVLLDTARIVRKFLSLEP

SEQ ID NO: 13438 - protein, 1200 aa, Sesamia nonagrioides
MLTRSAARRARPPSPDSLLGSASPPPVSSATASAVTTPAAAVASSSSDEYFSPPTTPTPARRRGGRRPPDRLGPRGPSASDRVPAPGGSVQRMRWTQSINENVMRSYYGATEGGNNLTAYRVRMLSLFQVLEPAVNVSAQRLSDQVRVIQRNHMLDDVVLDRLRLESRNSHVTPASSLVAVQINSVSPRPNHVDEEDDDRAISVSPQCNEKLRSALEDAFCEYRSIPPELRPRLPRLPMHKKNKALVCALDSQLSNYLKDSKDLNDTHSILYCGAVAICRVAHVKFPDSDRATRPKSAVPAWQCRIERRIGETRALIGKLISFREGNTRPRVMRFVRRAFSGTDTSTRDYLFRVTERIDFFKQKIYAWANRIRRYKRRVERYSQNRNFQSDERRVYRAWKRSDQGVTDTCLPDDDATCSFWRNIWSVPVSHTEGSWTRVVERACDPVPEMGAITICPQDVAHAVRPLPNWKSPGPDGLHNFWIKWFTRSHACLASQFQTALESGSLPQFLTTGVTHLLHKSGSTSEPKNYRPITCLPTVYKVLTSILKSKINTHIDSNSIMSASQNGCRSGSRGTKELLLIDMAISQQVRRSRKDLSTCWIDYKKAYDSVPHTWLMRVLELYKVDATLRTFLMTCMRTWRTVLRYPGCRNIQRNSEPIRIERGIFQGDSLSPLWFCLALNPLRTLLEDSGLGYRLRRGGQVISHLLYMDDLKLFAHTDSQLKELLKITETFSSSIRMEFGVDKCAVMHVKRGEIMESVGTQLTSSINLRALSASETYKYLGMSEALGINVTDMKQSLKERFFGRLKKVLNSLLSGGNKVRAFNGWVMPVLMYSFGILKWTQTELDALDRRVRTLLTANRLHHPRSSVMRLYIPRKCGGRGFLNAKTLHNREICSLREYFLTTDVGMHRDVVAVDKGLTPLSLAKENWRKPVVLDTNDRMEVWKSKELHGRFFTALHGPDVDLQASVAWLRFGDLFGETEGFVCAIMDEVMMTNNYRRFIVKDGTVDICRACHRPGESIRHIISGCSRLANGEYLHRHNLVARIIHQQLALKYNLVESEVPYYRYTPDPVLENDLITLYWDRSIITDRTIVANKPDIVLVDRSERRAMIVDITIPHDENLVKAEKDKQIKYLDLAHEVVDMWEVDSAIIVPIVVTANGLIAKSLDQHLRRLSLGSWIKGLIQKAVLLDTARIVRKFLSLEP

SEQ ID NO: 13439 - protein, 1197 aa, Sesamia nonagrioides
MLTRSAALRARPPPPDSLLSSASPPPVSSVIVSAVTTPAAAVALSSSDEYFSPPTTPPPARRRGGRRPPDRLGPRGPSASDRVPAPGGSVQRMRWTQSINENVMRSYYGATEGGNNLTAYRVRMLSLFQVLEPAVNVSAQRLSDQVRVIQRNHMLDDTVLDRLRNEMQSSRVIAHQSQTAEIPPQSTNYADEGSNDRATNVSTQCNEELINALEAAIREYRSTSAELRPRLPRLPMHNRNRALMAALDAQLSNYFDTCEDLTDTHSILYCAAVAACRVAHVKFPSDSRATRPKPVVPAWQHRIERRIGGARALIGKLICFREGNTRPRVMRFVRRAFSGTNISPQNYMARVTERIDFLKQKVYAWANRIRRYKRRVERYTQNRTFQSNERWVYRDWERPEQGVTDTCLPDDDAMCSFWRSIWSVPVSHTEGDWARDVERACDPIPEMGAITICPQDVACAVRPLPNWKSPGPDGLHNFWIKWFPRSHARLASQFQTALVSGSLPQFLTTGITHLLHKSGSTAEPKNYRPITCLPTVYKVLTSILKTKINKHIDSNSIMSASQNGCKSGSRGTKELLLIDMAISQQVRRSRKDLSTCWIDYRKAYDSVPHTWLMRVLELYKVDATLRTFLMSCMRTWRTVLRYPGCRNIQRNSEPIRIERGIFQGDSLSPLWFCLALNPLSTLLEDSGLGYRLRRGGQVISHLLYMDDLKLFAPNNSQLMELLKITETFSSSIRMEFGVDKCAVMHVKRGEIMESVGTQLTDSINLRALSASETYKYLGMSEALGINVTDMKQSLKERFFGRLKKVLNSLLSGGNKVRAFNGWVMPVLMYSFGILKWTQTELDALDQRVRTLLTANRLHHPRSSVMRLYIPRKCGGRGFLNAKTLHNREVCSLRDYFLETDVGMHRDVVAADKGLTPLSLAKENWRKPVVLDTNDRLEVWKSKELHGRFFRALHGPDVDFQASVAWLRFGDLFGETEGFVFAIMDEVMMTNNYRRFIVKDGTVDICRACHRPGESIRHIISGCSRLANGEYLHRHNLVARIIHQQLALKYKLVESEVPYYRYMPDPVLENGHITLYWDRSIITDRTIVANKPDIVLVDRSERRAMIVDITIPHDENLVKAEKDKQIKYLDLAHEVVDMWEVDSAIIVPIVVTANGLIAKSLDQHLRRLSLGSWIKGLIQKAVLLDTARIVRKFLSLEP

SEQ ID NO: 13440 - protein, 1200 aa, Sesamia nonagrioides
MLTRSAARRARPPSPDSSLSSASPPPVSSPTVNAVMTPAAVVASSSSDEYFSPPTTPPPARRRGGRRPPDRLGPRGPSASDRVPAPGGSVQRMRWTQSINENVMRSYYGATEGGNNLTAYRVRMLSLFQVLEPAVNVSAQRLSDQVRVIQRNHMLGDVVLDRLRLESRNRHVTPASSLVAVQLNSVSPRPNHIDEEDDDRAISVSPQCNEKLRSALEDAFREYRSIPPELRPRLPRLPMHKKNKALVCALDSQLSNYLKDSKDLNDTHSILYCGAVAICRVAHVKFPDNDRATRPKSAVPAWQCRIERRIGETRALIGKLVSFREGNTRPRVMRFVRRAFSGTDTSTRDYLFRVTERIDFFKQKIYAWANRIRRYRRRVERYSQNRNFQSDERRVYRAWERSDQGVTDTCLPDDDATCSFWRNIWSVPVSHTEGSWTRVVERACDPVPEMGAFTICPQDVARAVRPLPNWKSPGPDGLHNFWIKWFSGSHARLASQFQTALESGSLPQFLTTGVTHLLHKSGSTAEPRNYRPITCLPTVYKVLTSILKSKINTHIDSNSIMSASQNGCRSGSRGTKELLLIDMAISQQVRRSRKDLSTCWIDYKKAYDSVPHTWLMRVLELYKVDATLRTFLMTCMRTWRTVLRYPGCRNIQRNSEPIRIERGIFQGDSLSPLWFCLALNPLSTLLEDSGLGYRLRRGGQVISHLLYMDDLKLFAHTDSQLKELLKITETFSSSIRMEFGVDKCAVMHVKRGEIMESVGTQLTSSINLRALSASETYKYLGMSEALGINVTDMKQSLKERFFGRLKKVLNSLLSGGNKVRAFNGWVMPVLMYSFGILKWTQTELDALDRRVRTLLTANRLHHPRSSVMRLYIPRKCGGRGFLNAKTLHNREICSLREYFLTTDVGMHRDVVAVDKDLTALSLAKENWRKPVVLDTNDRMEVWKSKELHGRFFKALHGPDVDLQASVAWLRFGDLFGETEGFVCAITDEVMMTNNYRRFIVKDGTVDICRACHRPGESIRHIISGCSRLANGEYLHRHNLVARIIHQQLALKYNLVESEVPYYRYTPDPVLENDHITLYWDRSIITDRTIIANKPDIVLVDRSERRAMIVDITIPHDENLVKAEKDKQIKYLDLAHEVVDMWEVDSAIIVPIVVTANGLIAKSLDQHLRRLSLGSWIKGLIQKAVLLDTARIVRKFLSLEP

SEQ ID NO: 13441 - protein, 962 aa, Sesamia nonagrioides
MHKKNKALVCALDSQLSNYLKDSRDLADTHSILYCGAVAICRVAHVKFPDSDRATRPKPAVPAWQCRIERRIGETRALIGKLMSFREGNTRPRVMRFVRRAFSGTDVSTRDYLLRVTERIDFLKQKIYAWANRIRRYRRRVERYSQNRNFQSDERWVYRAWERSDQGVTDTCLPDDDATRSFWRNIWSVPVSHTEGGWTRDVERACDPVPEMGAITICPQDVARAVRPLPNWKSPGPDGLHNFWIKWFSGSHACLASQFQTALESGSLPQFLTTGITHLLHKSGSTAEPKNYRPITCLPTVYKVLTSILKAKINTHIDSNSIMSASQNGCRNGSCGTKELLLIDMAISQQVRRSRKDLSTCWIDYKKAYDSVPHTWLMRVLELYKVDATLRTFLMTCMSQWRTVLRYPGCRNIQRNSEPIRIERGIFQGDSLSPLWFCLALNPLSTLLEDSGLGYRLRRGGQVISHLLYMDDLKLFAHTNSQLKELLKITETFSSAIRMEFGVDKCAVMHVQRGEIVESVGTQLTGSINLRSLSASETYKYLGMSEALGINVTDMKQSLKERFFGRLKKVLNSHLSGGNKVGAFNGWIMPVLMYSFGILKWTQTELDALNQRVRTLLTANRLHHPRSSVMRLYIPRKCGGRGFLNAKTLHNREVCSLREYFLETDVGMHRDVVAADKGLTPLSLAKENWRKPVVLDTNDRLEVWKSKELHGRFFRALHGPDVDFQASVAWLRFGDLFGETEGFVFAIMDEVMMTNNYRRFIVKDGTVDICRACHRPGESIRHIISGCSRLANGEYLHRHNLVARIIHQQLALKYNLVESEVPYYRYMPDPVLENGHITLYWDRSIITDRTIVANKPDIVLVDRSERRAMIVDITIPHDENLVKAEKDKQIKYLDLAHEVVDMWEVDSAIIVPIVVTANGLIAKSLDQHLWRLSLGSWIKGLIQKAVLLDTARIVRKFLSLEP

SEQ ID NO: 13442 - protein, 1197 aa, Sesamia nonagrioides
MLTRSAARRARPPSPDSLLGSASPPPVSSPTVSAVTTPAAAVALSSSDEYFSPPTTPPPVRRRGGRRPPDRLGPRGPSASDRVPAPGGSVQRMRWTQSINENVMRSYYGATEGGNNLTAYRVRMLSLFQVLEPAVNVSAQRLSDQVRVIQRNHMLDDTVLDRLRNEMQSSRVIAHQSQTAEIPPQSTNYADEGSNDRATNVSNQCNEELINALEAAIREYRSTSAELRPRLPRLPMHNRNRALMAALDAQLSNYFDTCEDLTDTHSILYCAAVAACRVAHVKFPSDSRATRPKPVVPAWQHRIERRIGGARALIGKLICFREGNTRPRVMRFVRRAFAGTNISPQNYMARVTERIDFLKQKVYAWANRIRRYKRRVERYTQNRTFQNNERWVYRDWERPEQGVTDTCLPDDDVMCSFWRSIWSVPVSHTEGDWARDVERACDLIPEMGAITICPQDVACAVRPLPNWKSPGPDGLHNFWIKWFPRSHARLASQFQTALVSCSLPQFLTTGITHLLHKSGSTAEPKNYRPITCLPTVYKVLTSILKTKINKHIDSNSIMSASQNGCKSGSRGTKELLLIDMAISQQVRRSRKDLSTCWIDYRKAYDSVPHTWLMRVLELYKVDATLRTFLMSCMRTWRTVLRYPGCRNIQRNSEPIRIERGIFQGDSLSPLWFCLALNPLSTLLEDSGLGYRLRRGGQVISHLLYMDDLKLFAPNNSQLRELLKITETFSSSIRMEFGVDKCAVMHVKRGEIMESVGTQLTGSINLRALSASETYKYLGMSEALGINVTDMKQSLKERFFGRLKKVLNSLLSGGNKVRAFNGWVMPVLMYSFGILKWTQTELDALDQRVRTLLTANRLHHPRSSVMRLYIPRKCGGRGFLNAKTLHNREVCSLREYFLETDVGMHRDVVAADKGLTPLSLAKENWRKPVVLDTNDRLEVWKSKELHGRFFRALHGPDVDFQASVAWLRFGDLFGETEGFVFAIMDEVMMTNNYRRFIVKDGTVDICRACHRPGESIRHIISGCSRLANGEYLHRHNLVARIIHQQLALKYKLVESEVPYYRYMPDPVLENGHITLYWDRSIITDRTIVANKPDIVLVDRSERRAMIVDITIPHDENLVKAEKDKQIKYLDLAHEVVDMWEVDSAIIVPIVVTANGLIAKSLDQHLRRLSLGSWIKGLIQKAVLLDTARIVRKFLSLEP

SEQ ID NO: 13443 - protein, 868 aa, Apamea monoglypha
MRFVRRAFSGTDISSQDYLSRVTERIDFLKQKVYAWANRIRRYKRRVDRYTQNRTFQSDERWVYRGWERPDQGVADTCLPDDDAMYSFWRSIWSVPVSHTEGDWAREVERACDPIPEMEAITICAQDVARAVRPLPNWKSPGPDGLHNFWVKWLTRSHARLASQFQIALESGSLPQFLTTGVTHLLHKSASTAEPKNYRPITCLPTVYKVLTSILRAKINKHIDTNSIMSASQNGCKNGSRGTKELLLIDMAISQQVRRSRKDLSTCWIDYKKAYDSVPHTWLMRVLELYKVDTTLRTFLMTCMGQWRTVLRYPGCRNIQRNSEPIRIERGIFQGDSLSPLWFCLALNPLSTLLEDSGLGYRLRRGGQVISHLLYMDDLKLFAPNNLQLMELLKITETFSSAIRMEFGVDKCAVMHVKRGEIVESVGTQLSDSTNLRALSASETYKYLGMSEALGINITDMKQSLKERFFGRLKKVLNSLLSGGNKVRAFNSWVMPVLMYSFGILKWTQTELDALDRRVRTLLTANRLHHPRSSVMRLYIPRKCGGRGFLNAKTLHNREICSLREYFLETDVAMHRDVVAVDKGLTPLSLAKENWRKPVVLDTNDRMEVWQSKELHGRFYRALHGPDVDLLASVAWLRFGDLFGETEGFVCAIMDEVMMTNNYRRFIVKDGTVDICRACHRPGESIRHIISGCSRLANGEYLHRHNLVARIIHQQLALKYNLVESEVPYYRYVPDPVLENGNITLYWDRSIITDRTIVANKPDIVVVDRSERRAMIVDITVPHDENLVKAEKDKQIKYLDLAREVVDMWHVDSAIIVPIVVTANGLIAKSLDQHLRRLSLGSWIKGLIQKAVLLDTARIVRRFLSLEP

SEQ ID NO: 13444 - protein, 868 aa, Apamea monoglypha
MRFVRRAFLGTDISSQDYLSRVTERIDFLKQKVYAWANRIRRYKRRVERYTQNRTFQSDERWVYRGWERPDQSVADTCLPDDDAMCSFWRSIWSAPVSHTEGDWTGKIERACELIPEMGAITICPQDVARAVRPLPNWKSPGPDGLHNFWIKWFQRSHAPLAAQFQSALESGLLPQFITTGITHLLHKSGSTADPKNYRPITCLPTIYKVLTSILRAKINKHIDSNSIMSVSQNGCRNGSRGTKELLLIDMAISQQVRRSRKDLSTCWIDYKKAYDSVPHTWLMRVLELYKVDTTLRTFLMTCMGQWRTVLRYPGCRNIQRNSEPIRIERGIFQGDSLSPLWFCLALNPLSTLLDDSGLGYRLRRGGQVISHLLYMDDLKLFAPNNLQLMKLLKITETFSSAIRMEFGVDKCAVMHVKRGEIVESVGTQLSDFTNLRALSAAETYKYLGMSEALGINVTDMKQSLKERFFGRLKKVFNSLLSGGNKVRAFNSWVMPVLMYSFGILKWTQTELEALDRRVRTLLTENRMHHPRSSVMRLYIPRKCGGRGFLNAKTLHNREICSLREYFLETDVGMHRDVVAVDKGLTPLSLAKENWRKPVVLDTNDRMEVWQSKELHGRFYRALHGPDVDLLASVAWLRFGDLFGETEGFVCAIMDEVMMTNNYRRYIVKDGTVDICRACHRPGESIRHIISGCSRLANGEYLHRHNLVARIIHQQLALKYSLVESEVPYYRYVPDPVLENGNITLYWDRSIITDRTIVANKPDIVVVDRSERRAMIVDITVPHDENLVKAEKDKQIKYLDLAHEVVDMWDVDSAIIVPIVVSANGLIAKSLDQHLRRLSLGSWIKGLIQKAVLLDTARIVRRFLSLEP

SEQ ID NO: 13445 - protein, 1198 aa, Apamea monoglypha
MLTRSAARRARLPSPDSSLSSASPPPVPSPTVSAVTTPAAVVASSSSDEYFSPPTTPPPARRRGGRRPPDGLGPRGPLASDRVPAPGGSVQRMRWTRSINENVMRSYYGATEGGNNLTAYRVRMLSLFQVLEPAVNVSAQRLSDQVRVIQRNHMLDDTVLDRLRSEMQSSHVIAPQSQTAAVLPQSNTSHADEGSNDRATNVSIQCNEELRNALEGAIREYRFMSPELRPRLPRLPMHNKNRALVAVLDAQLSSHFDACEDLTDTHSILYCAAVAACRVAHVKFDSDSRATRPKPAIPAWQCRIERRIGGARALIGKLICFREGNTRPRVMRFVRRAFLGTDISSQDYLSRVTERIDFLKQKVYAWANRIRRYKRRVERYTQNRTFQSDERWVYRGWERPDQSVADTCLPDDDAMCSFWRSIWSAPVSHTEGDWTGKIERACELIPEMGAITICPQDVARAVRPLPNWKSPGPDGLHNFWIKWFQRSHAPLAAQFQSALESGLLPQFITTGITHLLHKSGSTADPKNYRPITCLPTIYKVLTSILRAKINKHIDSNSIMSVSQNGCRNGSRGTKELLLIDMAISQQVRRSRKDLSTCWIDYKKAYDSVPHTWLMRVLELYKVDTTLRTFLMTCMGQWRTVLRYPGCRNIQRNSEPIRIERGIFQGDSLSPLWFCLALNPLSTLLDDSGLGYRLRRGGQVISHLLYMDDLKLFAPNNLQLMELLKITETFSSAIRMEFGVDKCAVMHVKRGEIVESVGTQLSDSTNLRALSASETYKYLGMSEALGINVTDMKQSLKERFFGRLKKVLNSLLSGGNKVRAFNSWVMPVLMYSFGILKWTQTELDALDRRVRTLLTANRSHHPRSSVMRLYIPRKCGGRGFLNAKTLHNREICSLREYFLETDVGMHRDVVAVDKGLTPLSLAKENWRKPVVLDTNDRMEVWQSKELHGRFYRALHGPDVDLLASVAWLRFGDLFGETEGFVCAIMDEVMMTNNYRRFIVKDGTVDICRACHRPGESIRHIISGCSRLANGEYLHRHNLVARIIHQQLALKYNLVESEVPYYRYVPDPVLENGNITLYWDRSIITDRTIVANKPDIVMVDRSERRAMIVDITVPHDENLVKAEKDKQIKYLDLAREVVDMWDVDSAIIVPIVVSANGLIAKSLDQHLRRLSLGSWIKGLIQKAVLLDTARIVRRFLSLEP

SEQ ID NO: 13446 - protein, 1196 aa, Furcula furcula
MLTRHKARLRPPDSSPRSASQPPAPSTGSAPAAVASSESDEYFSPPSSAPPVCRQRGRPPRNLGLLGQPAPNRVPVPGGVVRRMKWTPSINENVMRAYYKATEGGTNLTAYRDRMLSLFQTLEPAVNVSAQRLSDQVRAIQRGHMLDDAVLDRLRSEVQGGRVVPCIPSSQAVAPAVNAAPAPRLAAISGDDRDDMSTNISTNVSTQLRSTLEDVVREYRTMPQGLRPRLPRLPMHRRNRALVCALDSLLSSYFDSSEDLADAHSLLYCAAMTACRVARVKFPNSDAATRPRPAVPAWQCRIERRIGEARVLIGKLTCFREGNTRPRVMRFVRCAFSGTGIDPREYPSRVTERIDFLKQKVCAWANRIRRYRARVDRYSQNNMFQRDQRWVYRSWERPSQIGGEVLRPDDDAMIRFWRNIWSVPVTHSEGDWIGDVRQVCEPIPEMGAITIRPQDVADAVRPLPNWKAPGPDGLHNFWLKWLRSSHACLASLFQSAVESGSLPEFLTTGITHLLHKTNSTADPKNYRPITCLPTVYKTLTSILRAKIYRHVESNSIMSASQNGCRSGARGTKELLLIDMAICQQARRNRKDLSTCWIDYKKAYDSVPHTWLMRVLELYKVNTTLRTFLASCMRQWRTVLLYPGSRQTLGDGEPIRIERGIFQGDSLSPLWFCLALNPLSTLLKSSGLGYRLRRGGQVISHLLYMDDLKLFAPTEDQLMGLLKVTETFSSSIRMEFGVDKCAVMHVKRGRLVESRSVQLSDSTDLRTLSATETYKYLGMSQALGINETDMKQSLRERFLGRLRKVLKSLLSGGNRVRAYNGWVMPVLMYSFGILKWTQTELDTLDRTVRTLLTAYRMHHPRSSVMRLYIPRKCGGRGFLNAKTLHNREIYNLREYFLHCGGEMHTDVVAVDSGLTPLSLAKGNWRKPVVLTTGDREAVWQSKELYGRFYRALHGPDVDFSASVAWLRFGDLFGETEGSVCAIMDEVVMTNNYRKYILRDGTIDICRACHRPGESLRHIISGCSRLANGEYLHRHNQVARIIHQQLALKYRLVTSEVPYYRYVPEPVLEDGHITLYWDRSIITDRTIVANRPDIVLIDRTERRAMIVDITVPHDENLVKAEKDKECKYLDLAHEVVDLWDIDKAIIVPIVVSAHGLMAKSLDKHLKRLTLDGWIKGQMQKAVLLETARIVRKFLSLEP

SEQ ID NO: 13447 - protein, 1196 aa, Furcula furcula
MLTRHKARLRPPDSSPRSASQPPAPNTGGAPAAVASSESDEYFSPPSSPPPVCRQRGRPPRNLGLLGQPAPNRVPVPGGVVRRMKWTPSINENVMRAYYKATEGGTNLTAYRDRMLSLFRALEPAVNVSAQRLSDQVRAIQRGHMLDDAVLDRLRSEVQGGRVVPCIPSSQAVAPAVNTAPAPRLAANSGDDRDDMSTNISTNVSTQLRSTLEDVVREYRTMPQGLRPRLPRLPMHKRNRALVCALDSLLSSYFDSSEDLADAHSLLYCAAMTACRVARVKFPNSDAATRPRPAVPAWQCRIERRIGEARVLIGKLTCFREGNTRPRVMRFVRCAFSGTGIDPREYLSRVTERIDFLKQKVCAWANRIRRYRARVDRYSQNNMFQRHQRWVYRSWERPSQIGGEVLRPDDDAMIRFWRNIWSVPVTHSEGDWIGDVRQVCEPIPEMGAITIRPQDVADAVRPLPNWKAPGPDGLHNFWLKWLRSSHACLASLFQSAVESGSLPEFLTTGITHLLHKTNSTADPKNYRPITCLPTVYKTLTSILRAKIYRHVESNSIMSASQNGCRSGARGTKELLLIDMAICQQARRNRKDLSTCWIDYKKAYDSVPHTWLMRVLELYKVNTTLRTFLASCMRQWRTVLLYPGSRQTLGDGEPIRIERGIFQGDSLSPLWFCLALNPLSTLLKSSGLGYRLRRGGQVISHLLYMDDLKLFAPTEVQLMGLLKVTETFSSSIRMEFGVDKCAVMHVKRGRLVESRSVQLSDSTDLRTLSATETYKYLGMSQALGINETDMKQSLRERFLGRLRKVLKSLLSGGNRVRAYNGWVMPVLMYSFGILKWTQTELDTLDRTVRTLLTAYRMHHPRSSVMRLYIPRKCGGRGFLNAKTLHNREIYNLREYFLHCGGEMHTDVVAVDSGLTPLSLAKGNWRKPVVHTTGDREAVWQSKELHGRFYRALHGPDVDFSASVAWLRFGDLFGETEGSVCAIMDEVVMTNNYRKYILRDGTIDICRACHRPGESLRHIISGCSRLANGEYLHRHNQVARIIHQQLALKYRLVMSEVPYYRYVPEPVLEDGHITLYWDRSIITDRTIVANRPDIVLIDRTERRAMIVDVTVPHDENLVKAEKDKECKYLDLAHEVVDLWDIDKAIIVPIVVSAHGLMAKSLDKHLKRLTLDGWIKGQMQKAVLLETARIVRKFLSLEP

SEQ ID NO: 13448 - protein, 868 aa, Arctia plantaginis
MRFVKQAFLGTTIGPQQYMSCVTERIDFLKQKIYAWANRIRRYKKRIDRYNQNRMFQRNEKWVYRKWEEPDPCVSHGHLPDENVTHTFWRNIWSVPVTHIEGDWLRDVRRSCESITPMEPVIIDKDDVSCAVRSLPNWKSPGLDGLHNFWLKWFRSSHACLASQFQAALNSGSLPQFLTTGITHLLYKSGSVMDPKNFRPITCLPTMYKLLTSILRLKITLHINNNSIMSVSQNGCRSGSRGTKDLLIIDRAISQQVRRNRKSLATCWIDYKKAYDSVPHTWLLRVLELYKIDTTLCTFLKSCMGQWRTALRYPGCRQTMVIDAPIKIERGIFQGDSLSPLWFCLALNPLSTLLEGSGLGYRLQKDDQVISHLLYMDDLKLLAPTKLQLSALLKVTENFSNSIKMEFGVDKSALMYVKKGEIVESEGIELSDSTKLRSLSATEIYKYLGISQSLGIPESDMKQTLQERFFGRLKKVLKSLLSGGNKVRACNGWVMPILMYSFGILKWTQTELDALDRRVRTLLTAFRMHHPRSSVMRLYIPRKLGGRGLLNIKTLHNREICNLREYFLHTDVGMHRNVVAVDIGFTPLALAKENWRKPVVFSTNDRREVWKGKELHGRFYRALNGSDIDFKASTTWLRYGDLFGETEGFVCAIMDEVIMTNNYRKYILKDGTVDICRACHRPGESIRHIISGCSRLANGEYLHRHNQVARIVHQQLALKYHLVNLEVPYYRYVPDPVLENGRATLYWDRSIITDRTIVANKPDIVVIDRLERRAIIVDIAVPHDENLVKVEKEKQIKYLDLSHEIVDMWNVDSVIIVPIVVSAHGLIAKSLDQHLKRLTLDGWIKGLIQKAVLLDTARIVRRFLSLQS

SEQ ID NO: 13449 - protein, 1096 aa, Mamestra configurata
MRSYYGATEGGTNLTAYRGRMLSLFQVLEPAVNVSAQRLSDQVRVIQRNRMLDDAVLDRLRLESRNSRVSAASPPAAVQIQSSVSPRPNNVGEDDDDGAISVSTQCNERLRSALEDAFREYRSTPPELRPRLPRLPMHNKNRALVCALDSQLANCFDSSEDLADTHSILYCAAAAACRVAHVKFPNSDRATRPAVPAWQCRIERRIGEARALIGKLICFREGNTRRRVMRFVRRAFSGTDTSPRDYLTRVTERIDFLKQKIYAWANRIRRYKRRVERYTQNRTFQSNERWVYRAWERPDQGVTDTRLPDDDVMCSFWRNIWSVPVSHTEGDWTREVERACDPIPEMGAITISPQDVARAVRPLPNWKSPGPDGLHNFWIKWFKRSHARLASQFQSALESGSLPQFLTTGITHLLHKSGSTAEPKNYRPITCLPTVYKVLTSILRAKINQHIETNSIMSASQNGCRNRSRGTKELLLIDVAISQQVRRSRRDLSTCWIDYKKAYDSVPHTWLMRVLELYKVDAVLRTFLMSCMGQWRTVLRYPGCRQIQANSDPIRIERGIFQGDSLSPLWFCLALNPLSTLLEGSGQGYRLRRGGQVISHLLYMDDLKLFAPNNLQLMKLLKVTETFSSAISMEFGVDKCAVMHVKRGEIMESVGTQLSDSIHLRSLSSTETYKYLGMSEALGINANDVKQSLKERFFGRLNKVLNSLLSGGNKVRAFNGWVMPVLMYSFGILKWTQTELDALDRRVRSLLTANRMHHPRSSVMRLYIPRKCGGRGFLNAKTLHNREICSLREFFLEADVGMHRDVVAVDKGLTALSLANENWRKPVVLDTNDRREVWQSKELHGRFYRVLHGPDVDFLASVAWLRFGDLFGETEGFVCAIMDEVMMTNNYRKYIVKDGTVDICRACHRPGESIRHIISGCSSLANGDYLHRHNLVARIIHQQLALKYNLVESEVPYYRYVPDPVLENGNCTLYWDRSIITDRTIIANKPDIVVIDRLERRAMIVDIAVPHDVNLVKTEKDKQTKYLDLAREVVDMWDVNTAVIVPIVVTANGIIAKSLDQHLKRLSLGSWIKGLIQKAVLLDTARIVRRFLSQGP

SEQ ID NO: 13450 - protein, 1205 aa, Amphipyra berbera
MLTRSRSKLQDPKTRPRPSASSLSSASQPPDSSIVSDVIPAAAVASSSSDEYFSPPSSPPPPRRRGRGRPPACMGPRGPPASDRVPAPGGSVQRMRWTQSMNENCMRAYFGATEGGTNLTAYRGRMLSLFQVLEPAVNVSAQRLSDQVRVIQRDHRLTDAALDRLRSEVQSNRIISPQSQTAAQPQAPTVVLPPPIHADEESDDRVTNVSTQCNERLRSALELAIQEYRFAPPNLRPRIPRLPMNKKNRALMCALDSLLSSYFDNSESLEDTHSILYCAAVAACRVAHAKFDNNDRATRPKPAVPAWQCRIERRINEARALIGKLICFREGNTRPRVMRFVRRAFSGTDINPRDYLSRVTERIDFLKQKVYAWANRIRRYKRRVERYTQNRMFHSDERWVYRTWERPDHDVSDTHLPDNDVMNTFWRNIWSMPVTHIEGDWMQEVQRACEPIEEMGDITIVPQDVTSAVRPMANWKSPGPDGLHNFWLKWLRSSHARLASQFQSSLESGSFPEFLTTGVTHLLHKSGSTAEPKNYRPITCLPTVYKLLTSILRAKINSHIINNSIMSVSQNGCKNGSRGTKELLLIDMAISQQVRRSRKDLSTCWIDYKKAYDSVPHTWLMRVLELYKVNTTLCAFLTSCMGQWRTVLHYPGCWQIQGRGEPIRIERGIFQGDSLSPLWFCLALNPLSTLLEGSGLGYRLRRGGQVISHLLYMDDLKLFAPNNLQLVKLLKVTETFSNSIRMEFGVDKCAVMHVKRGGIMESVGTQLSDSIHLRSLSSTETYKYLGMSEALGINETDMKQSLRERFYGRLKKVLKSLLSGGNKVRAFNGWVMPVLIYSFGILKWTQTELDALDRRVRTLLTAYRMHHPRSSVMRLYIPRKCGGRGFLNAKTLHNREVCSLREYFLHADVGMHRDVVAVDKGFTPLSLAKENWRKPVVLDTNGRREVWQSKELHGRFYRALHGPDVDFLASVAWLRFGDLFGETEGFVCAIMDEVILTNNYRKYIVKDGTVDICRACHCPGESIRHIISGCSRLANGEYLHRHNLVARIIHQQLALKYNLVDAEVPYYKYVPDPVLENGHITLYWDRSIITDRTIVANKPDIVVIDRSERLAMIVDITVPHDENLVKAEKDKEIKYQDLAHEVVDMWEVDSAVIVPIVVTANGLIAKSLDQHLSRLALGSWIKGLIQKAVLLDTARIVRRFLSLRP

SEQ ID NO: 13451 - protein, 1205 aa, Amphipyra berbera
MLTRSRAKALTETTRPISSAPSLSSASQPPDSSIVSDVTPAAAVASSSSDEYFSPPTSPPPARRRGRGRPPDSLRPRGPLASDRVPAAGGSVQRMRWTPTMNENCMRAYFGATEGGTNLTAYRGRMLSLFQVLEPTVNVSAQRLSDQVRVIQRDHRLTDAALDRLRSEVQSNAIISLQSQTAAQPRTPTVVPPLPTHGNEESDDRVTNVSTQCNEQLRSALELAIQEYRFTPPNIRPRIPRLPMHRKNRALMCALDSLLSSYFDNSENLEDTHSILYCAAVAACRVAHAKFDNSDKATRPKRAVPAWQCRIERRINEARALIGKLICFREGNTRPRVMRFVRRAFSGTDINPRDYMSRVTERIDFLKQKVYAWANRIRRYKRRVERYTQNRMFHSDERWVYRTWERPDHDVNDTHPPDNDVMNTFWRNIWSMPVTHTEGDWMQEVQRACEPIEEMGDITIVPQDVTSAVRPMANWKSPGPDGLHNFWIKWLRSSHARLASQFQSSLESGSLPEFLTTGVTHLLHKSGSTAEPKNYRPITCLPTVYKLLASILRAKINSHIINNSIMSVSQNGCKNGSRGTKELLLIDMAISQQVRRSRKDLSTCWIDYKKAYDSVPHTWLMRVLELYKVNTTLCAFLTSCMGQWRTVLHYPGCRQIQGRGEPIRIERGIFQGDSLSPLWFCLALNPLSTLLEGSGLGYRLRRGGQVISHLLYMDDLKLFAPNNLQLMKLLKVTETFSNSIRMEFGVDKCAVMHVKRGGIMESVGTQLSDSIHLRSLSSTETYKYLGMSEALGINETDMKQSLRERFYGRLKKVLKSLLSGGNKVRAFNGWVMPVLMYSFGILKWTQTELDALDRRVRTLLTAYRMHHPRSSVMRLYIPRKCGGRGFLNAKTLHNREVCSLREYFLQADVGMHRDVVAVDKGFTPLSLAKENWRKPVVLDTNGRREVWQSKELHGRFYRALHGPDVDFLASVAWLRFGDLFGETEGFVCAIMDEVILTNNYRKYIVKDGTVDICRACHCPGESIRHIISGCSRLANGEYLHRHNLVARIIHQQLALKYNLVDAEVPYYKYVPDPVLENGHITLYWDRSIITDRTIVANKPDIVVIDRSERLAMIVDITVPHDENLVKAEKDKEIKYQDLAHEVVDMWEVDSAVIVPIVVTANGLIAKSLDQHLTRLALGSWIKGLMQKAVLLDTARIVRKFLSLRP

SEQ ID NO: 13452 - protein, 1205 aa, Amphipyra berbera
MLTRSRAKALTETTRPRSSAPSLSSASQPPDSSIVSDVTPAAAVASSSSDEYFSPPTSPPPARRRGRGRPPDSLRPRGPLASDRVPAAGGSVQRMRWTPTMNENCMRAYFGATEGGTNLTAYRGRMLSLFQVLEPTVNVSAQRLSDQVRVIQRDHRLTDAALDRLRSEVQSNAIISLQSQTAAQPRTPTVVPPLPTHGNEESDDRVTNVSTQCNEQLRSALELAIQEYRFTPPNIRPRIPRLPMHRKNRALMCALDSLLSSYFDNSENLEDTHSILYCAAVAACRVAHAKFDNSDKATRPKRAVPAWQCRIERRINEARALIGKLICFREGNTRPRVMRFVRRAFSGTDINPRDYMSRVTERIDFLKQKVYAWANRIRRYKRRVERYTQNRMFHSDERWVYRTWERPDHDVNDTHPPDNDVMNTFWRNIWSMPVTHTEGDWMQEVQRACEPIEEMGDITIVPQDVTSAVRPMANWKSPGPDGLHNFWIKWLRSSHARLASQFQSSLESGSLPEFLTTGVTHLLHKSGSTAEPKNYRPITCLPTVYKLLTSILRAKINSHIINNSIMSVSQNGCKNGSRGTKELLLIDMAISQQVRRSRKDLSTCWIDYKKAYDSVPHTWLMRVLELYKVNTTLCAFLTSCMGQWRTVLHYPGCRQIQGRGEPIRIERGIFQGDSLSPLWFCLALNPLSTLLEGSGLGYRLRRGGQVISHLLYMDDLKLFAPNNLQLMKLLKVTETFSNSIRMEFGVDKCAVMHVKRGGIMESVGTQLSDSIHLRSLSSTETYKYLGMSEALGINETDMKQSLRERFYGRLKKVLKSLLSGGNKVRAFNGWVMPVLMYSFGILKWTQTELDALDRRVRTLLTAYRMHHPRSSVMRLYIPRKCGGRGFLNAKTLHNREVCSLREYFLQADVGMHRDVVAVDKGFTPLSLAKENWRKPVVLDTNGRREVWQSKELHGRFYRALHGPDVDFLASVAWLRFGDLFGETEGFVCAIMDEVILTNNYRKYIVKDGTVDICRACHCPGESIRHIISGCSRLANGEYLHRHNLVARIIHQQLALKYNLVDAEVPYYKYVPDPVLENGHITLYWDRSIITDRTIVANKPDIVVIDRSERLAMIVDITVPHDGNLVKAEKDKEIKYQDLAHEVVDMWEVDSAVIVPIVVTANGLIAKSLDQHLTRLALGSWIKGLMQKAVLLDTARIVRKFLSLRP

SEQ ID NO: 13453 - protein, 1208 aa, Amphipyra berbera
MQTRSRAKATVTQNTRPTTSASSLSSASQPPDSSIVSDVIPAAAVASSSSDEFFSPPTSPPPPPARRRGRGRPPASIGPRGPPASDRVPAPGGSVQRMRWTQSMNENCMRAYFGATEGGTNLTAYRGRMLSLFQVLEPAVNVSAQRLSDQVRVIQRDHRLTDVALDRLRSEVQSNCIISPQSQTAAQPRAPTVVPPPPIHADEESNDRVTNVSTQCNEQLRSALELAIREYRFTPPNLRPRIPRLPMHRKNRALMCALDSLLSSYFDNSENLEDTHSILYCAAVAACRVAHAKFDNNDRATRPKPTVPAWQCRIERRINEARALIGKLICFREGNTRPRVIRFVRRAFSGTDINPRDYMSRVTERIDFLKQKVYAWANRIRRYKRRVERYTQNRMFHSDERRVYRTWERPDHDVSDTHLPDNDVMNTFWRNIWSMPVTHTEGDWMQEVQRACEPIEEMGDITIVPQDVTSAVRPMANWKSPGPDGLHNFWLKWLRSSHARLASQFQSSLESGSLPQFLTTGVTHLLHKSGSTAEPKNYRPITCLPTVYKLLTSILRSKISKHIANNSIMSVSQNGCKNGSRGTKELLLIDMAISQQVRRSRKNLSTCWIDYKKAYDSVPHTWLMRVLELYKVNTTLCAFLTSCMGQWRTVLHYPGCRQIQGRGEPIRIERGIFQGDSLSPLWFCLALNPLSTLLEGSGLGYRLRRGGQVISHLLYMDDLKLFAPNNLQLMKLLKVTETFSNSIRMEFGVDKCAVMHVKRGGIKESVGTQLSDSIHLRSLSSTETYKYLGMSEALGINETDMKQSLRERFYGRLKKVLKSLLSGGNKVRAFNGWVMPVLMYSFGILKWTQTELDALDRRVRTLLTAYRMHHPRSSVMRLYIPRKCGGRGFLNAKTLHNREVCSLREYFLQADVGMHRDVVAVDKGFTPLSLAKENWRKPVVLDTNGRREVWQSKELHGRFYRALYGPDVDFLASVAWLRFGDLFGETEGFVCAIMDEVMMTNNYRKYIVKDGTVDICRACHCPGESIRHIISGCSRLANGEYLHRHNLVARIIHQQLALKYNLVEAEVPYYKYVPDPVLENGHITLYWDRSIITDRTIVANKPDIVVIDRSERLAMIVDITVPHDENLVKAEKDKEIKYQDLAHEVVDMWEVDSAVIVPIVVTANGLIAKSLDQHLMRLSLGSWVKGLIQKAVLLDTARIVRKFLSLRP

SEQ ID NO: 13454 - protein, 1111 aa, Amphipyra berbera
MRWTPTMNENCMRAYFGATEGGTNLTAYRGRMLSLFRALEPAVNVSAQRLSDQVRVIQRDHRLTDAALDRLRSEVQSNRIISLQSQNAAQPQVPCMVPPRPNHADEESDDRVTNVSTQCNEQLRSALEHAIREYRFTPPNLRPRIPRLPMNKKNGALMCALDSLLSSYFDNSEGLEDTHSILYCAAVAACRVAHAKFDNNDRDTRPKPAVPAWQCRVERRINEARALIGKLICFREGNTRPRVMRFVRRAFSGTDINPRDYMSRVTERIDFLKQKVYAWANRIRRYKRRVERFIQNRMFHSDERRVYRTWERPDHDVSDTHLPDSDVMNTFWRNIWSMPVTHTEGDWMQEVQRACEPIEEMGDITIVPQDVTSAVRPMSNWKSPGPDGLHNFWLKWLRSSHARLASQFQSSLESGSLPQFLTTGVTHLLHKSGSTAEPKNYRPITCLPTVYKLLTSILRSKISTHITNNFIMSTSQNGCKNGSRGTKELLLIDMTISQQVRRSRKDLSTCWIDYKKAYDSVPHTWLMRVLELYKVNTTLCAFLTSCMGQWRTVLHYPGCRQIQGRGEPIRIKRGIFQGDSLSPLWFCLALNPLSTLLEGSGLGYRLRRGGQVISHLLYMDDLKLFAPNNLQLVKLLKVTETFSNSIRMEFGVDKCAVMHVKRGGVMESVGTQLSDSIHLRSLSSTETYKYLGMSEALGINVADMKQSLRERFYGRLKKVLKSLLSGGNKVRAFNGWVMPVLMYSFGILKWTQTELDALDRRVRTLLTAYRMHHPRSSVMRLYIPRKCGGRGFLNAKTLHNREVCNLREYFLQADVGMHRDVVAVDKGFTPLSLAKENWRKPVVLDTTGRRDVWQSKELHGRFYRALHGPDVDFLASVAWLRFGDLFGETEGFVCAIMDEVIMTNNYRKYIVKDGTVDICRACHCPGESIRHIISGCSRLANGEYLHRHNLVARIIHQQLALKYNLVDAEVPYYKYVPDPVLENGHITLYWDRSIITDRTIIANKPDIVVIDRSERLTMIVDITVPHDENLVKAEKDKEIKYQDLAHEVVDMWEVDSAVIVPIVVTANGLIAKSLDQHLMRLSLGSWVKGLIQKAVLLDTARIVRKFLSLRP

SEQ ID NO: 13455 - protein, 868 aa, Amphipyra berbera
MRFVRRAFSGTDINPRDYLSRVTERIDFLKQKVYAWANRIRRYKRRVERYTQNRMFHSDERWVYRTWDRPDHDVSDTHLPDNDVMNTFWRNIWSMPVTHIEGDWMQEVQRACEPIEEMGDITIVPQDVTSAVRPMANWKSPGPDGLHNFWLKWLRSSHARLASQFQSSLESGSFPEFLTTGVTHLLHKSGSTAEPKNYRPITCLPTVYKLLTSILRAKINSHIINNSIMSVSQNGCKNGSRGTKELLLIDMAISQQVRRSRKDLSTCWIDYKKAYDSVPHTWLMRVLELYKVNTTLCAFLTSCMGQWRTVLHYPGCRQIQGRGEPIRIERGIFQGDSLSPLWFCLALNPLSTLLEGSGLGYRLRRGGQVISHLLYMDDLKLFAPNNLQLVKLLKVTETFSNSIRMEFGVDKCAVMHVKRGGIMESVGTQLSDSIHLRSLSSTETYKYLGMSEALGINETDMKQSLRERFYGRLKKVLKSLLSGGNKVRAFNGWVMPVLMYSFGILKWTQTELDALDRRVRTLLTAYRMHHPRSSVMRLYIPRKCGGRGFLNAKTLHNREVCSLREYFLQADVGMHRDVVAVDKGFTPLSLAKENWRKPVVLDTNGRREVWQSKELHGRFYRALHGPDVDFLASVAWLRFGDLFGETEGFVCAIMDEVMMTNNYRKYIVKDGTVDICRACHCPGESIRHIISGCSRLANGEYLHRHNLVARIIHQQLALKYNLVDAEVPYYKYVPDPVLENGHITLYWDRSIITDRTIVANKPDIVVIDRSERLAMIVDITVPHDENLVKAEKDKEIKYQDLAHEVVDMWEVDSAVIVPIVVTANGLIAKSLDQHLTRLALGSWIKGLIQKAVLLDTARIVRKFLSLRP

SEQ ID NO: 13456 - protein, 1106 aa, Noctua janthe
MRWTQSINANVMRAYYGATEGGNNLTAYRVRMLSLFQVLEPAVNVSAQRLSDQVRVIQRNGMLDDTVLDRLRTEMQSSHVIATPPQTVVPPQSTIIPTHDNNVSNDMVTNVSTQCNEEMRCALEGAIREYRFMQPDLRPRVPRLPMHNKNKVLVAVLDSQLSNYFDNCENLTDAHSVLYCAAVTACRVAHVKFSDDRATRPKPAVPSWQYRIERRIGEARALIGKLICFREGNTRPRVMRFVRRAFSGTDISARDYMSRVTERIDFLKQKVYAWANRIRRYKRWVDRYTQNRTFQRDERWVYRAWERPDQGVADTHLPDDDAMCSFWRSIWSVPVSHTEGEWTREVERACDLVPEMGAITISPQDVVRAVRPLPNWKSPGPDGLHNFWIKWFTRSHARLAILFQSALESGSLPEFLTTGITHLLHKSGSTAEPKNYRPIACLPTVYKVLTSILRAKINKHIDDNSVMSASQNGCRNGSRGTKELLLIDMAISQQVRRSRRDLSTCWIDYKKAYDSVPHTWLMRVLELYKVDSTLRIFLMSCMGQWRTVLRYPGCRQIQRNSEPIRIERGIFQGDSLSPLWFCLALNPLSTLLEDSGLGYRLRRGGQVISHLLYMDDLKLFAPNDLQLMELLKVTETFSSAIRMEFGVDKCAVMHVKRGEIVESVGTQLSDSINLRSLSATETYKYLGMSEALGINVADMKQSLKERFFGRLKKVFNSLLSGGNKVRAFNGWVMPVLMYSFGILKWTQTELDALDRRVRTLLTTYRMHHPRSSVMRLYIPRRCGGRGFLNAKTLHNREIYSLREYFLETDVGMHRDVVAVDKGLTPLSLAKENWRKPVVLDTNDRMEVWQSKELHGRFFRALHGPDVDLPASVAWLRSGDLFGETEGFVCAIMDEVMMTNNYRRFIVKDGTVDICRACHRPGESIRHIISGCSRLANGEYLHRHNLVARIIHQQLALKYNLVESEVPYYKYVPDPVLENGNITLYWDRSIVTDRTIVANKPDIVVVDRSERRAMIVDITVPHDGNLVKAEKDKQIKYLDLAHEVVDMWDVDSAIIVPIVVSAHGLIAKSLDQYLRRLSLGSWIKGLIQKAVLLDTARIVRRFLSLEP

SEQ ID NO: 13457 - protein, 868 aa, Noctua janthe
MRFVRRAFSGTDISARDYMSRVTERIDFLKQKVYAWANRIRRYKRRVDRYTQNRTFQRDERWVYRVWERPDQGVADTRLPDDDAMCSFWRSIWSVPVSHTEGEWTREVERACDLVPEMGAITISPQDVVRAVRPLPNWKSPGPDGLHNFWIKWFTRSHARLAILFQSALESGSLPEFLTTGITHLLHKSGSTAEPKNYRPITCLPTVYKVLTSILRAKINKHIDDNSVMSASQNGCRNGSRGTKELLLIDMAISQQARRSRRDLSTCWIDYKKAYDSVPHTWLMRVLELYKVDSTLRIFLMSCMGQWRTVLRYPGCRQIQRNSEPIRIERGIFQGDSLSPLWFCLALNPLSTLLEDSGLGYRLRRGGQVISHLLYMDDLKLFAPNDFQLMELLKVTETFSSAIRMEFGVDKCAVMHVKRGEIVESVGTQLSDSINLRSLSATETYKYLGMSEALGINVADMKQSLKERFFGRLKKVFNSLLSGGNKVRAFNGWVMPVLMYSFGILKWTQTELDALDRRVRTLLTAYRMHHPRSTVMRLYIPRRCGGRGFLNAKTLHNREICSLREYFLETDVGMHRDVVAVDKGLTPLSLAKENWRKRVVLDTNDRMEVWQSKELHGRFFRALHGPDVDLPASVAWLRSGDLFGETEGFVCAIMDEVMMTNNYRRFIVKDGTVDICRACHRPGESIRHIISGCSRLANGEYLHRHNLVARIIHQQLALKYNLVESEVPYYKYVPDPVLENGSITLYWDRSIVTDRTIVANKPDIVVVDRSERRAMIVDITVPHDGNLVKAEKDKQIKYLDLAHEVVDMWDVDSAIIVPIVVSAHGLIAKSLDQYLRRLSLGSWIKGLIQKAVLLDTARIVRRFLSLEP

SEQ ID NO: 13458 - protein, 1197 aa, Noctua janthe
MLTRSATRRARLSPPDPSLSSASPPPESSPIVSAVTPAVAVASSSSDEYFSPPTTPPPVRRRGGRRPPDGLGPRGPPASDRVPAPGGSVPRMRWTQSINANVMRAYYGATEGGNNLTAYRVRMLSLFQVLEPAVNVSAQRLSDQVRVIQRNGMLDDTVLDRLRTEMQSSHVIATPPQTVVPPQSTIIPTHDNNVSNDMVTNVSTQCNEEMRCALEGAIREYRFMQPDLRPRVPRLPMHNKNKVLVAVLDSQLSNYFDNCENLTDAHSVLYCAAVAACRVAHVKFSDDRATRPKPAVPSWQYRIERRIGEARALIGKLICFREGNTRPRVMRFVRRAFSGTDISARDYMSRVTERIDFLKQKVYAWANRIRRYKRRVDRYTQNRTFQRDERWVYRAWERPDQGVADTHLPDDDAMCSFWRSIWSVPVSHTEGEWTREVERACDLVPEMGAITISPQDVVRAVRPLPNWKSPGPDGLHNFWIKWFTRSHARLAILFQSALESGSLPEFLTTGITHLLHKSGSTAEPKNYRPIACLPTVYKVLTSILRAKINKHIDDNSVMSASQNGCRNGSRGTKELLLIDMAISQQVRRSRRDLSTCWIDYKKDYDSVPHTWLMRVLELYKVDSTLRIFLMSCMGQWRTVLRYPGCRQIQRNSEPIRIERGIFQGDSLSPLWFCLALNPLSTLLEDSGLGYRLRRGGQVISHLLYMDDLKLFAPNNLQLMELLKVTETFSSAIRMEFGVDKCAVMHVKRGEIVESVGTQLSDSINLRSLSATETYKYLGMSEALGINVADMKQSLKERFFDRLKKVFNSLLSGGNKVRAFNGWVMPVLMYSFGILKWTQTELDALDRRVRTLLTTYRMHHPRSSVMRLYIPRRCGGRGFLNAKTLHNREICSLREYFLETDVGMHRDVVAVDKGLTPLSLAKENWRKPVVLDTNDRMEVWQSKELHGRFFRALHGPDVDLPASVAWLRSGDLFGETEGFVCAIMDEVMMTNNYRRFIVKDGTVDICRACHRPGESIRHIISGCSRLANGEYLHRHNLVARIIHQQLALKYNLVESEVPYYRYVPDPVLENGNITLYWDRSIVTDRTIVANKPDIVVVDRSERRAMIVDITVPHDGNLVKAEKDKQIKYLDLAHEVVDMWDVDSAIIVPIVVSAHGLIAKSLDQYLRRLSLGSWIKGLIQKAVLLDTARIVRRFLSLEP

SEQ ID NO: 13459 - protein, 1197 aa, Noctua janthe
MLTRSAARRARLSPPDPSLSSASPPPESRPVVSAVTPAVAVASSSSDEYFSPPTTPPPVRRRGGRRPPDGLGPRGPPASDRVPAPGGSVPRMRWTQSINANVMRAYYGATEGGNNLSAYRVRMLSLFQVLEPAVNVSAQRLSDQVRVIQRNGMLDDTVLDRLRTEMQSSHVIATPPQTVVPPQSTIIPTHDNNVSNDMVTNVSPQCNEEMRCALEGAIREYRFMQPDLRPRVPRLPMHNKNRVLVAVLDSQLSNYFDNCEDLTDAHSVLYCAAVAACRVAHVKFSDDRATRPKPAVPSWQYRIERRIGEARTLIGKLICFREGNTRPRVMRFVRRAFSGTDISARDYMSRVTERIDFLKQKVYAWANRIRRYKRRVDRYTQNRTFQRDERWVYRAWERPDQGVADTRLPDDDAMCSFWRSIWSVPVSHTEGEWTRRVERACDLVPEMGAINISPQDVVRAVRPLPNWKSPGPDGLHNFWIKWFTGSHARLAVLFQSALESGSLPEFLTTGITHLLHKSGSTAEPKNYRPITCLPTVYKVLTSILRAKINKHIDDNSVMSASQNGCRNGSRGTKELLLIDMAISQQVRRSRKDLSTCWIDYKKAYDSVPHTWLMRVLELYKIDATLRTFLMSCMGQWRTVLRYPGCRQIQRNSEPIRIERGIFQGDSLSPLWFCLALNPLSTLLEDSGLGYRLRRGGQVISHLLYMDDLKLFAPNDLQLMELLKVTETFSSAIRMEFGVDKCAVMHVKRGEIVESVGTQLSDSINLRSLSATETYKYLGMSEALGINVADMKQSLKERFFGRLKKVFNSLLSGGNKVRAFNGWVMPVLMYSFGILKWTQTELDALDRRVRTLLTAYRMHHPRSSVMRLYIPRRCGGRGFLNAKTLHNREICSLREYFLETDVGMHRDVVAVDKGLTPLSLAKENWRKPVVLDTNDRMEVWQSKELHGRFFRALHGPDVDLSASVAWLRSGDLFGETEGFVCAIMDEVMMTNNYRRFIVKDGTVDICRACHRPGESIRHIISGCSRLANGEYLHRHNLVARIIHQQLALKYNLVESEVPYYKYVPDPVLENGSITLYWDRSIITDRTIVANKPDIVVVDRSERRAMIVDITVPHDENLVKAEKDKQIKYLDLAREVVDMWDVDSAIIVPIVVSAHGLIAKSLDQYLRRLSLGSWIKGLIQKAVLLDTARIVRRFLSLET

SEQ ID NO: 13460 - protein, 1200 aa, Mythimna ferrago
MLTRSRARQQQTHPTSSDSSFSSASQPPGPAPAVSPVIPVAAVASSSSDEYFSPPTTPPPARRRGRGRPPACLGPRGPPASGGVPAAGGSVQRMRWTQSINENVMRSYFGATEGGTNLTAYRGRMLSLFQVLEPAVNVSAQRLSDQVRVIQRNRMLDDAVLDRLRLESRNGRVSPVSPPAAVQLQPSVSPRPDHVGEDDDDGAISVSTQCNARLRSALEDAFREYRSIPPELRPRLPRLPMHRKNRALVCALDSQLSNCFDSSEDLTDTHSILYCAAAAACRVAHVKIPNSDRATRPAKPAWQCRIERRIGEARALIGKLICFREGNTRPRVMRFVRRAFSGTDVSPRDYLPRITERIDFLRQKVYAWANRIRRYKRRVERYTQNRAFQSNERWVYRAWERPDQSVIDTRLPDDDAMYSFWRSIWSVPVSHTEGDWSRGVERECELIPEMGAITISPQDVARAVRPLPNWKSPGPDGLHNFWLKWFKSSHARLASQFQSALESGSLPQFLTTGITHLLHKSGSTAEPKNYRPIICLPTVYKVLTSILRAKINSHIETNSIMSASQNGCRNGSRGTKELLLIDVAISQQVRRSRRDLSTCWIDYKKAYDSVPHTWLMRVLELYKIDVTLRTFLMSCMGQWRTVLHYPGCRWVSENSEPLRIERGIFQGDSLSPLWFCLALNPLSTLLEGSGLGYRLRREGQVISHLLYMDDLKLFASNNLQLMELLKVTETFSSAIRMEFGLDKCAVMHVKRGEIMESVGTQLSDSIHLRSLSSTETYKYLGMSEALGINAADVKQSLRERFFCRLNKVLKSLLSGGNKVRAFNGWVMPVLMYSFGILKWTQTELDALDRRVRTLLTANRMHHPRSSVMRLYIPRKCGGRGFLNAKTLHNREVCSLREYFLETDVGMHRDVVAVDKGLTPLSLASENWRKPIVMDTNERKEVWKGKELHGRFYRALHGPDVDLLASVSWLRFGNLFGETEGFVFAIMDEVMMTNNYRKYIVKDGTVDICRACHRPGESIRHIISGCSHLANGDYLHRHNLVARIIHQQLALKYNLVESEVPYYRYVSDPVLENGSVTLYWDRSIITDRTIVANKPDIVVIDRLERRTMIVDIAVPHDENLVKAEKDKQTKYLDLAREVVDMWEVDRAIIVPIVVTANGLIAKSLDQHLRRLSLSSWIKGLIQKAVLLDTARIVRRFLSQEP

SEQ ID NO: 13461 - protein, 1200 aa, Mythimna ferrago
MLTRAAARRARPPPPASSLSSASLPPEPSLTVSAVTPAAAAASSSSDEYYSPPTTPPPARRRGGRRPPACLGPRGPPVSDRVPAADGSVPRMRWTQSTNENVMRAYYGATEGGNNLTAYRVRMLSLFQVLEPAVNVSAQRLSDQVRVIQRNHMLDDTVLDRLRTEMSNRVITPPSQPVVPVVVPQSSHISLHTDEVSTDTVTNVSTQCNNELRSALECAIREYRNMPLELRPRLPRLPMHNKNKALVAALDSQLSNYFDDCEDLTDTHSIMYCAAVAACRVAHVKFPNSDVATRPKPAVPAWQCRIERRIGGARALIGKLICFREGNTRPRVMRFVRRAFSGTDISPRDYMSRVTERIDFLKQKVYAWANRIRRYKRRVERYIQNSTFRSNERWVYRAWERPDQGVTDTRPPDDDAMYSFWRNIWSVPVSHTEGGWTREVERACESITEMGAFTISPQDVARAVRPLPNWKSPGPDGLHNFWIKWLQRSHARLASQYQAALESGSLPEFLTTGVTHLLHKSGSTAEPKNYRPITCLPTVYKVLTSILRAKINHHVDNNAIMSASQNGCRNGSRGTKELLLIDMAISQQVRRSRKDLSTCWIDYKKAYDSVPHTWLMRVLELYKVDATLRTFLMSCMRQWRTVLRYPGCRNIQRNSEPVRIERGIFQGDSLSPLWFCLALNPLSTLLENSGLGGRSKRGGQVISHLLYMDDLKLFAPNNLQLMELLKVTETFSSAIRMEFGVDKCAVMHIKRGEIVESVGIQLSDSIHLRSLSPTETYKYLGMSEALGINATDMKQSLRERFFGRLKKVLNSLLSGGNKVRAFNGWVMPVLMYAFGVLKWTQTELDALDRRVRTLLSAYRMHHPRSSVMRLYIPRKCGGRGFLNAKSLHNREVCSLREYFLAADGGMHRDVVSVDKGLTPLSLANENWRKPVVLDTNVRREVWQSKELHGRFFRALHGPDVDQLASVAWLRVGDLFGETEGFVCAIMDEVIMTNNYRRFIVKDGTVDICRACHRPGESIRHIISGCSRLANGEYLHRHNLVARIIHQQLALKYSLVESEVPYYRYVPDPVLDSGDITLYWDRSIITDRTIVANKPDIVVVDRSERRAMIVDISVPHDENLAKAEKDKQIKYIDLAREVVDMWEVDSAIIVPIVVSANGLIAKSLDQHLRRLSLGDWIKGLIQKAVLLDTARIVRRFLSLEP

SEQ ID NO: 13462 - protein, 1200 aa, Mythimna ferrago
MLTRSRAQQLNTHLTTSGSSLSSASQPPGPAPAVSPEIPVAAVASSSSDEYFSPPTTPPPTRRRGRGRPPACLGPRGPPASDRVPAAGGSVQRMRWTQSINENVMRSYFGATEGGTNLTAYRGRMLSLFQVLEPAVNVSAQRLSDQVRVIQRNRMLDDAVLDRLRLESRNGRVSPVSPPAAVQRQLSVSPRPDHVGEDDDDGAISVSTQCNARLRSALEDAFREYRSIPPELRPRLPRLPMHRKNRALVCALDSQLSNCFDSSEDLTDTHSILYCAAAAACRVAHVKIPNSDRATRPAKPAWQCRIERRIGEARALIGKLICFREGNTRPRVMRFVRRAFSGTDISPRDYLPRITERIDFLRQKVYAWANRIRRYKRRVERYTQNRAFQSNERWVYRAWERPDQSVIDTHLPDDDAMYSFWRSIWSVPVNHTEGDWTREVERECELIPEMGAITISPQDVARAVRPLPNWKSPGPEGLHNFWLKWFKSSHARLASQFQSALESGSLPQFLTTGITHLLYKSGSTAEPKNYRPITCLPTVYKVLTSILRAKINSHIETNSIMSASQNGCRNGSRGTKELLLIDVAISQQVRRSRRDLSICWIDYKKAYDSVPHTWLMRVLELYKIDVTLRTFLMSCMGQWRTVLHYPGCRRVSENSEPLRIERGIFQGDSLSPLWFCLALNPLSTLLEGSGLGYRLRREGQVISHLLYMDDLKLFASNNLQLMELLKVTETFSSAIRMEFGLDKCAVMHVKRGEIMESVGTQLSDSIHLRSLCSTETYKYLGMSEALGINAADVKQSLRERFFGRLNKVLKSLLSGGNKVRAFNDWVMPVLMYSFGILKWTQTELDALDRRVRTLLTANRMHHPRSSVMRLYIPRKCGGRGFLNAKTLHNREVCSLREYFLETDVGMHRDVVAVDKGLTPLSLANENWCKPIVMDTNERKEVWKGKELHGRFYRALHGPDVDLLASVSWLRFGDLFGETEGFVFAIMDEVMMTNNYRKYIVKDGTVDICRACHRPGESIRHIISGCSHLANGDYLHRHNLVARIIHQQLALKYNLVESEVPYYRYVPDPVLENGSVTLYWDRSIITDRTIVANKPDIVVIDRLERRTMIVDIAVPHDENLVKAEKDKQTKYLDLAREVVDMWEVDRAIIVPIVVTANGLIAKSLDQHLRRLSLGSWIKGLIQKAVLLDTARIVRRFLSQEP

SEQ ID NO: 13463 - protein, 1200 aa, Mythimna ferrago
MLTRAAARRARPPPPASSLSSASPPPEPSPIVSAVTPAVAAASSSSDEYYSPPTTPPPTRRRGGRRPPDCLGPRGPPASDRVPAPGGSVQRMRWTQSINENVMRSYYGATEGGNNLTAYRVRMLSLFQVLEPAVNVSAQRLSDQVRVILRNHMLDDTVLDRLRTEMSDRVITPPSQPVVPAVVPPSSYISFHTDEVSSDTVTNVSNQCNSELRSALECAIREYRNIPPELRPRIPRLPMCNKNRALVAALDSQLSNYFDDCEDLTDTHSIMYCAAVAACRVAHVKFPNSDVATRPKPAVPAWQCRIERRIGGARALIGKLICFREGNTRPRVMRFVRRAFSGTDISPRDYMSRVTERIDFLKQKVYAWANRIRRYKRRVERYTQNRTFRSNERWVYRAWERPDQGVTDARLPDDDAMSSFWRSIWSVPVSHTEGDWTREVERACDPIPQMGAIDISPQDVARAVRPLPNWKSPGPDGLHNFWIKWFTRSHARLAYQFQSALESGSLPQFLTTGITHLLHKSGSTAEPKNYRPITCLPTVYKVLTSILRSKINSHIDENSIMSPSQNGCRNGSRGTKELLLIDMTISQQVRRSRKDLSTCWIDYRKAYDSVPHTWLMRVLELYKIDTTLRTFLMSCMRQWSTVLRYPGCRNIQRNSEPVRIERGIFQGDSLSPLWFCLALNPLSTLLENSGLGYRLKRSGQVISHLLYMDDLKLFAPNNLQLMELLKVTEIFSSAIRMEFGVDKCAVMHVKRGEVVESVSTQLTDSINLRSLSPTETYKYLGMSEALGISITGMKQSLRERFFGRLKKVFNSLLSGGNKVRAFNGWVMPVLMYSFGVLKWTQTELDALDRRVRTLLTAYRMHHPLSSVMRLYIPRKCGGRGFLNAKTLHNREVCSLREYFLAADVGMHRDVVAVDKGLTPLSLANENWRKPIVLDTNDRREVWQSKELHGRFFRALHGPDVDQLASVAWLRFGDLFGETEGFVCAIMDEVIMTNNYRRFIVKDGTVDICRACHRPGESIRHIISGCSRLANGEYLHRHNLVARIIHQQLALKYSLVESEVPYYRYEPDPVLDNGHITLYWDRPIITDRTIVANKPDIVVVDRSERRAMIVDISVPHDENLVKAEKDKQIKYIDLAREVVDMWEVDSAVIVPIVVSANGLIAKSLDQHLRRLSLGDWIKGLIQKAVLLDTARIVRRFLSLEP

SEQ ID NO: 13464 - protein, 1200 aa, Mythimna ferrago
MLTRAAARRARPPPLASSLSSASLPPEPSLTVSAVTPAAAAASSSSDEYYSPPTTPPPARRRGGRRPPACLGPRGPPVSDRVPAAGGSVPRMRWTQSTNENVMRAYYGATEGGNNLTAYRVRMLSLFQVLEPAVNVSAQRLSDQVRVIQRNNMLDDTVLDRLRTEMSNRVITPPSQPVVPVVVPQSSHISLHTDEVSTDTVTNVSTQCNNELRSALECAIREYRNMPLELRPRLPRLPMHNKNKALVAALDSQLSNYFDDCEDLTDTHSIMYCAAVAACRVAHVKFPNSDVATRPKPAVPAWQYRIEHRIGGARALIGKLICFREGNTRPRVMRFVRRAFSGTDISPRDYMSRVTERIDFLKQKVYAWANRIRRYKRRVERYIQNSTFRSNERWVYRAWERPDQGVTDTRPLDDDAMCSFWRNIWSVPVSHTEGGWTREVERACESVTEMGAITISPQDVARAVRPLPNWKSPGPDGLHNFWIKWLQRSHARLASQYQAALESGSLPEFLTTGVTHLLHKSGSTAEPKNYRPITCLPTVYKVLTSILRAKINHHVDNNAIMSASQNGCRNGSRGTKELLLIDMAISQQVRRSRKDLSTCWIDYKKAYDSVPHTWLMRVLELYKVDATLRTFLMSCMRQWRTVLRYPGCRNIQRNSEPVRIERGIFQGDSLSPLWFCLALNPLSTLLENSGLGYRLKRGGQVISHLLYMDDLKLFAPNNLQLMELLKVTETFSSAIRMEFGVDKCAVMHIKRGEIVESVGIQLSDSIHLRSLSPTETYKYLGMSEALGINATDMKQSLRERFFGRLKKVLNSLLSGGNKVRAFNGWVMPVLMYAFGVLKWTQTELDALDRRVRTLLTAYRMHHPRSSVMRLYIPRKCGGRGFLNAKSLHNREVCSLREYFLAADGGMHRDVVAVDKGLTPLSLANENWRKPVVLDTNVRREVWQSKELHGRFFRALHGPDVDQLASVAWLRVGDLFGETEGFVCAIMDEVIMTNNYRRFIVKDGTVDICRACHRPGESIRHIISGCSRLANGEYLHRHNLVARIIHQQLALKYSLVESEVPYYRYVPDPVLDSGDITLYWDRSIITDRTIVANKPDIVVVDRSERRAMIVDISVPHDENLAKAEKDKQIKYIDLAREVVDMWEVDSAIIVPIVVSANGLIAKSLDQHLRRLSLGDWIKGLIQKAVLLDTARIVRRFLSLEP

SEQ ID NO: 13465 - protein, 1109 aa, Mythimna ferrago
MRWTQSINENVMRSYYGATEGGNNLTAYRVRMLSLFQVLEPAVNVSAQRLSDQVRVILRNHMLDDTVLDRLRTEMSDRVITPPSQPMVPAVVPPSSYVSFHTDEVSSDTVTNVSNQCNSELRSALECAIREYRNIPSELRPRIPRLPMCNKNRALVAALDSQLSNYFDDCEDLTDTHSIMYCAAVAACRVAHVKFPNSDVATRPKPAVPAWQCRIERRIGGARALIGKLICFREGNTRPRVMRFVRRAFSGTDISPRDYMSRVTERIDFLKQKVYAWANRIRRYKRRVERYTQNRTFQSNERWVYRAWERPDQGVTDVRLPDDDAMSSFWRSIWSVPVSHTEGDWTRAVERACDPIPQMGAIDISPQDVARAVRPLPNWKSPGPDGLHNFWIKWFTRSHARLAYQFQSALESGSLPQFLTTGITHLLHKSGSTAEPKNYRPITCLPTVYKVLTSILRSKINSHIDENSIMSPSQNGCRNGSRGTKELLLIDMTISQQVRRSRKDLSTCWIDYRKAYDSVPHTWLMRVLELYKIDTTLRTFLMSCMRQWSTVLRYPGCRNIQRNSEPVRIERGIFQGDSLSPLWFCLALNPLSTLLENSGLGYRLKRGGQVISHLLYMDDLKLFAPNNLQLMELLKATETFSSAIRMEFGVDKCAVMHVKRGEVVESVSTQLTDSINLRSLSPTETYKYLGMSEALGISITDMKQSLRERFFGRLKKVFNSLLSGGNKVRAFNGWVMPVLMYSFGVLKWTQTELDALDRRVRTLLTAYRMHHPRSSVMRLYIPRKCGGRGFLNAKTLHNREVCSLREYFLAAAVGMHRDVVAVDKGLTPLSLANENWRKPIVLDTNDRREVWQSKELHGRFFRALHGPDVDQLASVAWLRFGDLFGETEGFVCAIMDEVIMTNNYRRFIVKDGTVDICRACHRPGESIRHIISGCSRLANGEYLHRHNLVARIIHQQLALKYSLVESEVPYYRYEPDPVLDNGHITLYWDRPIITDRTIVANKPDIVVVDRSERRAMIVDISVPHDENLVKAEKDKQIKYIDLAREVVDMWEVDSAVIVPIVVSANGLIAKSLDQHLRRLSLGDWIKGLIQKAVLLDTARIVRRFLSLEP

SEQ ID NO: 13466 - protein, 1200 aa, Mythimna ferrago
MLTRAAARRARPPPPASSLSSASPPPEPSLNASAVTPAATVASSSSDEFYSPPTSPPPARRRRGRRPPSSLGPRGPPASDRVPAPGGSVQRMRWTQSINENVMRSYYGATEGGNNLTAYRVRMLSLFQVLEPAVNVSAQRLSDQVRVILRNHMLDDSVLDRLRTEMSDRVITPPSQPVVPVVVPPSSHISFHTDEVSTDMVTNVSTQCNNELRSALECAIREYRNIPPELRPRIPRLPMCNKNRALVAALDSQLSNYFDDCEDLTETHSIMYCAAVAACRVAHVKFPDSDETTRPKSAVPAWQCRIERRIGGARALIGKLICFREGNTRPRVMRFVRRAFSGTNISPRDYMSRVTERIDFLKQKVYAWASRIRRYKRRVERYTQNRTFRSNERWVYRAWERPDQGVTGARLPEDDAMCSFWRSIWSVPVSHTEGDWTREVERACDPIPQMGAIDISPQDVARAVRPLPNWKSPGPDGLHNFWIKWFTRSHARLAYQFQSALESGSLPQFLTTGITHLLHKSGSTAEPKNYRPITCLPTVYKVLTSILRSKINSHIDENSIMSPSQNGCRNGSRGTKELLLIDMTISQQVRRSRKDLSTCWIDYKKAYDSVPHTWLMRVLELYKVDATLCTFLMSCMRQWRTVLRYPGCRNIQRNSEPVRIERGIFQGDSLSPLWFCLALNPLSTLLENSGLGYRLKRGGQVISHLLYMDDLKLFAPNNLQLMELLKVTETFSSAIRMEFGVDKCAVMHIKRGEIVESVGTQLSDSIHLRSLSPTETYKYLGMSEALGINATDMKQSLRERFFGRLKKVLNSLLSGGNKVRAFNGWVMPVLMYAFGVLKWTQTELDALDRKVRTLLTAYRMHHPRSSVMRLYIPRKCGGRGFLNAKTLHNREVCSLREYFLAADVGMHRDVVAVDKGLTPLSLANENWRKPVVLDTNVRKEVWQSKELHGRFFRALHGPDVDQLASVAWLRVGDLFGETEGFVCAIMDEVIMTNNYRRFIVKDGTVDICRACHRPGESIRHIISGCSRLANGEYLHRHNLVARIIHQQLALKYSLVESEVPYYRYEPDPVLDNGHITLYWDRPIITDRTIVANKPDIVVVDRSERRAMIVDISVPHDENLVKAEKDKQIKYIDLAREVVDMWEVDSAVIVPIVVSANGLIAKSLDQHLRRLSLGDWIKGLIQKAVLLDTARIVRRFLSLEP

SEQ ID NO: 13467 - protein, 1109 aa, Mythimna ferrago
MRWTQSINENVMRSYYGATEGGNNLTAYRVRMLSLFQVLEPAVNVSAQRLSDQVRVILRNHMLDDSVLDRLRTEMSDRVITPPSQPVVPVVVPPSSHISFHTDEVSTDMVTNVSTQCNNELRSALECAIREYRNIPPELRPRIPRLPMCNKNGALVAALDSQLSNYFDDCEDLTETHSIMYCVAVAACRVAHVKFPDSDEATRPKSAVPAWQCRIERRIGGARALIGKLICFREGNTRPRVMRFVRRAFSGTNISPRDYMSRVTERIDFLKQKVYAWANRIRRYKRRVERYTQNRTFRSNERWVYRAWERPDQGVTDARLPDDDAMCSFWRSIWSVPVTHTEGDWTREVERACDPIPQMGAIDISPQDVARAVRPLPNWKSPGPDGLHNFWIKWFTRSHARLAYQFQSALESGSLPQFLTTGITHLLHKSGSAAEPKNYRPITCLPTVYKVLTSILRSKINSHIDENSIMSPSQNGCRNGSRGTKELLLIDMTISQQVRRSRKDLSTCWIDYKKAYDSVPHTWLMRVLELYKIDTTLRTFLMSCMRQWSTVLRYPGCRNIQRNSEPVRIERGIFQGDSLSPLWFCLALNPLSTLLENSTLGYRLKRGGQVISHLLYMDDLKLFAPNNLQLMELLKVTETFSSAIRMEFGVDKCAVMHVKRGEVVESVGVQLTDSINLRSLSPTETYKYLGMSEALGISTIDMKQSLKERFFGRLKKVFNSLLSGGNKVRAFNGWVMPVLMYSFGVLKWTQTELDALDRRVCTLLTAYRMHHPRSSVMRLYIPRKSGGRGFLNAKTLHNREVCSLREYFLAADVGMHRDVVALDKGLTPLSLANENWRKPIVLDTDDRREVWQSKELHGRFFRALHGPDVDQLASVAWLRFGDLFGETEGFVCAIMDEVIMTNNYRRFIVKDGTVDICRACHRPGESIRHIISGCSRLANGEYLHRHNLVARIIHQQLALKYSLVESEVPYYRYEPDPVLDKGHITLFWDRPIITDRTIVANKPDIVVVDRSERRAMIVDISVPHDENLVKAEKDKQIKYIDLAREVVDMWEVDSAIIVPIVVSANGLIAKSLDQHLRRLSLGDWIKGLIQKAVLLDTARIVRRFLSLEP

SEQ ID NO: 13468 - protein, 1200 aa, Mythimna ferrago
MLTRSRARSQIAQPTSSGSSLSSASQPPGPAPAVSPEIPVAAVASSSSDEYFSPPTTPPPARRRGRGRPPACLGPRGPPASDRVLAAGGSVQRMRWTQSINENVMRSYFGATEGGTNLTAYRGRMLSLFQVLEPAVNVSAQRLSDQVRVIQRNRMLDDAVLDRLRLESRNGRVSPISPPAVVQRQPSVSPRPDHVGEDDDDGAISVSTQCNARLRSALEDAFREYRSIPPELRPRLPRLPMHRKNRALVCALDSQLSNCFDSSEDLTDTHSILYCAAAAACRVAHVKIPNNDRATRPAKPAWQCRIERRIGEARALIGKLICFREGNTRPRVMRFVRRAFSGTDISPRDYLPRITERIDFLKQKVYAWANRIRRYKRRVERYTQNHTFQSNERWVYRAWERPDQSVIDTRLPDDDAMYSFWRSIWSVPVNHTEGDWTREIERVCELVPEMGAINISPQDVARAVRPLPNWKSPGPDGLHNFWLKWFQSSHARLAFQFQSALESGSLPQFLTTGITHLLHKSGSTAEPKNYRPITCLPTVYKVLTSILRAKINNHIEINSIMSASQNGCRNGSRGTKELLLIDVAISQQVRRSRRDLSTCWIDYKKAYDSVPHTWLMRVLELYKVDATLRAFLMSCMGQWRTVLHYPGCRRVSENSEPLRIERGIFQGDSLSPLWFCLALNPLSTLLEASGLGYRLRREGQVISHLLYMDDLKLFASNNLQLMELLKVTETFSSAIRMEFGLDKCAVMHVKRGEIMESVGTQLSDSIHLRSLCSTETYKYLGMSEALGINAADVKQSLRERFFGRLNKVLNSLLSGGNKVRAFNGWVMPVLMYSFGILKWTQTELDALDRRVRTLLTANRMHHPRSSVMRLYIPRKCGGRGFLNAKTLHNREVCSLREYFLETDVGMHRDVVAVDKGLTPLSLANENWRKPIVMDTNERKEVWKGKELHGRFYRALHGPDVDLLASVSWLRFGDLFGETEGFVFAIMDEVMMTNNYRKYIVKDGTVDICRACHRPGESIRHIISGCSHLANGDYLHRHNLVARIIHQQLALKYNLVESEVPYYRYVPDPVLENGSVTLYWDRSIITDRTIVANKPDIVVIDRLERRTMIVDIAVPHDENLVKAEKDKQTKYLDLAREVVDMWEVDRAIIVPIVVTANGLIAKSLDQHLRRLSLGSWIKGLIQKAVLLDTARIVRRFLSQEP

SEQ ID NO: 13469 - protein, 1200 aa, Mythimna ferrago
MLTRAAARRARPPPPASSLSSASPPPEPSLNASAVTPAATVASSSSDEFYSPPTSPPPARRRRGRRPPSSLGPRGPPASDRVPAPGGSVQRMRWTQSINENVMRSYYGATEGGNNLTAYRVRMLSLFQVLEPAVNVSAQRLSDQVRVILRNHMLDDSVLDRLRTEMSDRVITPPSQPVVPVVVPPSSHISFHTDEVSTDMVTNVSTQCNNELRSALECAIREYRNIPPELRPRIPRLPMCNKNRALVAALDSQLSNYFDDCEDLTETHSIMYCAAVAACRVAHVKFPDSDEATRPKSAVPAWQCRIERRIGGARALIGKLICFREGNTRPRVMRFVRRAFSGTNISPRDYMSRVTERIDFLKQKVYAWANRIRRYKRRVERYTQNRTFRSNERWVYRAWERPDQGVTGAHLPEDDAMCSFWRSIWSVPVSHTEGDWTREVERACDPIPQMGAIDISPQDVARAVRPLPNWKSPGPDGLHNFWIKWFTRSHARLAYQFQSALESGSLPQFLTTGITHLLHKSGSTAEPKNYRPITCLPTVYKVLTSILRSKINSHIDENSIMSPSQNGCRNGSRGTKELLLIDMTISQQVRRSRKDLSTCWIDYKKAYDSVPHTWLMRVLELYKVDATLCTFLMSCMRQWRTVLRYPGCRNIQRNSEPVRIERGIFQGDSLSPLWFCLALNPLSTLLENSGLGYRLKRGGQVISHLLYMDDLKLFAPNNLQLMELLKVTETFSSAIRMEFGVDKCAVMHIKRGEIVESVGTQLSDSIHLRSLSPTETYKYLGMSEALGINATVMKQSLRERFFGRLKKVLNSLLSGGNKVRAFNGWVMPVLMYAFGVLKWTQTELDALDRKVRTLLTAYRMHHPRSSVMRLYIPRKCGGRGFLNAKTLHNREVCSLREYFLAADVGMHRDVVAVDKGLTPLSLANENWRKPVVLDTNVRKEVWQSKELHGRFFRALHGPDVDQLASVAWLRVGDLFGETEGFVCAIMDEVIMTNNYRRFIVKDGTVDICRACHRPGESIRHIISGCSRLANGEYLHRHNLVARIIHQQLALKYSLVESEVPYYRYVPDPVLDSGDITLYWDRSIITDRTIVANKPDIVVVDRSERRAMIVDISVPHDENLVKAEKDKQIKYIDLAREVVDMWEVDSAIIVPIVVSANGLIAKSLDQHLRRLSLGDWIKGLIQKAVLLDTARIVRRFLSLEP

SEQ ID NO: 13470 - protein, 1198 aa, Mythimna ferrago
MLTRAAARRARLPAPASPLSSASPPPEPSPTVSAVTPAVAAASSSSDEYYSPPTTPPPTRRRGGRRPPACLGSRGPPASERVPATGGCVSRMRWTQSINENVMRAYFGATEGGNNLTAYRVRMLSLFQVLEPAVNVSAQRLSDQVRVIQRNHMLDDTVLDRLRTEMGSHAVTSSSQTVVPPQVSNHLSINADEEITDMVTHVSTQYNNELRSALECAIREYRNIPPELRPRIPRLPMCNKNRALVAALDSQLSNYFDDCEDLTDTHSIMYCAAVAACRVAHVKFPNTDVATRPKPAVPAWQCRIERRIGRARALIGKLICFREGNTRPRVMRFVRRAFSGTDISPRDYMSRVTERIDFLKQKVYAWANRIRRYKRRVERYIQNSTFRSNERWVYRTWERPDQGVTDTHLPDDDAMCSFWRNIWSVPVSHTEGGWTREVERACESITEMGAITISPQDVARAVRPLPNWKSPGPDGLHNFWIKWLQRSHARLASQYQTALESGSLPEFLTTGVTHLLHKSGSTAEPKNYRPITCLPTVYKVLTSILRAKINNHVDNNAIMSASQNGCRNGSRGTKELLLIDMAISQQVRRSRKDLSTCWIDYKKAYDSVPHTWLMRVLELYKVDATLCTFLMSCMRQWRTVLRYPGCRNIQRNSEPVRIERGIFQGDSLSPLWFCLALNPLSTLLENSGLGYRLKRGGQVISHLLYMDDLKLFAPNNLQLMELLKVTETFSSAIRMEFGVDKCAVMHIKRGEIVESVGTQLSDSIHLRSLSPTETYKYLGMSEALGINATDMKQSLKERFFGRLKKVLNSLLSGGNKVRAFNGWVMPVLMYAFGVLKWTQTELDALDRKVRTLLTAYRMHHPRSSVMRLYIPRKCGGRGFLNAKTLHNREVCSLREYFLAADVGMHRDVVAVDKGLTPLSLANENWRKPVVLDTNVRKEVWQSKELHGRFFRALHGPDVDQLASVAWLSVGDLFGETEGFVCAIMDEVIMTNNYRRFIVKDGTVDICRACHRPGESIRHIISGCSRLANGEYLHRHNLVARIIHQQLALKYSLVESEVPYYRYVPDPVLDSGDITLYWDRSIITDRTIVANKPDIVVVDRSERRAMIVDISVPHDENLVKAEKDKQIKYIDLAREVVDMWEVDSAIIVPIVVSANGLIAKSLDQHLRRLSLGDWIKGLIQKAVLLDTARIVRRFLSLEP

SEQ ID NO: 13471 - protein, 1200 aa, Mythimna ferrago
MLTRAAARRARPPPPASSLSSASPPPDPSPTVSAVTPAVAAASSSSDEYYSPPTTPPPARRRGGRRPPACFGPQGPPASDRVPATGGSVPRMRWTQSTNENVMRAYYGATEGGNNLTAYRVRMLSLFQVLEPAVNVSAQRLSDQVRVIQRNHMLDDTVLDRLRMEMSNHVIAPSSQPVVPVMVPPSNHVANPADVESTDMVIQVSTQCTNELRSALECAIREYRNMPSVLRPRLPRLPMHNKNKALVAALDMQLSNYFDNCKDLTDAHSIMYCAAVAACRVAHVKFPNSDVATRPKPAVPAWQCRIERRIGGARALIGKLICFREGNTRPRVMRFVRRAFSGTDICPRDYMLRVTERIDFLKQKVYAWANRIRRYKRRVERYTQNRAFQSNERWVYRAWERPDQGVTDTRLPDDDAMCSFWRNIWSVPVSHTEGGWTREVEQACEPITEMGAITISPQDVARAVRPLPNWKSPGPDGLHNFWIKWLQRSHACLASQYQAALESSSLPEFLTTGVTHLLHKSGSTAEPKNYRPITCLPTVYKVLTSILRDKINNHIDNNSIMSASQNGCRKGSRGTKELLLIDMAISQQVRRSRKDLSTCWIDYKKAYDSVPHTWLMRVLELYKIDATLRTFLMSCMRQWRTVLRYPGCRNIQRSSEPVRIERGIFQDDSLSPLWFCLALNPLSTLLENSGLGYQLKRGGQVTSHLLYMDDLKLFAPNKLQLMELLKVTETFSSAIRMEFGVDKCAVMHVKRGEIVESVSTQLSDSISLRSLSATETYKYLGMSEALGINATDMKQSLRERFFGRLKKVFNSLLSGGNKVRAFNGWVMPVLMYSFGVLKWTQTELDALDRRVRSLLTANRMHHPRSSVMRLYIPRKCGGRGFLNAKTLHNREVCSLREYFLAADVGMHRDVVAVDKGLTPLSLANENWRKPVVLDTNDRKEVWQSKELHGRFFRALHGPDVDQLASVAWLRVGDLFGETEGFVCAIMDEVIMTKNYRRFIVKDGTVDICRACHRPGESIRHIISGCSRLANGEYLHRHNLVARIIHQQLALKYSLVESEVPYYRYVPDPVLDNGDITMYWDRSIITDRTIVANKPDIVVVDRSERRAMIVDISVPHDENLVKTEKDKQIKYIDLAREVVDMWDVDSAIIVPIVVSGNGLIAKSLDQHLRRLALGSWIKGLIQKAVLLDTARIVRRFLSLEP

SEQ ID NO: 13472 - protein, 1199 aa, Acronicta aceris
MLTRARARYIERHTRLTTPDSSPSSALQQPQHGRTSPDAAATASSSSDEYYSPPTSPPPVRRRGGRRPPDRLGPRGPLASGGIPASGGSVQRMRWTQSLNENVMRAYYGATEGGTNLTAYRGRMLSLFQALEPTIDVSTQRLSDQVRVIQRNHMLDDSVLDQLRSEVQSSRAIAHPSQSVAPSAMLPQTNLAEVGSDDRVTNVSTQYNEKLRSALEGAFREYRSSPPELRPRLPRLPMNNKNLALVCALDSLLSDYFDSSEDLADTHSILYCAAVAACRVAHVKFPESDRATRPKPMIPAWQSRIEQRIGEARALIGKLICFREGNTRPRVMRFVRRAFSGTNIDPRDYASCVTERIDFLKQKVYAWANRIRRYKRRAERYSLNRAFQGDQRWVYRTWDRPDKGVSDVCRPNDDAMSLFWRNIWSVPVNHTEDDWICDVERACESLPAMEEINISPQDVACAVHSVPNWKAPGPDGLHNFWIKWLRSSHARLASQFQSSLESGTLPQFLTTGITHLLHKSGDTADPKNYRPITCLPTVYKLLTSILRAKICYHIDESSIMSASQNGCRNGSRGTKELLLIDMTISQQVRRLRKNLSTCWIDYKKAYDSVPHTWLMRVLELYKVDVSLRTFLRSCMGQWRTVLHYPGCRQIQRISEPIRIERGIFQGDSLSPLWFCLALNPLSTLLEESRLGYRLRRGGQVISHLLYMDDLKLFASSDLHLMELLKITENFSNSIRMEFGVEKCAVMHVKRGGIVESVGIQLSDSTQLRSLASTETYKYLGMAEALGINVADMKQSLQVRFFGRLTKVLKSLLSGGNKVRAFNGWVMPVLMYSFGVLKWTQTELETLDRKVRTLLTAYRMHHPRSSVMRLYIPRKCGGRGFLNAKNLHNREVCSLREHFLKTEMGMHRDVVAVDNGLTPLSMAKENWRKPVVLSTNDRRNVWQGKELHGRYYRALHEPGVDTLASVSWLRFGDLFGETEGFVCAIMDEVMMTNNYRKFIVKDGTVDICRACHRPGESIRHIISGCSRLANGEYLHRHNLVARIIHQQLALKYNLVESEVPYYKYVPDPVLENGHATLYWDRSIITDRTIIANKPDIVVIDRLERRAMIVDITVPHDENLFKAEKEKEIKYLDLAHEVVDMWGVDAAIIVPIVVSANGLIAKSLDRHLKRLSLGGWIKGLIQKAVLLDTARIVRRFLSLGP

SEQ ID NO: 13473 - protein, 1192 aa, Eilema sororculum
MLTRAQASRNRSAPTTSPDSSLSSAAQPPAVEPAASSSSSSDEFFSPPTSPTPVRRPGRGRPPTCLGPRRPPASNRAPAAGGNVHRMRWTNSINENVMRAYFAATEGGTNLSAYRTRMLPLFQALEPSINVSAQRLSDQVQVIQRNRLLNETVLETLRLECLRNICVTPAPAPAPASTVEINDDTCVAPDDTPIPVSIQYNEEIKEALECALREYRSMPVHVRPRLPRMPIHRRNIALVSALDSLLPRYLENSENLGDTHSILYCTAVAAYRMAGAKFPKKDPAIRLKSAIPAWQCRIERRVAEARVLIGKLICFRSGNTRPRVMRYVTRAFAGTDISPQDYTSRVTERIDFLKQKVYAWANRIRRYKKRVDRYTVNRMFQRDQRWVYRSWERTEESVDDVRRPDAETTNAFWRSIWSVPVNHTEGDWMREVERACETIPEMEKINIDAIDVDCAVRSLSNWKSPGPDGLHNFWLKWLRSSHVVLASQFQSAVESGTLPAFMTTGVTHLLHKTGSTLEPNNYRPITCLPTVYKLLTSILRAKINNHINNNSIMCASQNGCRNGARGTKELLLIDMAISQQARRNRKDLTACWIDYKKAFDSVPHTWLLRVLELYKVNTTLCTFLRSCMGQWRTVLFYPGCRQALGSGEPITIERGIFQGDSLSPLWFCLALNPLSTLLVNSGLGYRLRREGQMVSHLFYMDDLKLFAHTNPQLIALLKVTETFSNSIKMAFGVDKCAVIHVKRGRVVESEGIQLSDSTNLRSLLVTETYKYLGMSQALCINEVDMKQMLQERFFGRLKKVLNSLLSGGNKVRACNSWVMPLLMYSFGILKWTQTELDTIDRKVRTQLTAFRMHHPRSSVMRLYIPRKCGGRGFLNAKTLHNREVCNLRDYFLKSNVDMHRDVVNVDTGLTPLGLAKENWRRPTIVGTDSRREVWQSKELHGRFYRALHRPEVDLLASVSWLRFSDLFGETEGFVCAIADEVIKTNNYRKYIMRDGTIDICRACHQPGESLRHITSGCSRLANGEYLHRHNQVARIIHQRLALKYNLVEVEVPYYRYVPEPVLENSHITLYWDRSIITDRTVVANKPDIVVIDRSERRALIVDVTIPHDENLVKAEKDKQVKYLDLAHEVVDMWNVDSAIIVPIVVSVNGLIAKSLDQHLKRLGLDGWVKGQMQKAVLLDTARIVRKFLSLEP

SEQ ID NO: 13474 - protein, 1192 aa, Eilema sororculum
MLTRAQANRNRSAPTTSPDSSLSSAAQPPAVEPAASSSSSSDEFFSPPTSPTPVRRPGRGRPPTCLGPRRPPASNRAPATGGDVHRMRWTTSINENVMRAYFAATEGGTNISAYRTRMLPLFQALEPSINVSAQRLSDQVRVIQRNRMLNETVLETLRLECLRNICVTPAPAPVPASTVEINDDTCVAPDDTPIPVSIQYNEEIKEALEYALREYRSMPVHVRPRLPRLPIHRRNIALVSALDSLLPIYLENSENLGDTHSILYCTAVAACRMAGAKFPNKDPAIRPKPAIPAWQCRIERRVAEARVLIGKLICFRSGNTRPRVMRYVTRAFAGTDISPQDYTSRVTERIDFLKQKVYAWANRIRRYKKRVDRYTVNRMFQRDQRWVYRSWERTEESVDDVRRPDAEATNAFWRSIWSVPVNHTEGDWMREVERACETIPEMEKINIDAIDVDCAVRSLSNWKSPGPDGLHNFWLKWLRSSHVVLASQFQSSVESGTLPAFMTTGVTHLLHKTGSTLEPNNYRPITCLPTVYKLLTSILRAKINNHINNNSIMCASQNGCRNGARGTKELLLIDMAISQQARHNRKDLTACWIDYKKAFDSVPHTWLLRVLELYKVNTTLCTFLRSCMGQWRTVLFYPECRQALDSGEPITIERGIFQGDSLSPLWFCLALNPLSTLLVNSGLGYRLRREGQMVSHLFYMDDLKLFAHTNPQLIALLKVTETFSNSIKMAFGVDKCAVIHVKRGRVVESEGIQLSDSTNLRSLLVTETYKYLGMSQALCINEVDMKQMLQERFFGRLKKVLNSLLSGGNKVRACNSWVMPLLMYSFGILKWTQTELDTIDRKVRTQLTAFRMHHPRSSVMRLYIPRKCGGRGFLNAKTLHNREVCNLRDYFLKSNVDMHRDVVNVDTGLTPLGLAKENWRRPTIVGTDSRREVWQSKELHGRFYRALHRPEVDLLASVSWLRFSDLFGETEGFVCAIADEVIKTNNYRKYIMRDGTIDICRACHQPGESLRHITSGCSRLANGEYLHRHNQVARIIHQRLALKYNLVEIEVPYYRYVPEPVLENSHITLYWDRSIITDRTVVANKPDIVVIDRSERRALIVDVTIPHDENLVKAEKDKQVKYLDLAHEIVDMWNVDSAIIVPIVISVNGLIAKSLDQHLKRLGLDGWVKGQMQKAVLLDTARIVRKFLSLEP

SEQ ID NO: 13475 - protein, 1193 aa, Eilema sororculum
MLTRAKARQFAHPTPSDSSCSSTSQPPETTSSRPTTAEASSSDEYFSPPTSPTPVRRPGRGRPPSSLGSRGPPASNRAPAAGGDVHRMRWTTSINENVMRAYFAATEGGTNLSAYRSRMLPLFQALEPSVNTSAQRLSDQVRVIQRNHLLNETVLETLRQECLRNICVTPAPAPAPASTTALNEDSHVTRDDTPIPVSIQYNEEIKEALEYALREYRSMPIHVRPRLPRLPIHRRNIALVSALDSLLPKYLENSENLGDTHSILYCTAVAACRMAGAKFPIKDPAIRPKPAIPAWQCRIERRVAEARVLIGKLICFRSGNTRPRVMRYVTRAFAGTNISPQDYTSRVTERIDFLKQKVCAWANRIRRYKKRVDRYTVNRMFQRDQRWVYRNWERTDESVDDVRRPDAEATNAFWRSIWSVPVSHTEGDWMREVERACEPIPEMEEIYIDATDVDCAVRSLSNWKSPGPDGLHNFWLKWLRSSHVVLASQFQSAVESGTLPVFMTTGVTHLLHKTGSTLEPNNYRPITCLPTVYKLLTSILRAKINNHINNNSIMCASQNGCRNGARGTKELLLIDMTISQQARRNRKDLAACWIDYKKAFDSVPHTWLLRVLELYKVNTTLCTFLRSCMGQWRTVLFYPGCRQALGSGEPITIERGIFQGDSLSPLWFCLALNPLSTLLVNSGLGYRLRREGQMVSHLFYMDDLKLFAHTNPQLIALLKVTETFSNSIKMAFGVDKCAVIHVKRGRVVESEGIQLSDSTNLRSLLVTETYKYLGMSQALCIKEVDMKQMLQERFFGRLKKVLNSLLSGGNKVRACNSWVMPLLMYSFGILKWTQTELDTIDRKVRTQLTAFRMHHPRSSVMRLYIPRKCGGRGFLNAKTLHNREVCNLRDYFLKSNVEMHRDVVNVDTGLTPLGLAKENWRRPTIVGTDSRREVWQSKELHGRFYRALHRPEVDLLASVSWLRFSDLFGETEGFVCAIADEVIKTNNYRKYIMRDGTIDICRACHQPGESLRHITSGCSRLANGEYLHRHNQVARIIHQRLALKYNLVEVEVPYYRYVPEPVLENSHITLYWDRSIITDRTVVANKPDIVVIDRSERRALIVDVTIPHDENLVKAEKDKQVKYLDLAHEVVDMWNVDSAIIVPIVVSVNGLIAKSLDQHLKRLGLDGWVKGQMQKAVLLDTARIVRKFLSLEP

SEQ ID NO: 13476 - protein, 1193 aa, Eilema sororculum
MLTRAKARQFAHPTPSDSSCSSASQPPETTSSRPTTAEASSSDEYFSPPTSPTPVRRPGRGRPPSSLGSRGPPASNGAPAAGGDVHRMRWTTSINENVMRAYFAATEGGTNLSAYRSRMLPLFQALEPSVNTSAQRLSDQVRVIQRNHLLNETVLETLRQECLRNMCVTPAPAPAPASTTALNEDSHVTRDDTPIPVSIQYNEEIKEALEYALREYRSMPIHVRPRLPRLPIHRRNIALVSALDSLLPKYLENSENLGDTHSILYCTAVAACRMAGAKFPIKDPAIRPKPAIPAWQFRIERRVAEARVLIGKLICFRSGNTRPRVMRYVTRAFAGTNISPQDYTSRVTERIDFLKQKVCAWANRIRRYKKRVDRYTVNRMFQRDQRWVYRNWERTDESVDDVRRPDAEATNAFWRSIWSVPVSHTEGDWMREVERACEPIPEMEEIYIDATDVDCAVRSLSNWKSPGPDGLHNFWLKWLRSSHVVLASQFQSAVESGTLPVFMTTGVTHLLHKTGSTLEPNHYRPITCLPTVYKLLTSILRAKINNHINNNSIMCASQNGCRNGARGTKELLLIDMTISQQARRNRKDLAACWIDYKKAFDSVPHTWLLRVLELYKVNTTLCTFLRSCMGQWRTVLFYPGCRQALGSGEPITIERGIFQGDSLSPLWFCLALNPLSTLLVNSGLGYRLRREGQMVSHLFYMDDLKLFAHTNPQLIALLKVTETFSNSIKMAFGVDKCAVIHVKRGRVVESEGIQLSDSTNLRSLLVTETYKYLGMSQALCIKEVDMKQMLQERFFGRLKKVLNSLLSGGNKVRACNSWVMPLLMYSFGILKWTQTELDTIDRKVRTQLTAFRMHHPRSSVMRLYIPRKCGGRGFLNAKTLHNREVCNLRDYFLKSNVEMHRDVVNVDTGLTPLGLAKENWRRPTIVGTDSRREVWQSKELHGRFYRALHRPEVDLLASVSWLRFSDLFGETEGFVCAIADEVIKTNNYRKYIMRDGTIDICRACHQPGESLRHITSGCSRLANGEYLHRHNQVARIIHQRLALKYNLVEVEVPYYRYVPEPVLENSHITLYWDRSIITDRTVVANKPDIVVIDRSERRALIVDVTIPHDENLVKAEKDKQVKYLDLAHEVVDMWNVNSAIIVPIVVSVNGLIAKSLDQHLKRLGLDGWVKGQMQKAVLLDTARIVRKFLSLEP

SEQ ID NO: 13477 - protein, 1191 aa, Eilema sororculum
MLTRAQARNRNAQTTSPDSSLSSAAQPPAMEPAASSSSSSDEFLSPPTSPTPVRRPGRGRPPTCLGPRRPPASNRAPAAGGNVHRMRWTNSINENVMRAYFAATEGGTNLSAYRTRMLPLFQALEPSINTSAQRLSDQVRVIQRNRMLNETVLETLRQECLRNICVTPAPAPAPTSTAEINNDTCVAPDDTPIPVSIQYNEEIKEALECALREYRSVPVHVRPRLPRLPIHRRNIALVSALDSLLPRYLENSENLGDTHSILYCTAVAACRMAGAKFPIKDPAIRPKSAIPAWQCRIERRVAEARVLIGKLICFRSGNTRPRVMRYVTRAFAGTDISPQDYTSRVTERIDFLKQKVYAWANRIRRYKKRVDRYTVNHMFQRDQRWVYRSWERTDESVDDVRRPDAEATNAFWRSIWSVPVSHTEGDWMREVERACETIPEMEEIYIDATDVDCAVRSLSNWKSPGPDGLHNFWLKWLRSSHVVLASQFQSAIESGTLPAFMTTGVTHLLHKTGSTLEPNNYRPITCLPTVYKLLTSILRAKINNHINNNSIMCASQNGCRNGARGTKELLLIDMAISQQARRNRKDLTACWIDYKKAFDSVPHTWLLRVLELYKVNTTLCTFLRSCMGQWRTVLFYPGCRQALGGGVPITIERGIFQGDSLSPLWFCLALNPLSTLLVNSGLGYRLRREGQMVSHLFYMDDLKLFAHTNPQLIALLKVTETFSNSIKMAFGVDKCAVIHVKRGRVVESEGIQLSDSTNLRSLLVTETYKYLGMSQALCINEVDMKQMLQERFFGRLKKVLNSLLSGGNKVRACNSWVMPLLMYSFGILRWTQTELDTIDRKVRTQLTAFRMHHPRSSVMRLYIPRKCGGRGFLNAKTLHNREVCNLRDYFLKSNVDMHRDVVNVDTGLTPLGLAKENWRRPTIVGTDSRREVWQSKELHGRFYRALHRPEVDLLASVSWLRFSDLFGETEGFVCAIADEVIKTNNYRKYIMRDGTIDICRACHQPGESLRHITSGCSRLANGEYLHRHNQVARIIHQRLALKYNLVEFEVPYYRYVPEPVLENTHITLYWDRSIITDRTVVANKPDIVVIDRSERRALIVDVTIPHDENLVKAEKDKQVKYLDLAHEVVDMWNVDSAIIVPIVVSVNGLIAKSLDQHLKRLGLDGWVKGQMQKAVLLDTARIVRKFLSLEP

SEQ ID NO: 13478 - protein, 1075 aa, Eilema sororculum
MLPLFQALEPSINVSAQRLSDQVRVIQRNRLLNETVLETLRLECLRNICVTPAPAPAPASTVEINDDTCVAPDDTPIPVSIQYNEEIKEALECALREYRSMPVHVRPRLPRMPIHRRNIALVSALDSLLPRYLENSENLGDTHSILYCTAVAACRMAGAKFPKKDPAIRLKSAIPAWQCRIERRVAEARVLIGKLICFRSGNTRPRVMRYVTRAFAGTDISPQDYTSRVTERIDFLKQKVYAWANRIRRYKKRVDRYTVNRMFQRDQRWVYRSWERTEESVDDVRRPDAETTNAFWRSIWSVPVNHTEGDWMREVERACETIPEMEKINIDAIDVDCAVRSLSNWKSPGPDGLHNFWLKWLRSSHVVLASQFQSAVESGTLPAFMTTGVTHLLHKTGSTLEPNNYRPITCLPTVYKLLTSILRAKINNHINNNSIMCASQNGCRNGARGTKELLLIDMAISQQARRNRKDLTACWIDYKKAFDSVPHTWLLRVLELYKVNTTLCTFLRSCMGQWRTVLFYPGCRQALGSGEPITIERGIFQGDSLSPLWFCLALNPLSTLLVNSGLGYRLRREGQMVSHLFYMDDLKLFAHTNPQLIALLKVTETFSNSIKMAFGVDKCAVIHVKRGRVVESEGIQLSDSTNLRSLLVTETYKYLGMSQALCINEVDMKQMLQERFFGRLKKVLNSLLSGGNKVRACNSWVMPLLMYSFGILKWTQTELDTIDRKVRTQLTAFRMHHPRSSVMRLYIPRKCGGRGFLNAKTLHNREVCILRDYFLKSNVDMHRDVVNVDTGLTPLGLAKENWRRPTIVGTDSRREVWQSKELHGRFYRALHRPEVDLLASVSWLRFSDLFGETEGFVCAIADEVIKTNNYRKYIMRDGTIDICRACHQPGESLRHITSGCFRLANGEYLHRHNQVARIIHQRLALKYNLVEVEVPYYRYVPEPVLENSHITLYWDRSIITDRTVVANKPDIVVIDRSERRALIVDVTIPHDENLVKAEKDKQVKYLDLAHEVVDMWNVDSAIIVPIVVSVNGLIAKSLDQHLKRLGLDGWVKGQMQKAVLLDTARIVRKFLSLEP

SEQ ID NO: 13479 - protein, 920 aa, Eilema sororculum
MAGAKFPIKDPAIRPKPAIPAWQCRIERRVAEARVLIGKLICFRSGNTRPRVMRYVTRAFAGTNISPQDYTSRVTERIDFLKQKVCAWANRIRRYKKRVDRYTVNRMFQRDQRWVYRSWERTDESVDDLRRPDAEATNAFWRSIWSVPVSHTEGDWMREVERACETIPEMEEIYIDATDVDCAVRSLSNWKSPGPDGLHNFWLKWLRSSHVVLASQFQSAIESGTLPAFMTTGVTHLLHKTGSTLEPNNYRPITCLPTVYKLLTSILRAKINNHINNNSIMCTSQNGCRNGARGTKELLLIDMTISQQARRNRKDLVACWIDYKKAFDSVPHTWLLRVLELYKVNTTLCTFLRSCMGQWRTVLLYPGCRQALGSGEPITIERGIFQGDSLSPLWFCLALNPLSTLLVNSGLGYRLRREGQMVSHLFYMDDLKLFAHTNPQLIALLKVTETFSNSIKMAFGVDKCAVIHVKRGRVVESEGIQLSDSTNLRSLLVTETYKYLGMSQALCINEVGMKQMLQERFFGRLKKVLNSLLSGGNKVRACNSWVMPLLMYSFGILKWTQTELDTIDRKVRTQLTAFRMHHPRSSVMRLYIPRKCGGRGFLNAKTLHNREVCNLRDYFLKSNVDMHRDVVNVDTGLTPLGLAKENWRRPTIVGTDSRREVWQSKELHGRFYRALHRPEVDLLASVSWLRFSDLFGETEGFVCAIADEVIKTNNYRKYIMRDGTIDICRACHQPGESLRHITSGCSRLANGEYLHRHNQVARIIHQRLALKYNLVEVEVPYYRYVPEPVLENSHITLYWDRSIITDRTVVANKPDIVVIDRSERRALIVDVTIPHDENLVKAEKDKQVKYLDLAHEVVDMWNVDSAIIVPIVVSVNGLIAKSLDQHLKRLGLDGWVKGQMQKAVLLDTARIVRKFLSLEP

SEQ ID NO: 13480 - protein, 1107 aa, Eilema depressum
MRWTPSINENVMRAYFAATEGGTNLSAYRTRMLPLFQALEPSVNTSSQRLSDQVRVIQRNRMLNETVLETLRQECLRNICVTPAPAPASTPAPVPVSHMNEETGDDTLIPVSIQYNEQIKEALECALREYRSMPLNDRPRLPRLPIHRRNMALVGALDSLLPGYLDNSENLGDTHSILYCTAVAACRMAGVKFPNKDPAIRPKSTIPAWQCRIERRVAEARVLISKLICFRSGNTRPRVMRYVTRAFAGTGISPQEYTSRITERIDFLKQKVCAWANRIRRYRKRVDRFTVNRMFRRDQRWVYRSWEQPDESVDDVRRPEAAATNTFWRSIWSVPVSHIEGDWMCEVERACESIPEMEDIYIDAIDVDCAVRPLSNWKSPGPDGLHNFWLKWLRSSHALLASQFQSAVESGTLPAFMTTGVTHLLHKTGSTLEPNNYRPITCLPTVYKLLTSILRVKINNHINNNSIMCASQNGCRNGARGTKELLLIDMAISQQARRRTKDLAACWIDYKKAFDSVPHTWLLRVLELYKVNATLCTFLRSCMRQWRTVLFYPGCCQALGDGEPITIERGIFQGDSLSPLWFCLALNPLSTLLVNSGLGYRLRREGQMVSHLLYMDDLKLFAHTNPQLMALLKITENFSNSIKMGFGVEKCAVIHVKRGRVVESQGIQLSDSTSLRSLLVTETYKYLGMSQALCINEAGMKQMLQERFFGRLKKVLNSLLSGGNKVRACNSWVMPLLMYSFGILKWTQTELDTIDRRVRTQLTAFRMHHPRSSVMRLYIPRKCGGRGFLNAKTLHNREVCNLRDYFLKSNVDMHRDVVSVDTGLTPLGLAKENWRRPIVVGTDSRREVWQSKELHGRFYRALHRPEVDLLASVSWLRFGDLFGETEGFVCAIADEVIKTNNYRKYIMRDGTIDICRACHQPGESLRHITSGCSRLANGEYLHRHNQVARIIHQRLALKYNLVELEVPYYRYVPEPVLENSHITLYWDRSIITDRTVVANKPDIVVIDRSERRALIVDVTIPHDENLVKAEKDKQVKYLDLAHEIVDMWNVDSAIIVPIVVTVNGLIAKSLDQHLKRLGLDGWVKGQMQKAVLLDTARIVRKFLSLEP

SEQ ID NO: 13481 - protein, 1212 aa, Ptilodon capucinus
MTDAPRRNPRRLCRQRTVNEPNAQSTPPDPSPRSASPSPASIIRTSVTAVASSESDEYFSPPTSPPPVRQQRGRPPGHLGLLGQPAPNRVLVPSGVVRRMRWTSSINENVMRAYYEATEGGTNLTAYRNRMLPLFQSLEPAVNVSAQRLSDQVRVIQRGNMLADTVLDRLRSEMQSRRVVPVASSQPAAQPVASATVTSRLAADSDVDRDNAPINVSNQYNELLRSTLEDVVRVYRSMPNHRRPRIPRLPMHKGNRALVGALDSLLSIYFDSSDNLADTHSILYCAAITVCRVAHVKVFNTDTATRPKPAVPAWQCRIERRISEARALIGKLSCFREGNTRPRVMRFVKRAFAGTDVSPREYISRVTERIDFLKQKIYAWANRIRRYKVRVDRYSQNSMFQRDQRWVYRSWERPSEPVSELQRPDDNATTTFWRDIWSVPVTHYEGDWIGDVERMCEPIKEMEAISIGPLDVANAVRSLPNWKAPGPDGLHNFWLKWLRSSHVRLASQFQLALQSGSLPEFITTGVTHLLHKTGSTTDPKNYRPITCLPTIYKTLTSILRAKIARHVEDNSIMSASQNGCRSGSRGTKELLLIDMTICQQARRNRKDLSTCWIDYKKAYDSVPHTWLVRVLELYKIDTTLRTFLESCMRQWKTVLLCPGSRQILGNGEPIRIERGIFQGDSLSPLWFCLALNPLSTLLEESGFGFRLRRGGQVISHLLYMDDLKLFAPTALQLTGLLKVTETFSNSIRMEFGVDKCAVMHAKQGRLVESEGIQLSDSIQLRSLAATETYKYLGMSQGLGISETDMKQLLRDRFLGRLKKVLKSLLSGGNKVRAYNGWVMPVLMYSFGILKWTQTELDTLDRTVRTTLTSYRMHHPRSSVMRLYIPRKCGGRGFLNVKTLHNREICSLREYFLRADGEMHVDVVAVDNGLTPLSLAKENWRKPVVLTTDDRRLVWQGKELHGRYYRALHGPDVDLAASVAWLRFGDLFGETEGFVCAIMDEVVMTNNYRKYILRDGTIDICRACHRPGESLRHIISGCSRLANGQYLHRHNQVARIIHQQLALKYRLVTSEVPYYRYEPQPVLEEGHISLYWDRSIITDRTIVANKPDIVLIDRQERRAMIVDITVPHDENLVKAEKDKESKYLDLAHEVVDMWDIDAAIIVPIVVSAHGLLAKSLDKHLKRLALGGWIKGQIQKAVLLETARIVRKFLSLEP

SEQ ID NO: 13482 - protein, 1113 aa, Ptilodon capucinus
MRWTSSMNENVMRAYYEATEGGTNLTAYRDRMLPLFQSLEPAVNVSAQRLSDQVRVIQRGNMLADTVLDRLRSEVQSRRVVPVASSQPAAQPVARATVTSRLAADSDVDRDNAPIDVSTQYNNLLRSTLEDVVREYRSMPNHLRPRIPRLPMHKGNRALVGALDSLLSIYFDSSDDLVDTHSILYCAAITVCRVARVKVFNTDTTTRPKPAVPAWQCRIERRISEARALIGKLSCFREGNTRPRVMRFVKRAFAGTDVSPREYISRVTERIDFLKQKIYAWANRIRRYKARVDRYSQNSMFQRDQRWVYRSWERPNEPVSELQRPDDNAMTTFWRDIWSVPVTHYEGNWIGDVERMCEPIKEMEAISIGPLDVANAVRSLPNWKAPGPDGLHNFWLKWLRSSHVRLASQFQSALQSGSLPEFITTGVTHLLHKTGSTTDPKNYRPITCLPTIYKTLTSILRAKIARHVEDNSIMSASQNGCRSGSRGTKELLLIDMAICQQARRNRKDLSTCWIDYKKAYDSVPHTWLVRVLELYKIDTTLRTFLESCMRQWKTVLLCPGSRQILGNGEPIRIERGIFQGDSLSPLWFCLALNPLSTLLEESGFGFRLRRGGQVISHLLYMDDLKLFAPTALQLSGLLKVTETFSNSIRMEFGVDKCAVMHAKQGRMVESEGIQLSDSIQLRSLAATETYKYLGMSQGLGISETDMKQLLRDRFLGRLKKVLKSLLSGGNKVRAYNGWVMPVLMYSFGILKWTQTELDALDRTVRTTLTAYRMHHPRSSVMRLYIPRKCGGRGFLNVKTLHNREICSLREYFLRADGEMHVDVVAVDNGLTPLSLAKENWRKPVVLTTDDRRVVWQGKELHGRYYRALHGPDVDLAASVAWLRFGDLFGETEGFVCAIMDEVVMTNNYRRYILRDGTIDICRACHRPGESLRHIISGCSRLANGQYLHRHNQVARIVHQQLALKYRLVTSEVPYYRYEPQPVLEEGHITLYWDRSIITDRTIVANKPDIVLIDRQERRAMIIDITVPHDENLVKAEKDKESKYLDLAHEVVDMWDIDAAIIVPIVVSAHGLLAKSLDKHLKRLALGSWIKGQIQKAVLLGTARIVRKFLSLEP

SEQ ID NO: 13483 - protein, 1045 aa, Agrochola circellaris
MLDDTVLDRLRSEMRNSHATAPPSQTVMVAPQFTINQVDEGIDDMATNVSTQYNEELRSALERAIREYRSMSPELRPRLPRLPMHNKNRALVAALDSQLSNYFDDCEDLTDTHSILYCAAVAACRVAHVKFANDSRATRPKTAVPAWQCRIERRIGGARALIGKLICFREGNTRPRVMRFVRRAFSGTDISPEDYVSRATERIDFLKQKVYAWANRIRRYKRRVERYTQNRTFQSDERRVYRAWEQPDQGVADARLPDDDAMCSFWRSIWSAPVSHTEGDWTREVERACDPIPEMGAITICPQDVARAVRPLPNWKSPGPDGLHNFWIKWFKRSHARLAAQYQTALESGSLPEFLTTGVTHLLHKSGSTADPKNYRPITCLPTVYKVLTSILRAKINKHIDTNSIMSASQNGCRNGSRGTKELLLIDMTISQQVRRSRKDLSTCWIDYKKAYDSVPHTWLMRVLELYKVDATLRTFLLSCMGQWRTVLRYPGCRNIQRNSEPIRIERGIFQGDSLSPLWFCLALNPLSTLLEGSDLGYRLRRGGQVISHLLYMDDLKLFAPNNFQLMELLKVTETFSRAIRMEFGVDKCAVMHVKRGEIVESVGTQLTDSINFRALSASETYKYLGMSETLGINVTDMKQSLKERFFGRLKKVFNSFLSGGNKVRAFNGWVMPVLMYSFGVLKWTQTELDALDRRVRTLLTGYRMHHPRSSVMRLYIPRKCGGRGFLNAKTLHNREICSLREYFLEADVGMHRDVVAVDKGLTPLSLAKENWRKPAVLDTNDRKEVWQNKELHGRYFRALHGPDVDLLASVAWLRFGDLFGETEGFVCAIMDEVMMTNNYRRFIVKDGTVDICRACHRPGESIRHIISGCSRLANEEYLHRHNLVARIIHQQLALKYSLVESEVPYYRYVPDPVLESGHITLYWDRSIITDRSIVANKPDIVVVDRAERRTMIIDITVPHDGNLVKAEKDKQIKYLDLAREVVDMWDVDSAIIVPIVVSANGLIAKSLDQHLRRLSLGGWIKGLIQKAVLLDTARIVRRFLSLEP

SEQ ID NO: 13484 - protein, 1201 aa, Hydraecia micacea
MLTRSAAARRARIPPPDSSLSSASPPAPLVSSPTVSAVMTPAAAVASSSSDEYFSPPTTPPPARRRGGRRPPDGLGPRGPPASDRVPAPGGSVQRMRWTRSINENVMRSYYGATEGGSNLTAYRVRMLSLFQVLEPAVNVSAQRLSDQVRVIQRNHMLDDTVLDRLRNEIQSSHAIAPQSQTAVILPQSNTSHADEGSNDRATNVSTQCNEELRSALEDAIQEYRFMSPELRPRLPRLPMHNKNRALVAVLNSQLSKYFDDCEDLTDTHSILYCAAVAACRVAHVKFTNDSRATRPKPAVPAWQCRIERRIGGARALIGKLICFREGNTRPRVMRFVRRAFLGTDISPQDYTSCVTERIDFLKQKVYAWANRIRRYKRRVERYTQNRTFQSDERWVYRDWERPDQSVADTCLPDDDAMCSFWRSIWSVPVSHTEGDWARDVERACDPIPEMEAITICPQDVARAVRPLPNWKSPGPDGLHNFWIKWFSRSYARLASQFQTALESGSLPQFLTTGITHLLHKSGSTAEPKNYRPITCLPTVYKVLTSILRAKINKHIDTNFIMSASQNGCRNGSRGTKELLLIDMTISQQVRRFRKDLSTCWIDYKKAYDSVPHTWLMRVLELYKVDTTLRTFLMSCMGQWRTVLRYPGCRNIQRNSEPIRIERGIFQGDSLSPLWFCLALNPLSTLLEDSGLGYRLRRGGQVISHLLYMDDLKLFAPNNLQLMELLKVTQTFSNAIRMEFGVDKCAVMHVKRGEIVESVGNQLSDSTNLRALSASETYKYLGMSEALGINVTDMKKSLKERFFGRLKKVLNSLLSGGNKVRAFNGWVMPVLMYSFGILKWTQTELDVLDRRVRTLLTANRMHHPRSSVMRLYIPRKCGGRGFLNSKTLHNREICSLREYFLETDVGMHRDVVMVDKGLTPLSLAKENWRKPVVLDTNDRMEVWQSKELHGRFFRALHGPDVDLLASVAWLRFGDLFGETEGFVCAIMDEVMMTNNYRRFIVKDGTVDICRACHRPGESIRHIISGCSRLANGEYLHRHNLVARIIHQQLALKYSLVESEVPYYRYVPDPVLENGNITLYWDRSIITDRTIVANKPDIVVVDRSERRAMIVDITVPHDENLVKAEKDKQIKYLDLAREVVDMWDVDSAIIVPIVVTANGLIAKSLDQHLRRLSLASWIKGLIQKAVLLDMARIVRRFLSLEP

SEQ ID NO: 13485 - protein, 1203 aa, Hydraecia micacea
MLTRSRARRLPTTHPTSSGSSLSSASQLPEPAPDVSPVSPAAAVASSSSDEYFSPPTTPPPVCRRGRGRPPASLGLRGPPASERVPAPGGSVQRMRWTQTVNENVMRAYFGATEGGSNLTAYRGRMLSLFQVLEPAVNVSAQRLSDQVRVIQRNHMLDNVVLDRLRLESRNSHVTPASSLVAVQLQPSVPLRPDCVDVEDDDEAISVSSQCNARLRSALEDAFREYRSIPPGLRPRLPRLPMHKKNKALVCALDSQLSNCFNDSKDLADTHSILYCAAVAACRVAHVKFPNSDRAPRPKPAVPAWQCRIECRIGEARALIGKLICFREGNTRPRVMRFVRRAFSGTDISSRDYLSRVTERIDFLKQKICAWANRIRRYRRRVERYTQNRRFQSDERWVYRAWERLDQGVTDTRLPDDDAMCSFWRNIWSVPVSHTEGDWTGKIERACDLIPEMEALIISPQDVARAVRPLPNWKSPGPDGLHNFWIKWFKRSHDRLASQFQSALESGSLPQFLTTGITHLLYKSGSTADPKNYRPITCLPTVYKVLTSILRTKINKHIDTNSIMSVSQNGCKNGSRGTKELLLIDMTINQQVRRSRKDLSTCWIDYKKAYDSVPHTWLMRVLELYKVDTTLCTFLMSCMGQWRTVLRYPGCRNIQRNSEPIRIERGIFQGDSLSPLWFCLALNPLSTLLEDSGLGYRLRRGGQVISHLLYMDDLKLFAPNNLQLMELLKITETFSSAIRMEFGVDKCAVMHVKRGEIVESVGNQLSDSTNLRALSASDTYKYLGMSEALGINVTDMKQSLKERFFGRLKKVFNSLLSGGNRVRAFNDWVMPVLMYSFGILKWTQTELDALDRKVRTLLTANRMHHPRSSVMRLYIPRKCGGRGFLNAKTLHNREICSLREYFLETDVGMHRDVVVVDNGLTPLSLGKENWRKPVVLDTNDRMEVWQSKELHGRFFRALHGPDVDLLASVAWLRFGDLFGETEGFVCAIMDEVMMTNNYRRFIVKDGTVDICRACHRPGESIRHIISGCSRLANGEYLHRHNLVARIIHQQLALKYSLVESEVPYYRYVPDPVLENGNITLYWDRSIITDRTIVANKPDIVVMDRLERRAMIVDITIPHDENLVKAEKDKQIKYLDLAREVVDMWDVDSAIIVPIVVTANGLIAKSLDQHLRRLSLASWIKGLIQKAVLLDTARIVRRFLSLEP

SEQ ID NO: 13486 - protein, 1201 aa, Hydraecia micacea
MLTRSAAARRARIPPPDSSLSSASPPAPLVSSPTVSAVMTPAAAVASSSSDEYFSPPTTPPPARRRGGRRPPDGLGPRGPPASDRVPAPGGSVQRMRWTRSINENVMRSYYGATEGGSNLTAYRVRMLSLFQVLEPAVNVSSQRLSDQVRVIQRNHMLDDTVLDRLRNEIQSSHAIAPQSQTAVILPQSNTSHADEGSNDRATNVSTQCNEELRSALEDAIQEYRSMSPELRPCLPRLPMHNKNRALVAVLNSQLSKYFDDCEDLTDTHSILYCAAVAACRVAHVKFTNDSRATRPKPAVPAWQCRIERRIGGARALIGKLICFREGNTRPRVMRFVRRAFLGTDISPQAYTSCVTERIDFLKQKVYAWANRIRRYKRRVERYAQNRTFQSDERWVYRDWERPDQSVADTCLPDDDAMCSFWRSIWSVPVSHTEGDWAQDVERACDPIPEMEAITICPQDVARAVRPLPNWKSPGPDGLHNFWIKWFSRSHARLASQFQTALESGSLPQFLTTGITHLLHKSGSTAEPKNYRPITCLPTVYKVLTSILRAKINKHIDTNFIMSASQNGCRNGSRGTKELLLIDMTISQQVRRFRKDLSTCWIDYKKAYDSVPHTWLMRVLELYKVDTTLRTFLMSCMGQWRTVLRYPGCRNIQRNSEPIRIERGIFQGDSLSPLWFCLALNPLSTLLEDSGLGYRLRRGGQVISHLLYMDDLKLFAPNNLQLMELLKVTQTFSNAIRMEFGVDKCAVMHVKRGEIVESVGNQLSDSTNLRALSASETYKYLGMSEALGINVTDMKQSLKERFFGRLKKVLNSLLSGGNKVRAFNGWVIPVLMYSFGILKWTQTELDALDRRVRTLLTANRMHHPRSSVMRLYIPRKCGGRGFLNSKTLHNREICSLREYFLETDVGMHRDVVMVDKGLTPLSLAKENWRKPVVLDTNDRMEVWQSKELHGRFFRALHGPDVDLLASVAWLRFGDLFGETEGFVCAIMDEVMMTNNYRRFIVKDGTVDICRACHRPGESIRHIISGCSRLANGEYLHRHNLVARIIHQQLALKYSLVESEVPYYRYVPDPVLENGNITLYWDRSIITDRTIIANKPDIVVVDRSERRAMIVDITVPHDENLVKVEKDKQIKYLDLAREVVDMWDVDSAIIVPIVVTANGLIAKSLDQHLRRLSLGSWIKGLIQKAVLLDTARIVRRFLSLEP

SEQ ID NO: 13487 - protein, 1116 aa, Amphipyra tragopoginis
MYVVRCTETDIGYLSFRKKVLFPRKITIMIIIIIIIRMLTLFQELEPAINVSAQRLSDQVRVIQRNHRLDDAALDRLRLEVQSSRVTPFPSQTAVHEVNINIVPPRSDYVDGDMDDRAVTVSSQYNDQLRSALEDAIREYRANPELRPRLPRLPMHNKNRALVCALDSLLSSYFESSEDLGDTHSILYCAAVAACRVANVKFNNSERATRPKPAVPAWQCRIERRIDGARALIGKLICFREGNTRPRVMRFVRRAFSGTGISPPEYMSQVTERIDFLKQKVCAWASRIRRYKRRVERYTQNRMFQCDQRWVYRAWERPDQGVSDGRLPDDDAMNSFWRSIWSVPVIHTEGDWMRDIERACEPIEEMGEILISPQDVASAARPLPNWKSPGPDGLHNFWIKWLRSSHARLATQFQSSLESGSLPQFFTTGVTHLLHKSGSTAEPKNYRPITCLPTVYKLLTSILRSKINTHIENNSVMSSAQNGCRNGSRGTKELLLIDMAISQQVRRSRKNLSTCWIDYKKAYDSVPHTWLMRVLELYKINATLRTFLTSCMGQWRTVLRYPGCRPIRESGEPIRIERGIFQGDSLSPLWFCLALNPLSTLLEGSGLGYPLRRGGQVVSHLLYMDDLKLFAPTKLRLVELLKVTETFSNSIRMGFGVDKCAVMHVRRGGIMESEGLQLSDSIHLRPLSANDTYKYLGMSEGLGISEADMKQSLGERFFGRLKKVLKSLLSGGNKVRAFNGWVMPVLMYSFGILKWTQTELDALDRRVRSLLTANRMHHPRSSVMRLYIPRKCGGRGLLNAKTLHNREVCSLREYFLHADAGMHRDVVAVDKGLTPLNLAKENWRKPVVLSTNDRREIWQSKELHGRFYRALHGPDVDFQASVSWLRFGDLFGETEGFVCAIMDEVIMTNNYRKYIVRDGTVDICRACHCPGESLRHIISGCSRLANGEYLHRHNQVARIIHQQLALKYNLVESEVPYYKYVPDPVLENGHITLYWDRSIITDRTIVANKPDIVVIDRSERRTMIVDVTIPHDENLVKAEKDKQIKYLDLAHEVVNMWDVDSATIVPIVVTANGLMAKSLDQHLKRLSLGGWIKGLIQKAVLLDTARIVRRFLSLEP

SEQ ID NO: 13488 - protein, 962 aa, Amphipyra tragopoginis
MNNKNKALMCALDSLLSSYFDGSEDLADTHSILYCAAVAACRVAHVKVDNNDRATRPKPAVPAWQCRIERRIGEARALIGKLICFREGNTRPRVMRFVRRAFSGTDTSPRDYMSRVAERIDFLKQKVYAWANRIRRYKRRVERYTQNRMFQRDQRWVYRAWERPDQGVRDVHLPDDDAMNSFWRSIWSVPVSHAEGGWMRDVERVCEPILDMGAISISPQDVASAVRPLPNWKSPGPDGLHNFWLKWLRSSHARLASQFQSSLETGTLPQFLTTGVTHLLHKSGSTAEPKNYRPITCLPTVYKLLTSILRCKISSHIENNSIMSASQNGCRNGSRGTKELLLIDMAISQQVRRSRKDLSTCWIDYKKAYDSVPHTWLLRVLELCKVNATLCAFLTSCMGQWRTVLRYPGCRQIQGRGEPIRIERGIFQGDSLSPLWFCLALNPLSTLLEGSGLGYRLRRGGQVISHLLYMDDLKLFAPNNLQMMELLKVTETFSNSIRMEFGVDKCAVMHVKRGRLMESVGTELSDSIHLRSLSSTETYKYLGMSETLGINEADMKQSLRERFCGRLKKVLKSLLSGGNKVRAFNGWVMPALMYSFGILKWTQTELDALDRRVRTLLTAYRMHHPRSSVMRLYISRKCGGRGFLNAKTLHNREVCSLREYFSQADVGMHRDVVAVDKGLTPLSLAKENWRMPVVLDTNGRKDVWRSKELHGRFYRALHGPDVDFQASVAWLRFGDLFGETEGFVCAIMDEVMMTNNHRKYVVKDGTVDICRACHCPGESVRHIVSGCSRLANGEYLHRHNLVARIIHQQLALKYNLVDAEVPYYKYVPDPVLENGHVTLYWDRSIITDRTIVANKPDIVVIDRSERRAMIVDITVPHDENLVKAENDKKIKYLDLAHEVVDMWNVDSAVIVPIVVSANGLIAKSLNQHLMRLSLGSWIKGLIQKAVLLDTARIVRKFLSLGP

SEQ ID NO: 13489 - protein, 1207 aa, Amphipyra tragopoginis
MLTRSRAKARAQTTQPPPPASSLSSASQPPESSPNVSAVTPAAAVASSSSDEYFSPPTSPPPARRRGGRRPPDRLGPRGPQASDRVPAPGGSVSRMRWTQTINENAMRAYFGATEGGTNLTAYRSRMLSLFQVLEPTVNVSAQRLSDQVRAIQRGHMLDDTVLDRLRSEIQCSPVISSSSQAPGLISRNVPVASPRLQHVDEEDDDRATAVSIQCNEQLRRALEDAMREYRSTRPELRPRLPRLPMHRRNRALMCALDSLLSNYFDSSEDLGDTHSILYCAAVAACRVAHVKFINNERATRPKNAVPAWQCRIERRIAEARALIGKLICFGEGNTRPRVMRFVRRAFSGTDVSPREYMSRVTERIDFLKQKVYAWANRIRRYRRRVDRYNQNRMFRSDERWVYRNWERPDQSVGAAHLPDDDAMNSFWRSIWSVPVTHTEGDWMRDVERMCEPILDMGAIIISPQDVASAVRPLPNWKSPGPDGLHNFWLKWLRSSHARLASQFQSSLETGTLPQFLTTGVTHLLHKSGSTAEPKNYRPITCLPSVYKVLTSILRTKINNHIDNNSIMSASQNGCRNGSRGTKELLLIDMAISQQVRRSRKDLSTCWIDYKKAYDSVPHTWLMRVLELYKVNTTLCAFLTSCMRQWRTVLRYPGCRQIQGIGEPIRIERGIFQGDSLSPLWFCLALNPLSTLLEGSGLGYRLRRGGQVISHLLYMDDLKLFAPNKLQLLELLKVTETFSNSIRMEFGVDKCAVMHVKRGGIMESVGTQLTDSIHLRSLSSTETYKYLGMSEALGINETDMKQSLRERFYGRLKKVLNSLLSGGNKVRAFNGWVMPVLMYSFGILKWTQTELDALDRRVRSLLTANRMHHPRSSVMRLYIPRKCGGRGFLNAKTLHNREVCSLREYFSQADVGMHRDVVAVDKGFTPLSLAKENWRKPVIFDTNDRREVWRSKELHGRFYRALHGPDVDFLASVAWLRFGDLFGETEGFVCAIMDEVMMTNNYRKYIVKDGTVDICRACHCPGESIRHIVSGCSRLANGEYLHRHNLVARIIHQQLALKYNLVDAEVPYYKYVPDPVLENGHVTLYWDRSIITDRTIVANKPDIVVIDRSERLTMIIDITVPHDENLVKAEKDKEIKYQDLAHEVVDMWDVDSAVIVPIVVTANGLIAKSLDQHLKRLSLGGWIRGLIQKAVLLDTARIVRRFLSLRP

SEQ ID NO: 13490 - protein, 1206 aa, Amphipyra tragopoginis
MLTRSRAKAQNTRPPSSASSLSSASQPPEPASIVSDVTPAAAVASSSSDEYFSPATSPSPPPARRRGRGRPPTCLGPRGPPASDRVPAPGGSVQRMRWTQSMNENCMRAYFGATEGGTNLTAYRGRMLSLFRALEPAVNVSAQRLSDQVRVIQRDHRLDDAALDRLRSEMQNSHAAPLPSQIRTQTLVPPAVPLESNYADEEGEDRAISAGTQYSEIMRSALEDALREFRSTPPELRPRLPRLPMHNKNRALVCALDSLLPNVFESSEDLGDTQSILYCAAVAACRVAHVKFPNDNRATRPKSAVPAWQCRIERRIDEARVLIGKLTCFREGNRRPRVMRFVRRAFSGTDIGPGEYASRVTERIDFLKQKVYAWANRIRRYRRRVDRYTQNRIFQSDQRWVYRTWERPDQGVSDTHLPDDDVMNAFWRNIWSVPVTHTEGDWMQEVQRACEPIQEMGAVTIGPQDVTSAVRPMPNWKSPGPDGLHNFWIKWLRSSHTRLASQFQSSLESGSLPAFLTTGITHLLFKSGSTAEPKNYRPITCLPTVYKLLTSILRAKLNHHIDSNAIMCATQNGCKNGSRGTKELLLIDMAISQQVRRSRKDLSTCWIDYKKAYDSVPHTWLMRVMELYKVNATLRTFLMSCMGQWRTVLHYPGCRQIQGNGELIRIERGIFQGDSLSPLWFCLALNPLSTLLEGSGLGYRLRRGGQVISHLLYMDDLKLFAPNNLQLVELLKVTETFSNSIRMEFGVDKCAVMHVKRGRIMESVGTQLSDSIHLRSLSSTETYKYLGMSEALGINEADMKQSLRERFFGRLIKVLKSLLSGGNKVRAFNGWVMPVLMYSFGILRWTQTELDALDRRVRTLLTAYRMHHPRSSVMRLYIPRKCGGRGFLNAKTLHNREVCSLREYFSQADVGMHRDVVAVDKGLTPLSLAKENWRKPVVLDAKGRMEVWRSKELHGRFYRALHGPDVDFLASVAWLRFGDLFGETEGFVCAIMDEVMMTNNYRKYIVKDGTVDICRACHCPGESIRHIVSGCSRLANGEYLHRHNLVARIIHQQLALKYNLVDTEVPYYKYVPDPVLENGHVTLYWDRSIITDRTIVANKPDIVVIDRLERHTMIVDITVPHDENLVKAENDKKIKYLDLAHEVVDMWDVDSAVIVPIVVTANGLIAKSLDQHLMRLSLGSWIKGLIQKAVLLDTARIVRKFLSLDP

SEQ ID NO: 13491 - protein, 1207 aa, Amphipyra tragopoginis
MLTRSRAKARAQTTQPPPPASSLSSASQPPESSPTVSAVTPAAAVASSSSDEYFSPPTSPPPARRRGGRRPPDRLGPRGPQASDRVPAPGGSVSRMRWTQTINENAMRAYFGATEGGTNLTAYRSRMLSLFQVLEPTVNVSAQRLSDQVRAIQRGHMLDDTVLDRLRSEIQCSPVISSSSQAPGLISRNVPVASPRLQHVDEEDDDRATAVSIQCNEQLRRALEDAMREYRSTRPELRPRLPRLPMHRRNRALMCALDSLLSNYFDSSEDLGDTHSILYCAAVAACRVAHVKFINNERATRPKNAVPAWQCRIERRIAEARALIGKLICFGEGNTRPRVMRFVRRAFSGTDVSPREYMSRVTERIDFLKQKVYAWANRIRRYRRRVDRYNQNRMFRSDERWVYRNWERPDQSVGAAHLPDDDAMNSFWRSIWSVPVTHTEGDWMRDVERMCEPILDMGAIIISPQDVASAVRPLPNWKSPGPDGLHNFWLKWLRSSHARLASRFQSSLETGTLPQFLTTGVTHLLHKSGSTAEPKNYRPITCLPSVYKVLTSILRTKINNHIDNNSIMSASQNGCRNGSRGTKELLLIDMAISQQVRRSRKDLSTCWIDYKKAYDSVPHTWLMRVLELYKVNTTLCAFLTSCMRQWRTVLRYPGCRQIQGIGEPIRIERGIFQGDSLSPLWFCLALNPLSTLLEGSGLGYRLRRGGQVISHLLYMDDLKLFAPNKLQLLELLKVTETFSNSIRMEFGVDKCAVMHVKRGRIMESVGTQLTDSIHLRSLSSTETYKYLGMSEALGINETDMKQSLRERFYGRLKKVLNSLLSGGNKVRAFNGWVMPVLMYSFGILKWTQTELDALDRRVRSLLTANRMHHPRSSVMRLYIPRKCGGRGFLNAKTLHNREVCSLREYFSQADVGMHRDVVAVDKGFTPLSLAKENWRKPVIFDTNDRREVWRSKELHGRFYRALHGPDVDFLASVAWLRFGDLFGETEGFVCAIMDEVMMTNNYRKYIVKDGTVDICRACHCPGESIRHIVSGCSRLANGEYLHRHNLVARIIHQQLALKYNLVDAEVPYYKYVPDPVLENGHVTLYWDRSIITDRTIVANKPDIVVIDRSERLTMIIDITVPHDENLVKAEKDKEIKYQDLAHEVVDMWDVDSAVIVPIVVTANGLIAKSLDQHLKRLSLGGWIKGLIQKAVLLDTARIVRKFLSLRP

SEQ ID NO: 13492 - protein, 1206 aa, Amphipyra tragopoginis
MLTRSRAKAQNTRPPSSASSLSSASQPPEPASIVSDVTPAAAVASSSSDEYFSPATSPSPPPARRRGRGRPPTCLGPRGPPASDRVPAPGGSVQRMRWTQSMNENCMRAYFGATEGGTNLTAYRGRMLSLFQALEPAVNVSAQRLSDQVRVIQRDHRLDDAALDRLRSEMQNSHAAPLPSQIRTQTLVPPAVPLESNYADEEGEDRAISAGTQYSEIMRSALEDALREFRSTPPELRPRLPRLPMHNKNRALVCALDSLLPNVFESSEDLGDTQSILYCAAVAACRVAHVKFPNDNRATRPKSAVPAWQCRIERRIDEARVLIGKLTCFREGNRRPRVMRFVRRAFSGTDIGPGEYATRVTERIDFLKQKVYAWANRIRRYRRRVDRYTQNRIFQSDQRWVYRTWERPDQGVSDTRLPDNDVMNAFWRNIWSVPVTHTEGDWMQEVQRACEPIQEMGAVTIGPQDVTSAVRPMPNWKSPGPDGLHNFWIKWLRSSHARLASQFQSSLESGSLPAFLTTGITHLLFKSGSTAEPKNYRPITCLPTVYKLLTSILRAKLNHHIDSNAIMCATQNGCKNGSRGTKELLLIDMAISQQVRRSRKDLSTCWIDYKKAYDSVPHTWLMRVLELYKVNATLRTFLMSCMGQWRTVLHYPGCRQIQGNGELIRIERGIFQGDSLSPLWFCLALNPLSTLLEGSGLGYRLRRGGQVISHLLYMDDLKLFAPNNLQLLELLKVTETFSNSIRMEFGVDKCAVMHVKRGRIMESVGTQLSDSIHLRSLSSTETYKYLGMSEALGINEADMKQSLRERFFGRLIKVLKSLLSGGNKVRAFNGWVMPVLMYSFGILRWTQTELDALDRRVRTLLTAYRMHHPRSSVMRLYIPRKCGGRGFLNAKTLHNREVCSLREYFSQADVGMHRDVVAVDKGLTPLSLAKENWRKPVVLDAKGRMEVWRSKELHGRFYRALHGPDVDFLASVAWLRFGDLFGETEGFVCAIMDEVMMTNNYRKYIVKDGTVDICRACHCPGESIRHIVSGCSRLANGEYLHRHNLVARIIHQQLALKYNLVDTEVPYYKYVPDPVLENGHVTLYWDRSIITDRTIVANKPDIVVIDRLERRTMIVDITVPHDENLVKAENDKKIKYLDLAHEVVDMWDVDSAVIVPIVVTANGLIAKSLDQHLMRLSLGSWIKGLIQKAVLLDTARIVRKFLSLEP

SEQ ID NO: 13493 - protein, 916 aa, Amphipyra tragopoginis
MFNNNKRATRPKPAVPAWQCRIERRIDGARALIGKLICFREGNTRPRVMRFVRRAFSGTDISPRDYMSRVTERIDFLKQKVYAWANRIRRYKRRVERYTQNRTFQSDQRRVYRTWERPVPGVSDMRLPDDDAMSSFWRSIWSVPVAHTEGDWMRDIERACETIPEMGEIVISPQDVATAARPLPNWKSPGPDGLHNFWIKWLRSSHACLASQFQSSLESGSLPQFLTTGVTHLLYKSGSTAEPKNYRPITCLPTVYKLFTSILRVKISNHIDNNYILSPSQNGCRSGSRGTKELLLIDMAISQQVRRSRKDLSTCWIDYKKAYDSVPHTWLMRVMELYKINTTLRTLLMSCMRQWRTVLRYPGCREILGRGEPIRIERGIFQGDSLSPLWFCLALNPLSTLLEGTRLGYRLRREGQVISHLLYMDDLKLFAPTDLQLMELLKVTENFSNSIRMEFGVDKCAVMHVKRGGIVESEGIQLSNSIQLRSLSPTETYKYLGMSEALGISEADMRQSLRERFFGRLNKVLKSLLSGGNKVRAFNGWVMPVLMYSFGILKWTQTDLDALDRRVRALLTVHRMHHPRSSVMRLYIPRKCGGRGFLNAKTLHNREVCSLREYFLQAEGEMHRDVVAVDRGLTPLALAKENWRKPVVLSTNDREEVWQSKELHGRFYRALHGPDVDFLASVSWLRFGDLFGETEGFVCAIMDEVMMTNNYRKYIVKDGTVDICRACHRPGESIRHIVSGCSRLANGEYLHRHNLVARIIHQQLALKYNLVESEVPYYRYVPDPVLENGHATLYWDRSIITDRTIVANKPDIVVIDRSERRTMIVDITVPHDENLVKAEKDKQLKYLDLAHEVVAMWDVDSAVIVPIVVTANGLIAKSLDQHLKRLSLDGWIKGLIQKAVLLDTARIVRRFLSLEP

SEQ ID NO: 13494 - protein, 1224 aa, Noctua pronuba
MENCEGSRGRSASNVIKRLKMLTRLRAKQLAHPPSPGSSLSSASQPPGRATSVSTLSPVAAVASSSSDEFFSPPSTPPPPQRRRGRGRPPAGLGPRGQQAPNRVPAAGGNVSRMRWTQSINEQVMRAYYGATEGGSNLTAYRGRMLSLFQVLEPAVSVSAQRLSDQVRVIQRNHMLDDTVLDRLRSESRSNPVTPASPMIAVQLQSVTSTSPRSDRGGEEDDSEVISVSTQCNAQLRSALEGAFREYRSTQPELRPRLPRLPMHKKNKALMCALDSQLSNCFDSSKDLADTHSILYCGAVAACRVAHVKFPNNDRATRPKLAVPAWQCRIERRIGEARALIGKLICFREGNTRPRVMRFVRRAFSGTDISFRDYLTRVTERIDFLKQKICAWASRIRRYKRRVDRYTQNRTFQSDERWVYRAWERPDQGVTDTRLPDDDAMCSFWRSIWSVPVSHTEGDWTREVERACDPIPQMGAINISPQDVACAVRPLPNWKSPGPDGLHNFWIKWFQRSHARLASQFQSALESGSLPQFLTTGITHLLHKSGSTADPKNYRPITCLPTVYKVLTSILRVKINHHIDSNSIISASQNGCRNGSRGTKELLLIDMAISQQVRRSRRDLSTCWIDYKKAYDSVPHTWLMRVLELYKVDAILRTFLMSCMGHWRTVLRYPGCRQIQGNSEPIKIERGIFQGDSLSPLWFCLALNPLSTLLEGSGLGYRLRRGGQVISHLLYMDDLKLFAPNNLQLMKLLKVTETFSSAIRMEFGVDKCAVMHVKRGEIMESVGTQLSDSIYLRSLSSTETYKYLGMSEALGINTADMKQSLRERFFGRLKKVLGSLLSGGNKVRAFNGWVMPVLMYSFGILKWTQTELDALDRRVRALLTANRMHHPRSSVMRLYIPRKCGGRGFLNAKTLHNREVCSLREYFLEADVGMHRDVVSVDKGLTPLSLANGNWRKPRVLDTNDRKEVWQGKELHGRFYRALHGPDVDFLASVSWLRFGDLFGETEGFVCAIMDEVMMTNNYRKYIVKDGTVDICRACHRPGESIRHIISGCSRLANGEYLHRHNLVARIIHQQLALKYNLVESEVPYYKYAPDPVLDDGNITLYWDRSIITDRTIVANKPDIVVIDRLERRAMIVDITVPHDENLVKAEKDKQFKYLDLAREVVDMWDVNTAVIVPIVVSANGLIAKSLDQHLRRLALGSWIKGLIQKAVLLDTARIVRRFLSQEP

SEQ ID NO: 13495 - protein, 962 aa, Noctua pronuba
MHKKNKALMCALDSQLSNCFDSSKDLADTHSILYCGAVAACRVAHVKFPNNDRATRPKLAVPAWQCRIERRIGEARALIGKLICFREGNTRPRVMRFVRRAFSGTDISFRDYLTRVTERIDFLKQKICAWASRIRRYKRRVERYTQNRTFQSDERWVYRAWERPDQGVTDTRLPDDDAMCSFWRSIWSVPVSHTEGDWTREVERACDPIPQMGAINISPQDVACAVRPLPNWKSPGPDGLHNFWIKWFQRSHARLASQFQSALESGSLPQFLTTGITHLLHKSGSTAEPKNYRPITCLPTVYKVLTSILRAKINHHIDSNSIMSASQNGCRNGSRGTKELLLIDMAISQQVRRSRRDLSTCWIDYKKAYDSVPHTWLMRVLELYKVDATLRTFLMSCMGHWRTVLRYPGCRQIQGNSEPIRIERGIFQGDSLSPLWFCLALNPLSTLLEGSGLGYRLRRGGQVISHLLYMDDLKLFAPNNLQLMKLLKVTETFSSAIRMEFGVDKCAVIHVKRGEIMDSVGMQLSDSIYLRSLSSTETYKYLGMSEALGINTADMKQSLRERFFGRLNKVLGSLLSGGNKVRAFNGWVMPVLMYSFGILKWTQTELDALDRRVRALLTANRMHHPRSSVMRLYIPRKCGGRGFLNAKTLHNREVCSLREYFLEADVGMHRDVVSVDKGLTPLSLANGNWRKPRVLDTNDRKEVWQGKELHGRFYRALHGPDVDFLASVSWLRFGDLFGETEGFVCAIMDEVMMTNNYRKYIVKDGTVDICRACHRPGESIRHIISGCSRLANGEYLHRHNLVARIIHQQLALKYNLVESEVPYYKYAPDPVLDDGNITLYWDRSIITDRTIVANKPDIVVIDRLERRAMIVDITVPHDENLVKAEKDKQFKCLDLAHEVVDMWDVNTAVIVPIVVSANGLIAKSLDQHLKRLALGSWIKGLIQKAVLLDTARIVRRFLSQEP

SEQ ID NO: 13496 - protein, 962 aa, Noctua pronuba
MHKKNKALMCALDSQLSNYFDSSKDLTDTHSMLYCGAVAACRVAHVKFPNNDRATRPKLAVPAWQCRIERRIGEARALIGKLICFREGNTRPRVMRFVRRAFSGTDISFRDYLTRVTERIDFLKQKICAWASRIRRYKRRVERYTQNRTFQSDERWVYRAWERPDQGVTDTHLPDDDAMCSFWRSIWSVPVSHIEGDWTREVERACDPIPQMGAINISPQDVACAVRPLPNWKSPGPDGLHNFWIKWFQRSHVRLASQFQSALESGSLPQFLTTGITHLLHKSGSTAEPKNYRPITCLPTVYKVLTSILRAKINHHIDSNSIMSASQNGCRNGSRGTKELLLIDMAISQQVRRSRKNLSTCWIDYKKAYDSVPHTWLMRVLELYKVDATLRTFLMSCMGHWRTVLRYPGCRQIQGNSEPIRIERGIFQGDSLSPLWFCLALNPLSTLLEGSGLGYRLRRGGQVISHLLYMDDLKLFAPNNLQLMKLLKVTETFSSAIRMEFGVDKCAVMHVKRGEIMESVGTQLSDSIQLRSLSSTDTYKYLGMSEALGINTADMKQSLRERFFDRLNKVLSSLLSGGNKVRAFNGWVMPVLMYSFGILKWTQTELDALDRRVRALLTANRMHHPRSSVMRLYIPRKCGGRGFLNAKTLHNREVCSLREYFLEADVGMHRDVVSVDKGLTPLSLANENWRKPRVLDTNDRKEVWQGKELHGRFYRALHGPDVDFLASVSWLRFGDLFGETEGFVCAIMDEVMMTNNYRKYIVKDGTVDICRACHRPGESIRHIISGCSRLANGEYLHRHNLVARIIHQQLALKYNLVESEVPYYKYAPDPVLDNGNITLYWDRSIITDRTIVANKPDIVVIDRLERRAMIVDITVPHDENLVKAEKDKQFKYLDLAREVVDMWDVSTAVIVPIVVSANGLIAKNLDQHLKRLALGSWIKGLIQKAVLLDTARIVRRFLSQEP

SEQ ID NO: 13497 - protein, 962 aa, Noctua pronuba
MHKKNKALMCALDSQLSNYFDSSKDLADTHSMLYCGAVAACRVAHVKFPNNDRATRPKLAVPAWQCRIERRIGEARALIGKLICFREGNTRPRVMRFVRRAFSGIDITFRDYLARVTERIDFLKQKICAWASRIRRYKQRVERYTQNRTFQSDERWVYRAWERPDQGVTDTRLPGDDAMCLFWRSIWSVPVSHTEGDWTREVEQACDPIQEMGAIIISPQDVACAVRPLPNWKSPGPDGLHNFWIKWFQRSHACLASQFQLALESGSLPQFLTTGITHLLHKSGSTAEPKNYRPITCLPTVYKVLTSILRAKINQHIENNSIMSASQNGCGNGSRGTKELLLIDMAISQQVRRSRKDLSTCWIDYKKAYDSVPHTWLMRVLELYKVDATLRTFLMSCMRHWRTVLRYPGCRQIQRNSEPIRIERGIFQGDSLSPLWFCLALNPLSTLLEGSGLGYRLRRGGQVISHLLYMDDLKLFAPNNLQLMKLLKVTETFSSAIRMEFGVDKCAVMHVKRGEIMESVGTQLSDSIHLRSLTSTETYIYLGMSEALGINTADMKQSLRERFFGRLNKVLGSLLSGGNKVRAFNGWVMPVLMYSFGILKWTQTELDALDRRVRALLTANRMHHPRSSVMRLYIPRKCGGRGFLNAKTLHNREVCSLREYFLEADVGMHRDVISVDKGLTPLSLANENWRKPKVLVTNDRKEVWQGKELHGRFYRALHGPDVDFLASVSWLRFGDLFGETEGFVCAIMDEVMMTNNYRKYIVKDGTVDICRACHRPGESIRHIISGCSRLANGEYLHRHNLVARIIHQQLALKYNLVQSEVPYYKYAPDPVLDDGNITLYWDRPIVTDRTIVANKPDIVVIDRLERRAMIVDITVPHDENLVKAEKDKQFKYLDLAREVVDMWDVNTAVIVPIVVSANGLIAKSLDQHLRRLALGSWIKGLIQKAVLLDTARIVRRFLSQEP

SEQ ID NO: 13498 - protein, 1197 aa, Noctua pronuba
MLTRAAARRARLSPPDPSLSSASPLPESSPIVSAVTPAVAVASSSSDEYFSPPTTPPPVRRRRGRRPPDGLGPRGPPASDRVPALGGSVQRMRWTQSINENVMRSYYGATEGGNNRTAYRVRMLSLFQVLEPAVNVSAQRLSDQVRVIQRNRMLDDTVLDRLRTEMQSSHVITPSAQAVVLPQSNTIPNRANDESNDMVTNVSTQCNEEIRSALEGAIREYRSMQPDLRPRIPRLPMHNKNRALVAVLDSQLSNYFDNCEDLTDAHSILYCAAVAACRVAHVKFSDDRATRPKPAVPAWQYRIERRIGGARALIGKLICFREGNTRPRVMRFVRRAFSGTDISPRDYMSRVTERIDFLKQKVYAWANRIRRYKRRVDRYTQNRTFQRDERWVYRAWERPDQGVADTRLPDDDAMCSFWRSIWSVPVSHTEDEWTREVERACDPVQEMGAITISPQDVVCAVRPLPNWKSPGPDGLHNFWIKWFTRSHARLATLFQSALESGSLPEFLTTGITHLLHKSGSTAEPKNYRPITCLPTVYKVLTSILRTKISKHINDNSIMSPSQNGCRNGSRGTKELLLIDMAISQQVRRFRRDLSTCWIDYKKAYDSVPHTWLMRVLELYKVDTTLRTFLMSCMGQWRTVLRYPGCRQIQRDSEPIRIERGIFQGDSLSPLWFCLALNPLSTLLEDSGLGYRLRRGGQVISHLLYMDDLKLFAPNDLQLMELLKVTETFSSAIRMEFGVDKCAVMHVKRGEIVESVRTQLSDSINLRSLSATETYKYLGMSEALGINVADMKQSLKERFFGRLKKVFNSLLSGGNKVRAFNGWVMPVLMYSFGILKWTQTELDALDRRVRTLLTAYRMHHPRSSVMRLYIPRRCGGRGFLNAKTLHNREICSLREYFLETDVGMHRDVVAVDKGLTPLSLAKENWRKPVVLDTNDRREVWQSKELHGRFFRALHGPDVDLSASVAWLRSGDLFGETEGFVCAIMDEVMMTNNYRRFIVKDGTVDICRACHRPGESIRHIISGCSRLANGEYLHRHNLVARIIHQQLALKYNLVESEVPYYKYVPDPVLENGCVTLYWDRSIITDRTIVANKPDIVVVDRSERRAMIVDITVPHDENLVKAEKDKQIKYLDLAHEVVDLWDVDSAIIVPIVVSAHGLIAKSFDQHLRRLSLGSWIKGLIQKAVLLDTARIVRRFLSLEP

SEQ ID NO: 13499 - protein, 1198 aa, Spilosoma lubricipeda
MLTRAKLRAQLSPPDSSLCSALPPREATVEVSAVAEASSSSSSDEFFSPPTSPTPVRRQGRGRPPTSLGSRGPLTSNRAPATGGDVRRMKWTRSINENVMRAYFRATELGTNLTAYRVRLVSLFQELEPAVNVSAQRLSDQVRAIQRCHLLDDVVLERIRSDVRNTLTVPSSSHAVDVVGNTQQLPYNEDVDEQVESEIISISTQYNDRIRSALEDAIQDYRYVNYNNRPRLPRLPIHKRNLALVSALNSLLPDYFGNSEDLSDTHSILYCAAIAVCRVAGIKFNVEQITTRSKNTVPAWQYRIERRIAETRTLIGKLIAFKFFNTRPRVMRFVKQAFLGTTISPQQYMSSVTERIDFLKQKVYAWANRIRRYKKRGDRFNQNRMFQRNEKWVYRKWEAPNPCESDGDLPDENTTNSFWRNIWSVPVTHTDGDWMRDVSRSCESITSMEPVIINEDDISCAVRSLPNWKSPGPDGLHNFWLKWFRSSHACLASQLQAALDSGSLPQFLTTGITHLLYKYGSAMDPKNFRPITCLPTLYKLLTSILRLKITKHINNNSIISVSQNGCRSGTRGTKELLITDMTISQQVRRNRKSLATCWIDYKKAFDSVPHTWLLKVLELYKIDTTLCTFLKSCMRQWRTVLRYPGCRQIAVNDVPIKIERGIFQGDSLSPLWFCLALNPLSTLLEDSGLGYRLQKEAPVISHLFYMDDLKLFAPTKLQLTALLRVTENFSNSIKMEFGIDKCAVMHVKKGVIVESEGIELSDSTRLRSLSATETYKYLGFSQSLGIPESDMKQSLRERFFGRLKKVLKSLLSGGNKVRAYNGWVMPVLMYSFGILRWTQTELDALDRRVRTLLTASRMHHPRSSVMRLYIPRKFGGRGLLNVKTLHNREIYNLREYFLHTDVGVHRSVVAVDTGLTPLALAKENWRKPVVLGTNERREVWKGKELHGRFYRALNGSDIDFKASTSWLRYGDLFGETEGFVCAIMDEVIMTNNYRKYILKDGTVDICRACHRPGESIRHIISGCSRLANGEYLHRHNQVARIVHQQLALKYKLVSSEVPYYRYVPDPVLENGRATLYWDRSVITDRTIVANKPDIVVIDRSERRAMIVDIAVPHDENLVKVEKEKQIKYLDLSHEIVEMWDVDSVIIVPIVVSVHGLIAKSLDQHLKRLTLDGWIKGLMQKAVLLDTARIVRRFLSLEP

SEQ ID NO: 13500 - protein, 1111 aa, Spilosoma lubricipeda
MKWTHSINENVMRAYFRATELGTNLTAYRVRLVSLFQELEPAVNVSAQRLSDQVRAIQRCHLLDDAVLERIRSDIRNSLAVPSSSHVVDTIVNTTSQLPRSEYIDERVDSEIISVSTQCNDTIRSTLEDAIREYRYVDSNNRPRLSRLPIHKRNLALVSALDSLLPDYFNNSEDLSDTHSILYCAAIAVCRVAGVNFVECKTATRPKNTVPAWQCRIERRIAGTRTLIGKLISFRSGNTRPKVMRFVKQAFLGTTVSPQQYMSCVTERIDFLKQKVYAWANRIRRYRKRTDRYNQNRTFQRNEKWVYQKWEKLSPCMSDEHLPDKNATNYFWRNIWSTPVTHTEGHWCRDVERSCDSITPMEPVRIDKEDVSCAVRSLANWKAPGPDGLHNFWLKWFRSSHAYLASQFQTALDSGSLPQFLTTGITHLLHKSGSTTDPKNFRPITCLPTLYKLLTSILRLKITAHINNNSIISVSQNGCRSGTRGTKELLIIDMTISQQVRRNRKSLATCWIDYKKAYDSVPHTWLLRVLELYKIDTTLCTFLKSCMGQWRTVLRYPGCRQSTMNDVLIKIERGIFQGDSLSPLWFCLALNPLSALLEDSGLGYRLQKDDQVISHLFYMDDLKLLAPTKLQLTALLKVTENFSNSIKMEFGVDKCAVMYVKKGVIVESEGTELSDSTRLRSLSATETYKYLGFSQSLGIPEPDMKQSLRERFFGRLKKVLKSLLSGGNKVRAFNGWVMPVLMYSFGILRWTQTELDAIDRRVRTLLTAFRMHHPRSSVMRLYIPRKLGGRGLLNAKTLHNREIYNLREYFLHTDVGMHRSVVTVDIGLTPLALAKENWRKPVVLSTNDRREVWKGKELHGRFYRALNGPDIDFKASTSWLRYGDLFGETEGFVCAIMDEVIMTNNYRKYILKDGTVDICRACHRPGESIRHIISGCSRLANGEYLHRHNQVARIVHQQLALKYHLVSSEVPYYRYVPDPVLENGRATLYWDRSIITDRTIVANKPDIVVIDRLERRAMIVDIAVPHDENLVKVEKEKQIKYLDLSHEIVDMWNVDSAIIVPIVVSAHGLIAKSLDQHLKRLTLEGWIKGLMQKAVLLDTARIVRRFLSLEP

SEQ ID NO: 13501 - protein, 1197 aa, Ochropleura plecta
MLTRSAHARSARHPPPGSSLSSASPPPEPSLVVSAVTPAVAVASSSSDEYFSPPTTPPPVRRRGRHRPPDGLGPRGPPASDRVPALGGSVQRMRWTQSINENVMRSYYGATEGGNNLTAYRVRMLSLFQVLEPAVNVSAQRLSDQVRVIQRNRMLDDTVLDRLRTEMQSSQVITSSSQVVVPPQSHQVVNRANEVSNGMATNVSTQCSEEMRSTLEGAIREYRYMSPELRPRLPRLPMHNKNRALVAALDSQLSSYFDNCENPDAHSILYCAAVAACRVAHVKFPDDRATRPKPAIPFWQCRIERRIGAARALIGKLICFREGNTRPRVMRFVRRAFAGTDISPPDYMSRIAERIDFLKQKVYAWANRIRRYKRRVERYTQNRTFQSDERWVYRAWERPDQGVSDTHLPDDDAMCLFWRSIWSVPISHTEGEWTREVERACDPIPEMGVLTISPQDVACAVRPLPNWKSPGPDGLHNFWIKWIQRSHVRLAALFQSALESGSLPKFLTTGITHLLHKSGSTAEPKNYRPITCLPTLYKVLTSILRAKITKHIDDNSIMSASQNGCRNGSRGTKELLLIDMAISQQVRRSRRHLSTCWIDYKKAYDSVPHTWLMRVLEMYKVDATLRTFLSSCMRQWSTVLRYPGCRQFQMNSEPIRIERGIFQGDSLSPLWFCLALNPLSTLLENSGLGYRLRRGGQVISHLLYMDDLKLFAPNDLQLMELLKVTETFSSAIRMEFGVDKCAVMHVKRGEIVESVGTQLSDSINLRSLSATETYKYLGMSEALGINGADMKQSLKERFFGRLRKVLNSLLSGGNKVRAFNGWVMPVLMYSFGILKWTQTELDTLDRKVRTLLTAFRMHHPRSSVMRLYIPRSCGGRGFLNAKTLHNREICSLREYFLETDVGMHRDVVAVDKGLAPLSLAKENWRKPVVLDTNDRREVWQSKELHGRFFRALHGPDVDQSASVAWLRSGDLFGETEGFVCAIMDEVMMTNNYRRFIVKDGTVDICRACHRPGESIRHIISGCSRLANGEYLHRHNLVARIIHQQLALKYNLVELEVPYYRYEPDPVLEHGNITLYWDRSIITDRTIVANKPDIVVVDRSERRAMIVDITVPHDENLVKAEKDKQIKYIDLAREVVDMWDVDSAIIVPIVVTANGLIAKSLDQHLRRLSLGSWIKGLIQKAVLLDTARIVRRFLSLEP

SEQ ID NO: 13502 - protein, 1140 aa, Ochropleura plecta
MISRIGRHRPPDGLGPRGPPASDRVPAPGGSVQRMRWTQSINENVMRSYYGATEGGNNLTAYRVRMLSLFQVLEPAVNVSAQRLSDQVRVIQRNRMLDDTVLDRLRTEMQSSQVITSSSQAVVPPQPHQLINRVNEVSNDVATNVSTQCSEEMRSTLEGAIREYRYISPELRPRLPRLPMHNKNRALVAALDSQLSSYFDNCENLTDAHSILYCAAVTVCRVAHVKFPDDRATRPKPAIPFWQCRIERRIGAARALIGKLTCFREGNTRPRVMRFVRRAFAGTDISPPDYISRIAERIDFLKQKVYAWANRIRRYKRRVERYTQNRTFQSDERWVYRAWERPDQGVSDTRLPDDDAMSLFWRSIWSVPVSHTEGEWTREVERACDPIPEMGALTISPQDVACAVRPLPNWKSPGPDGLHNFWIKWIQRSHVRLATLFQSALESGSLPKFLTTGITHLLHKSGSTAEPKNYRPITCLPTLYKVLTSILKAKITKHIDDNSIMSASQNGCRNGSRGTKELLLIDMAISQQVRRSRRHLSTCWIDYKKAYDSVPHTWLMRVLDLYKIDATLRTFLISCMRQWSTVLRYPGCRQIQRNSEPIRIERGIFQGDSLSPLWFCLALNPLSTLLENSGLGYRLKRGGQVISHLLYMDDLKLFAPNDLQLMELLKVTETFSSAIRMEFGVDKCAVMHVKRGEIVESVGTQLSDSINLRSLSATETYKYLGMSEALGINVADMKQLLKERFFGRLRKVFNSLLSGGNKVRAFNGWVMPVLMYSFGILKWTQTELDALDRKVRTLLTAFRMHHPRSSVMRLYIPRSCGGRGFLNAKTLHNREICSLREYFLETDVGMHRDVVAVDKGLTPLSLAKENWRKPVVLDTNDRREVWQSKELHGRFFRALHGPDVDQSASVAWLRSGDLFGETEGFVCAIMDEVMMTNNYRRFIVKDGTVDICRACHRPGESIRHIISGCSRLANGEYLHRHNLVARIIHQQLALKYNLVEAEVPYYRYEPDPVLEHGYITLYWDRSIITDRTVVANKPDIVVVDRSERRAMIVDITVPHDENLVKAEKDKQIKYIDLAREVVDMWDVDSAIIVPIVVSANGLIAKSLDQYLRRLSLGSWIKGLIQKAVLLDTARIVRRFLSLEP

SEQ ID NO: 13503 - protein, 868 aa, Ochropleura plecta
MRFVRRAFAGTDISPPDYISRIAERIDFLKQKVYAWANRIRRYKRRVERYTQNRTFQSDERWVYRAWERPDQGVSDTHLPDDNAMCLFWRSIWSVPVSHTEGEWTREVERACDPIPEMGALTISPQDVACAVRPLPNWKSPGPDGLHNFWIKWIQRSHVRLAALFQTALESGSLPKFLTTGITHLLHKSGSTAEPKNYRPITCLPTLYKVFTSILRAKITKHIDDNSIMSASQNGCRNGSRGTKELLLIDMAISQQVRRSRRHLSTCWIDYKKAYDSVPHTWLMRVLELYKIDATLRTFLISCMRQWSTVLRYPGCRQIQRNSEPIRIERGIFQGDSLSPLWFCLALNPLSTLLENSGLGYRLRRGGQVISHLLYMDDLKLFAPNDLQLMELLKVTETFSSSIRMEFGVDKCAVMHVKRGEIVESVGTQLSDSINLRSLSATETYKYLGMSEALGINVADMKQSLKERFFGRLRKVFNSLLSGGNKVRAFNGWVMPVLMYSFGILKWTQTELDALDRKVRTLLTTFRMHHPRSSVMRLYIPRSCGGRGFLNAKTLHNREICSLREYFLETDVGMHRDVVAVDKGFTPLSLAKENWRKPVVLDTNDRREVWQSKELHGRFFRALHGPDVDQPASVAWLRSGDLFGETEGFVCAIMDEVMMTNNYRRFIVKDGTVDICRACHRPGESIRHIISGCSRLANGEYLHRHNLVARIIHQQLALKYSLVESEVPYYRYEPDPVLEHGNITLYWDRSIITDRTIVANKPDIVVVDRSERRAMIVDITVPHDENLVKAEKDKQIKYIDLAREVVDMWDVDSAIIVPIVVSANGLIAKSLDQHLRRLSLGSWIKGLIQKAVLLDTARIVRRFLSLEP

SEQ ID NO: 13504 - protein, 1198 aa, Ochropleura plecta
MITRLAARQHARLPPPDSPLSSASPPPEPSLIVSAVTPAVAVASSSSDEYFSPPTTPPPACRRGGRRPPDGLGLRGPPASDRVPAPGGSVQRMRWTSSINENVMRSYYGATEGGNNLTAYRVRMLSLFQVLEPAVNVSAQRLSDQVRVIQRNRMLDDTVLDRLRTEMQSSQVITSSSQAVVPPQSHQLVSHADEVSNDMATNVSTQCNEEMRIALEGAIREYRYISPELRPRLPRLPMHNKNRALVAVLDSQLSNYFDNCENLTDAHSILYCAAVAACRVAHVKFPDDGATRPKPAVPFWQCRIERRIGVARALIGKLICFREGNTRPRVMRFVRRAFAGTDISPPDYMSHITERIDFLKQKVYAWANRIRRYKRRVERYTLNRTFQSDERWVYRAWERPDQGVSDTHLPDDDAMCLFWRNIWSVPVSHTEGEWTREVERACDPIPEMGALTISPQDVACAVRPLPNWKSPGPDGLHNFWLKWIQRSHARLATLFQTALESGSLPKFLTTGITHLLHKSGSTTEPKNYRPITCLPTIYKVLTSILRAKITKHIDDNSIMSASQNGCRNGSRGTKELLLIDMAISQQVRRSRRHLSTCWIDYKKAYDSVPHTWLMRVLELYKVDATLRTFLSSCMRQWNTVLRYPGCRQIQRNSEPIRIERGIFQGDSLSPLWFCLALNPLSTLLEDSGLGYRLRRGGRVISHLLYMDDLKLFAPNDSQLMELLKVTETFSSAISMEFGVDKCAVMHVKRGEIVESVVTQLSDSIHLRSLSANETYKYLGMSEALGINVADMKQSLKERFFGRLRKVFNSLLSGGNKVRAFNGWVMPVLMYSFGILKWTQTELDALDRKVRTLLTAYRMHHPRSSVMRLYIPRSCGGRGFLNAKTLHNREICSLREYFLEADVGMHRDVVTVDKGFTPLSLAKENWRKPVVLDTNDRREVWQSKELHGRFFRALHGPDVDQPASVAWLRSGDLFGETEGFVCAIMDEVMMTNNYRRFIVKDGTVDICRACHRPGESIRHIISGCSRLANGEYLHRHNLVARIIHQQLALKYSLVESEVPYYRYEPDPVLEHGNITLYWDRSIITDRTIVANKPDIVVVDRSERRAMIVDITVPHDENLVKAEKDKQIKYIDLAREVVDMWDVDSAIIVPIVVSANGLIAKSLDQHLRRLSLGSWIKGLIQKAVLLDTARIVRRFLSLEP

SEQ ID NO: 13505 - protein, 1198 aa, Ochropleura plecta
MLTRAAQARNARHPPPGSSLSSASPPPEPSLVVSAVTPAVAVASSSSDEYFSPPTTPPPVRRRGRHRPPDGLGPRGPPASDRVPAPGGSVQRMRWTQSINENVMRSYYGATEGGNNLTAYRVRMLSLFQVLEPAVNVSAQRLSDQVRVIQRNRMLDDTVLDRLRTEMQSSLVITSSSQAVVPPQPHQLINRVNEVSNDVATNVSTQCSEEMRSTLEGAIREYRYISPELRPRLPRLPMHNKNRALVAALDSQLSSYFDNCENLTDAHSILYCAAVTVCRVAHVKFPDDRATRPKPAIPFWQCRIERRIGAARALIGKLTCFREGNTRPRVMRFVRRAFAGTDISPPDYISRIAERIDFLKQKVYAWANRIRRYKRRVERYTQNRTFQSDERWVYRAWERPDQGVSDTRLPDDDAMSLFWRSIWSVPVSHTEGEWTREVERACDPIPEMGALTISPQDVACAVRPLPNWKSPGPDGLHNFWIKWIQRSHVRLAALFQSALESGSLPKFLTTAITHLLHKSGSTAEPKNYRPITCLPTLYKVLTSILRAKITKHIDDNSIMSASQNGCRNGSRGTKELLLIDMAISQQVRRSRRHLSTCWIDYKKAYDSVPHTWLMRVLDLYKIDATLRTFLISCMRQWSTVLRYPGCRQIQRNSEPIRIERGIFQGDSLSPLWFCLALNPLSTLLENSGLGYRLKRGGQVISHLLYMDDLKLFAPNDLQLMELLKVTETFSSAIRMEFGVDKCAVMHVKRGEIVESVGTQLSDSINLRSLSATETYKYLGMSEALGINVADMKQLLKERFFGRLRKVFNSLLSGGNKVRAFNGWVMPVLMYSFGILKWTQTELDALDRKVRTLLTAFRMHHPRSSVMRLYIPRSCGGRGFLNAKTLHNREICSLREYFLETDVGMHRDVVAVDKGLTPLSLAKENWRKPVVLDTNDRREVWQSKELHGRFFRALHGPDVDQSASVAWLRSGDLFGETEGFVCAIMDEVMMTNNYRRFIVKDGTVDICRACHRPGESIRHIISGCSRLANGEYLHRHNLVARIIHQQLALKYNLVESEVPYYRYEPDPVLEHGYITLYWDRSIITDRTVVANKPDIVVVDRSERRAMIVDITVPHDENLVKAEKDKQIKYIDLAREVVDMWDVDSAIIVPIVVSANGLIAKSLDQYLRRLSLGSWIKGLIQKAVLLDTARIVRRFLSLEP

SEQ ID NO: 13506 - protein, 1198 aa, Ochropleura plecta
MLTRAAQARNARHPPPGSSLSSASPPPEPSLVVSAVTPAVAVASSSSDEYFSPPTTPPPVRRRGRHRPPDGLGPRGPPASDRVPAPGGSVQRMRWTQSINENVMRSYYGATEGGNNLTAYRVRMLSLFQVLEPAVNVSAQRLSDQVRVIQRNRMLDDTVLDRLRTEMQSSQVITSSSQAVVPPQPHQLINRVNEVSNDVATNVSTQCSEEMRSTLEGAIREYRYMSPELRPRLPRLPMHNKNRALVAALDSQLSSYFDNCENLTDAHSILYCAAVTVCRVAHVKFPDDRATRPKPAIPFWQCRIERRIGAARALIGKLTCFREGNTRPRVMRFVRRAFAGTDISPPDYISRIAERIDFLKQKVYAWANRIRRYKRRVERYTQNRTFQSDERWVYRAWERPDQGVSDTHLPDDNAMCLFWRSIWSVPVSHTEGEWTREVERACDPIPEMGALTISPQDVACAVRPLPNWKSPGPDGLHNFWIKWIQRSHVRLAALFQTALESGSLPKFLTTGITHLLHKSGSTAEPKNYRPITCLPTLYKVLTSILRAKITKHIDDNSIMSASQNGCRNGSRGTKELLLIDMAISQQVRRSRRHLSTCWIDYKKAYDSVPHTWLMRVLELYKIDATLRTFLISCMRQWSTVLRYSGCRQIQRNSEPIRIERGIFQGDSLSPLWFCLALNPLSTLLENSGLGYRLRRGGQVISHLLYMDDLKLFAPNDLQLMELLKVTETFSSSIRMEFGVDKCAVMHVKRGEIVESVGTQLSDSINLRSLSATETYKYLGMSEALGINVADMKQSLKERFFGRLRKVFNSLLSGGNKVRAFNGWVMPVLMYSFGILKWTQTELDALDRKVRTLLTTFRMHHPRSSVMRLYIPRSCGGRGFLNAKTLHNREICSLREYFLETDVGMHRDVVAVDKGFTPLSLAKENWRKPVVLDTNDRREVWQSKELHGRFFRALHGPDVDQPASVAWLRSGDLFGETEGFVCAIMDEVMMTNNYRRFIVKDGTVDICRACHRPGESIRHIISGCSRLANGEYLHRHNLVARIIHQQLALKYSLVESEVPYYRYEPDPVLEHGNITLYWDRSIITDRTIVANKPDIVVVDRSERRAMIVDITVPHDENLVKAEKDKQIKYIDLAREVVDMWDVDSAIIVPIVVSANGLIAKSLDQHLRRLSLGSWIKGLIQKAVLLDTARIVRRFLSLEP

SEQ ID NO: 13507 - protein, 1072 aa, Hecatera dysodea
MNNNNNNNNVSAQRLSDQVRVIQRNRMLDDAVLDRLRLESRSSRVSPASPPAAVQIQPSISPRPDHVSEDVDDGAITVSNQCNERLRSALEDAFREYRSTPPGLRPRLPRLPMHNKNRALVCALDSQLENCFNSSKDLADTHSILYCAAAAACRVAHVKFPSSDRAARPAVPAWQCRIERRIGEARALIGKLICFREGNTRRRVMRFVRRAFSGTDISPRDYLTRVTERIDFLKQKVYAWASRIRRYKRRVERYTQNRTFQSNERWVYRAWERPDQVVTDTHLPDDDAMCSFWRSIWSVPVSHTEGDWTREVERTCDPIPEMGAITISPQDVARAVRPLPNWKSPGPDGLHNFWIKWFTRSHARLASQFQSALESRSLPQFLTTGITHLLHKSGSTAEPKNYRPITCLPTVYKVLTSILRAKINDHIESNSIMSTSQNGCRNGARGTKELLLIDVAISQQVRRSRKDLSTCWIDYKKAYDSVPHTWLMRVLELYKVNTVLRTFLMSCMGQWRTVLHYPGCRQTQANSEPIRIERGIFQGDSLSPLWFCLALNPLSTLLEGSGQGYRLRRGGQVISHLLYMDDLKLFAPNNLQLMKLLKVTETFSSDISMEFGVDKCAVMHVKRGKIMESVGTQLSDSIYLRSLCSTETYKYLGMSEALGINATSVKQSLKERFFGRLNKVLNSLLSGGNKVRAFNGWVMPVLMYSFGILKWTQTELDALDRRVRSLLTANRMHHPRSSVMRLYIPRKCGGRGFLNAKTLHNREVCSLREYFLEADVGMHRDVVAVDKGLTPLSLANENWRKPVVLDTNDRREVWQSKELHGRFYRVLHGPDVDFLASVAWLRFGDLFGETEGFICAITDEVMMTNNYRKYIVKDGTVDICRACHRPGESIRHVISGCSSLANGDYLHRHNLVARIIHQQLALKYNLVESEVPYYRYVPDPVLENGNCTLYWDRSIITDRTIVANKPDIVVIDRLERRAMIVDIAVPHDENLVKAEKDKQSKYLDLAREVVDMWNVNTAVIVPIIVTANGIIAKSLDQHLKRLSLGSWIKGLIQKAVLLDTARIVRRFLSREP

SEQ ID NO: 13508 - protein, 1196 aa, Hecatera dysodea
MLTRAAARRARLPSPGSSLSSASPPPEPSPTVSAATPAVAVASSSSDEYFSPPTSPPPARRRRGRRPPDGLGPRGPPVSDRVPAPGGSVQRMRWTQTINENVMRSYYGATEGGTNLTAYRGRMLSLFQVLEPAVNVSAQRLSDQVRVIQRNRMLDDSVLDRLRTEICSHVIVPSPQTVAPPQLTQIPCHADEENNDRVTNVSTQCNDELRSALESAIREYRYVSPELRPRIPRLPMHNKNRALVAALDSQLSNYFDNCEDLTDAHSIMYCAAVAACRVAHVKMPSDRVTRPKVAVPAWQCRIERRIGGARALIGKLICFREGNTRPRVMRFVRRAFSGTDISPSDYLSRVTERIDFLKQKVYAWANRIRRYKRRVERYTQNRTFRSNERWVYKAWERPDQDVTDMHPPDDDAMCSFWRNIWSVPVSHTEGDWIREVERACDPLPEMGAIIISPQDVARAVRPLPNWKSPGPDGLHNFWIKWFKGSHACLASRYQAALESGSLPEFFMTGVTHLLHKSGSTAEPKNYRPITCLPTVYKVLTSILRDKINQHINSNNIMSASQNGCRNGSRGTKELLLIDMVISQQVRRSRKDLSTCWIDYKKAYDSVPHSWLMRVLELYKIDTTLRTFLMSCMGQWRTVLRYPGCRNIQRNSEPVRIERGIFQGDSLSPLWFCLALNPLSTLLENSGLGYRLRRGGQVISHLLYMDDLKLFAPTNLQLMELLKVTETFSNAIRMEFGVDKCAVMHVKRGEIMESVGTQLSDSINLRSLSSTETYKYLGMSEALGINVTDMKQSLRERFFGRLKKVLNSLLSGGNKVRAFNGWVMPVLMYSFGVLKWTQTELDALDRRVRTLLTAYRMHHPRSSVMRLYIPRKCGGRGFLNAKTLHNREICSLREYFLAVDVGMHRDVVAVDKGLTPLSLANENWRKPAVLDTNDRRAVWQSKELHGRFFRALHGPDVDQLASVAWLRFGDLFGETEGFVCAIMDEVIMTRNYRRFIVKDGTVDICRACHRPGESIRHIVSGCSSLANGEYLHRHNLVARIIHQQLALKYSLVESEVPYYRYVPDPVLDNGNITLYWDRSIITDRTIVANKPDIVVVDRIVRRAMIVDITVPHDENLVKAEKDKQIKYLDLAREVVDMWDVDSAIIVPIVVSVNGLIAKSLDQHLRRLTLGGWIKGLIQKAVLLDTARIVRRFLSLEP

SEQ ID NO: 13509 - protein, 1200 aa, Hecatera dysodea
MLTRSRTRAQTTQATSSGSSLSSASQPPGPTPAVSPEIPVAAVASSSSDEYFSPPTTPPPARRRGRGRPPTSLGPRGPPASDRVPAIGGSVQRMRWTQSINENVMRSYFGATEGGTNLTAYRGRMLSLFQVLEPAVNVSAQRLSDQVRVIQRNRMLDDAVLDRLRLESRSSRVSPASPPAAVQIQPSISPRPDHVSEDVDDGAITVSTQCNERLRSALEDAFREYRSTPPGLRPRLPRLPMHNKNRALVCALDSQLENCFNSSKDLADTHSILYCAAAAACRVAHVKFPNSDRAARPAVPAWQCRIERRIGEARALIGKLICFREGNTRRRVMRFVRRAFSGTDISPRDYLTRVTERIDFLKQKVYAWASRIRRYKRRVERYTQNRTFQSNERWVYRAWERPDQVVTDTHLPDDDAMCSFWRSIWSVPVSHTEGDWTREVERTCDPIPEMGAITISPQDVARAVRPLPNWKSPGPDGLHNFWIKWFTRSHARLASQFQSALESRSLPQFLTTGITHLLHKSGSTAEPKNYRPITCLPTVYKVLTSILRAKINDHIESNSIMSTSQNGCRNGARGTKELLLIDVAISQQVRRSRKDLSTCWIDYKKAYDSVPHTWLMRVLELYKVNTVLRTFLMSCMGQWRTVLHYPGCRQTQANSEPIRIERGIFQGDSLSPLWFCLALNPLSTLLEGSGQGYRLRRGGQVISHLLYMDDLKLFAPNNLQLMKLLKVTETFSSDISMEFGVDKCAVMHVKRGEIMESVGTQLSDSIHLRSLCSTETYKYLGMSEALGINATSVKQSLKERFFGRLNKVLNSLLSGGNKVRAFNGWVMPVLMYSFGILKWTQTELDALDRRVRSLLTANRMHHPRSSVMRLYIPRKCGGRGFLNAKTLHNREVCSLREYFLEADVGMHRDVVAVDKGLTPLSLANENWRKPVVLDTNDRREVWQSKELHGRFYRVLHGPDVDFLASVAWLRFGDLFGETEGFICAITDEVMMTNNYRKYIVKDGTVDICRACHRPGESIRHIISGCSSLANGDYLHRHNLVARIIHQQLALKYNLVESEVPYYRYVPDPVLENGNCTLYWDRSIITDRTIVANKPDIVVIDRLERRAMIVDIAVPHDENLVKAEKDKQSKYLDLAREVVDMWNVNTAVIVPIIVTANGIIAKSLDQHLKRLSLGSWIKGLIQKAVLLDTARIVRRFLSREP

SEQ ID NO: 13510 - protein, 1197 aa, Hecatera dysodea
MLTRAAARRARLPPPASSLSSASPPPEPSPTVSAATPAVAVASSSSDEYFSPPTSPPPARRRRGRRPPDGLGPRGPPASDRVPAPGGSVQRMRWTQTINENVMRSYYGATEGGNNLTAYRGRMLSLFQVLEPAVNVSAQRLSDQVRVILRNRMLDDSVLDRLRMEICSSHVITPSPQTVAQPQLIQIPSHADEESDDRVTNVSTQCNEELRSALESAIREFRYVSPELRPRIPRLPMHNKNRALVAALDSQLSNYFDNCEDLTDAHSIMYCAAVAACRVAHVKMPNDRVTRPKPAIPAWQCRIERRIGGARALIGKLICFREGNTRPRVMRFVRRAFSGTEISPLDYLSRVTERIDFLKQKVYAWANRIRRYKRRVERYTQNRTFRSNERWVYKAWERPDQDVTDTRPPDDDAMCSFWRNIWSAPVSHTEGDWIREVERACDPLPDMGAIIISPQDVARAVRPLPNWKSPGPDGLHNFWIKWLHSSHACLASRYQESLESGSLPEFLMTGITHLLHKSGSTAEPKNYRPITCLPTVYKVLTSILRDKINQHINSNNIMSASQNGCRNGSRGTKELLLIDIAISQQVRRSRKDLSTCWIDYKKAYDSVPHTWLLRVLELYKIDATLRTFLMSCMGHWRTVLRYPGCRHVQGNSEPIRIERGIFQGDSLSPLWFCLALNPLSTLLGNSGLGYRLKRGGQVISHLLYMDDLKLFAPTNLQLMELLKVTETFSNAIRMEFGVDKCAIMHVKRGEIMESVGTQLSDSINLRCLSSTETYKYLGMSEALGINVTDMKQSLKERFFGRLKKVLNSLLSGGNKVRAFNGWVMPVLMYSFGVLKWTQTELDALDRRVRTLLTTYRMHHPRSSVMRLYIPRKCGGRGFLNAKTLHNREICSLREYFLAAEVGMHRDVVAVDKGLTPLSLANENWRKPAVLDTNDRRAVWQSKELHGRFFRALHGPDVDQLASVAWLRFGDLFGETEGFVCAIMDEVIMTNNYRRFIVKDGTVDICRACHRPGESIRHIVSGCSRLANGEYLHRHNLVARIIHQQLALKYSLVNSEVPYYRYVPDPVLDSGNITLYWDRSIITDRTIVANKPDIVVVDRIERRTMIVDITVPHDENLVKAEKDKQIKYLDLAREVVDMWDVDSAIIVPIVVSANGLIAKSLDQHLRRLSLGSWIKGLMQKAVLLDTARIVRRFLSLEP

SEQ ID NO: 13511 - protein, 1200 aa, Mythimna impura
MLTRAAARRARPPPPASSLSSASPPPEPCLTVSAVTPAVAAASSSSDEYYSPPTTPPPTRRRGERRPPACLGSRGPPASDRVPATGGCVSRMRWTQSINENVMRAYYGATEGGNNLTAYRVRMLSLFQVLEPAVNVSAQRLSDQVRVIQRNHMLDDTVLDRLRTEMGSHAIASSSQTAVPSQVLASNHLPNHADEESTDMVTHVSTQCSNELRSALECAIREYRNMPLELRPRLPRLPMCNKNKALVAALDSQLSNYFDDCEDLTDTHSIMYCAAVAACRVAHVKFPNSDVATRPKPAVPAWQCRIERRIGGARALIGKLICFREGNTRPRVMRFVRRAFSGTDISPRDYMSCVTERIDFLKQKVYAWANRIRRYKRRVERYTQNRTFRSNERWVYRAWEQPDQGVTDTRLPDDDAMSSFWRNIWSVPVSHTEGGWTREVERACEPIPEMGAITISPQDVARAVRPLPNWKSPGPDGLHNFWIKWLQRSHARLASQYQTALETGSLPEFLTTGVTHLLHKSGSTAEPKNYRPITCLPTVFKVLTSILRAKINHHVDNNAIMSASQNGCRNGSRGTKELLLIDMAISQQVRRSRKDLSTCWIDYKKAYDSVPHTWLMRVLELYKIDTTLRTFLMSCMRQWRTVLRYPGCRHIQRNSEPVRIERGIFQGDSLSPLWFCLALNPLSTLLENSGLGYRLKRGGQVISHLLYMDDLKLFAPNNLQLMELLKVTETFSSAIRMEFGVDKCAVMHVKRGEIVESVGTQLSDSINLRSLSPTETYKYLGMSEALGINATDMKQTLRERFFGRLKKVFNSLLSGGNKVRAFNGWVMPVLMYSFGVLKWTQTELDALDRRVRTLLTAYRMHHPRSSVMRLYIPRKCGGRGFLNAKTLHNREVCSLREYFLTADVGMHRDVVAVDKGLTPLSLANESWRKPVVLDTNDRREVWQSKELHGRFFRALHGPDVDQLASVAWLRVGDLFGETEGFVCAIMDEVIMTNNYRRFIVKDGTVDICRACHRPGESIRHIISGCSRLANGEYLHRHNLVARIIHQQLALNYSLVDSEVPYYRYVPDPVLDNGDITLYWDRSIITDRTIVANKPDIVVVDRRERRTMIVDISVPHDENLVKAEKDKQIKYIDLAREVVDMWDVDSAIIVPIVVSANGLIAKSLDQHLRRLALGGWIKGLIQKAVLLDTARIVRRFLSLEP

SEQ ID NO: 13512 - protein, 1200 aa, Mythimna impura
MLTRSRAREQETHPTSSGSSLSSASQPPGPAPAVSPVIPAAAVASSSSDEYFSPPTTPPPARRRGRGRPPASLRPRGPPASDRVPAAGGSVQRMRWTQSINENVMRSYFGATEGGSNLTAYRGRMLSLFQVLEPTVNVSAQRLSDQVRVIQRNRMLDDAVLDRLRLESQRSRASSATPPAAVQLQPSALPRPDHVGDADDDAAISVSTQCNERLRSALEDAFREYRSTPPGLRPRLPRLPMHKRNRALVCALDSQLSNCFDSSKDLADTHSILYCAAAAACRVAHVKFPNCDRATRPAVPAWQRRIERRIGEARALIGKLICFREGNTRPRVMRFVRRAFLGTDISPQNYLPCVTERIDFLKQKVYAWASRIRRYKRRVERYTQNRTFQSNERWVYRTWERPDQDVTDTHLPDDDAMCSFWRRIWSVPVSHIEGDWIREVERTCDLLPEMGAITISPQDVARAVRPLPNWKSPGPDGLHNFWIKWFQGSHARLASQFQSALESGSLPEFLTTGITHLLHKSGSTADPKNYRPITCLPTVYKVLTSILRAKINTHIETNSIMSASQNGCRNGSRGTKELLLIDMAISQQVRRSRKDLSTCWIDYKKAYDSVPHTWLMRVLELYKVDTTLRTFLMSCMRQWRTVLHYPGCRQIRENSEPIRIERGIFQGDSLSPLWFCLALNPLSTLLEGSGLGYRLKRGGQVISHLLYMDDLKLFAPNNLHLMELLKVTETFSSAIRMEFGVDKCAVMHVKRGQIMESVGTQLSDSIYLRSLCSTETYKYLGMSEALGINAADMKQSLKERFFGRLNRVLKSLLSGGNKVRAFNGWVMPVLMYSFGILKWTQTELDALDRRVRTLLTANRMHHPRSSVMRLYIPRKCGGRGFLNAKTLHNREVCSLREYFLETDVGMHRDVVAVDKGLTPLSLANGNWRKPIILDINDRREVWQSKELHGRFYRALHGPDVDLLASVSWLRFGDLFGETEGFVCAIMDEVVMTNNYRKYIVKDGTADICRACHRPGESIRHIISGCSHLANGDYLHRHNLVARIIHQQLALKYNLVESEVPYYKYVPDPVLDNGSITLYWDRSIITDRTIVANKPDIVVIDRLERRTVIVDIAVPHDDNLVKAEKDKQTKYLDLAREVVDMWEVDTAVIVPIVVTANGLISKSLDQHLRRLSLGSWIKGLIQKAVLLDTARIVRRFLSQEP

SEQ ID NO: 13513 - protein, 1192 aa, Mythimna impura
MLTRAAARRSRLPPPASSLSSASPPPESSPTVSAVTPAVAVASSSSDEYFSPPTSPPPARRRRGPRGPPASDRVPAPGGSVQRMRWTQSINENVMRAYYGATEGGNNLTAYRVRMLSLFQVLEPAVNVSAQRLSDQVRVIQRNHMLDDTVLDRLRTEMSNHAIAPSSQPVVPVMVPPSYHLSDHADEEITDMVTHVSTQCNNELRSALECAIREYRNMPLELRPRLPRLPMHNKNKALVAALDLQLSNYFDDCEDLTDTHSIMYCAAVAACRVAHVKFPSCDVSTRPKPAVPAWQCRIERRIGGARALIGKLICFREGNTRPRVMRFVRRAFSGTDISPRDYMSRVTERIDFLKQKVYAWANRIRRYKRRVERYTQNRTFRSNERWVYRAWERPDQGVTDTRLPDDDAMSSFWRSIWSVPVSHTEGDWTREVERACDPIPQMGAIDISPQDVARAVRPLPNWKSPGPDGLHNFWIKWFTRSHARLAYQFQSALESGSLPQFLTTGITHLLHKSGSTAEPKNYRPITCLPTVYKVLTSTLRSKINSHIDKNLIMSPSQNGCRNGSRGTKELLLIDMTISQQVRRFRKDLSTCWIDYKKAYDSVPHTWLMRVLELYKIDTTLRTFLMSCMRQWSTVLRYPGCRHIQRNSEPVRIERGIFQGDSLSPLWFCLALNPLSTLLENSGLGYRLKRGGQVISHLLYMDDLKLFAPNNLQLMELLKVTETFSSAIRMEFGVDKCAVMHVKRGEVVESVGTQLTDSINLRSLSPTETYKYLGMSEALGINITDMKQSLKERFFGRLKKVFNSLLSGGNKVRAFNGWVMPVLMYSFGVLKWTQTELDALDRRVRTLLTAYRMHHPRSSVMRLYIPRKCGGRGFLNAKTLHNREVCSLREYFLATDVGMHRDVVAVDKGLTPLSLANENWRKPVVLDTNDRREVWQSKELHGRFFRAFHGPDVDQLASVAWLRFGDLFGETEGFVCAIMDEVIMTNNYRRFIVKDGTVDICRACHRPGESIRHIISGCSRLANGEYLHRHNLVARIIHQQLALKYSLVESEVPYYRYEPDPVLDNGHITLYWDRSIITDRTIVANKPDIVVVDRSERRAMIVDISVPHDENLVKAEKDKQIKYIDLAREVVDMWDVDSAIIVPIVVSANGLIAKSLDQHLRRLALGGWIKALIQKAVLLDTARIVRRFLSLEP

SEQ ID NO: 13514 - protein, 1200 aa, Mythimna impura
MLTRAAARRARPPPPASSLSSASPPPEPCLTANAVTPAVAAASSSSDEYYSPPTTPPSTRRRGERRPPACLGSRGPPASDRVPATGGCVSRMRWTQSINENVMRAYYGATEGGNNLTAYRVRMLSLFQVLEPAVNVSAQRLSDQVRVIQRNHMLDDTVLDRLRTEMGSHAIASSSQTVVPSQVSPPNHFSNHADEESTDMVTHVSTQCSNELRSALECAIREYRNMPLELRPRLPRLPMCNKNKALVAALDSQLSNYFDDCEDLTDTHSIMYCAAVAACRVAHVKFPNSDVATRPKPAVPAWQCRIERRIGGARALIGKLICFREGNTRPRVMRFVRRAFLGTDISPQDYMSCVTERIDFLKQKVYAWANRIRRYKRRVERYTQNRTFRSNERWVYRAWEQPDQGVADMRLPDDDAMSSFWRSIWSVPVSHTEGGWTREVERACEPIPEMGAITISPQDVARAVRPLPNWKSPGPDGLHNFWIKWLQRSHARLASQYQTALESGSLPEFLTTGVTHLLHKSGSTAEPKNYRPITCLPTVYKVLTSILRAKINHHVDNNAIMSASQNGCRNGSRGTKELLLIDMAISQQVRRSRKDLSTCWIDYKKAYDSVPHTWLMRVLELYKIDATLRTFLMSCMRQWRTVLRYPGCRHIQRNSEPVRIERGIFQGDSLSPLWFCLALNPLSTLLENSGLGYRLKRGGQVISHLLYMDDLKLFAPNNLQLMELLKVTETFSSAIRMEFGVDKCAVMHVKRGEIVESVGTQLSDSINLRSISPTETYKYLGMSEALGINATDMKQTLRERFFGRLKKVLNSLLSGGNKVRAFNGWVMPVLMYSFGVLKWTQTELDALDRRVRTLLTAYRMHHPRSSVMRLYIPRKCGGRGFLNAKTLHNREVCSLREYFLTADVGMHRDVVAVDKGLTPLSLANESWRKPVVLDTNDRREVWQSKELHGRFFRALHGPDVDQLASVAWLRVGDLFGETEGFVCAIMDEVIMTNNYRRFIVKDGTVDICRACHRPGESIRHIISGCSRLANGEYLHRHNLVARIIHQQLALNYSLVESEVPYYRYVPDPVLDNGDITLYWDRSIITDRTIVANKPDIVVVDRRERRTMIVDISVPHDENLVKAEKDKQIKYIDLAREVVDMWDVDSAIIVPIVVSANGLIAKSLDQHLRRLTLGGWIKGLIQKAVLLDTARIVRRFLSLEP

SEQ ID NO: 13515 - protein, 1200 aa, Mythimna impura
MLTRSRAQKLHTHPTSSGSSLSSASQPPGPAPTVSPEIPVAAVASSSSDEYFSPPTTPPPARRRGRGRPPASLGPRGPPASDRVPAAGGSVQRMRWTSSINENVMRSYFGATEGGINLTAYRSRMLSLFQVLEPAVNVSVQRLSYQVRVIQRNRMLDDAVLDRLRLESQSSRVSPATTPAAVQRLPTASPRPVQVGDADDDAAISVSTQCNDRLRGALEDAFREYRSTPPGLRPRLPRLPMHKRNRALVCALDSQLSNCFDSSKDLTDTHSILYCAAVAACRVAHVKFPNCDRATRPAVPAWQCRIEHRIGEARALIGKLICFREGNTRPRVMRFVRRAFSGTDISPRDYLPCVTERIDFLKQKIYAWANRIRRYKRRVERYTRNRTFQSNERWVYRDWERSDQGVTDTRLPDDDAMCSFWRSIWSAPVSHTEGDWIREVERACDLLPEMGAITISPQDVARAVRPLPNWKSPGPDGLHNFWVKWFQRSHARLASQFQSALESGSLPQFLTTGITHLLHKSGSTAEPKNYRPITCLPTVYKVLTSILRAKINSHIETNSIMSASQNGCRNGSRGTKELLLIDIAISQQVRRSRKNLSACWIDYKKAYDSVPHTWLMRVLELYKVDATLRTFLMSCMGQWRTVLHYPGCRQIQENNEPIRIERGIFQGDSLSPLWFCLALNPLSTLLEGSGLGYRLKRGGQVISHLLYMDDLKLFAPNNLQLVELLKVTETFSSAIRMEFGVDKCAVIHVKRGEIMESVGIQLSDSIHLRSLCSTETYKYLGMSESLGINTDDVKQSLKERFFGRLNKVLNSLLSGGNKVRAFNGWVMPVLMYSFGILKWTQTELDALDRRVRTLLTANRMHHPRSSVMRLYIPRKCGGRGFLNAKTLHNREVCSLREYFLKTDVGMHRDVVAVDKGLTPLSLANENWRKPIVLDTNDRREVWQSKELHRRFYRALHGPDVDLLASVSWLRFGDLFGETEGFVFAIMDEVMMTNNYRKYIVKDGTVDICRACHRPGESIRHIISGCSHLANGDYLHRHNLVARIIHQQLALKYNLVESEVPYYRYVPDPVLDNGNITLYWDRSIITDRTIVANKPDIVVIDRLERRTMIVDIAVPHDENLVKAEKDKQTKYLDLAREVVDMWEVDKAIIVPIVVTANGLIAKSLEQHLRRLSLDSWIKGLIQKAVLLDTARIVRRFLSQEP

SEQ ID NO: 13516 - protein, 930 aa, Mythimna impura
MYCAAVAACRVAHVKFPNSYVATRPKPAVPAWQCRIERRIGGARALIGKLICFREGNTRPRVMRFVRRAFSGTDISPRDYMSCVTERIDFLKQKVYAWANRIRRYKRRVERYTQNRTFRSNERWVYRAWEQPDQSVTDTRLPDDDAMSSFWRNIWSVPVSHTEGGWTREVERACEPIPEMGAITISPQDVARAVRPLPNWKSPGPDGLHNFWIKWLQRSHARLASQYQTALESGSLPEFLTTGVTHLLHKSGSTAEPKNYRPITCLPTVYKVLTSILRAKINHHVDNNAIMSASQNGCRNGSRGTKELLLIDMAISQQVRRSQKDLSTCWIDYKKAYDSVPHTWLMRVLELYKIDTTLRTFLMSCMRQWRTVLRYPGCRHIQRNSEPVRIERGIFQGDSLSPLWFCLALNPLSTLLENSGLGYRLKRGGQVISHLLYMDDLKLFAPNNLQLMELLKVTETFSSAIRMEFGVDKCAVMHVKRGEIVESVGTQLSDSINLRSLSPTETYKYLGMSEALGINATDMKQTLRERFFGRLKKVFNSLLSGGNKVRAFNGWVMPVLMYSFGVLKWTQTELDALDRRVRTLLTAYRMHHPRSSVMRLYIPRKCGGRGFLNAKTLHNHEVCSLREYFLAADVGMHRDVVAVDKGLTPLSLANESWRKPVVLDTNDRREVWQSKELHGRFFRALHGSDVDQLASVAWLRIGDLFGETEGFVCAIMDEVIMTNNYRRFIVKDGTVDICRACHRPGESIRHIISGCSRLANGEYLHRHNLVARIIHQQLALKYSLVESEVPYYRYMPDPVLDNGDITLYWDRSIITDRTIVANKPDIVVVDRRERRTMIVDISVPHDENLVKAEKDKQIKYIDLAREVVDMWDVDSAIIVPIVVSANGLIAKSLDQHLRRLALGGWIKGLIQKAVLLDTARIVRRFLSLEP

SEQ ID NO: 13517 - protein, 1072 aa, Mythimna impura
MLEPAVNVSAQRLSDQVRVIQRNHMLDDTVLDRLRTEMSNHAIAPSSQPVVPVMVPPSYHLSDHADEEITDMVTHVSTQCNNELRSALECAIREYRNMPLELRPRLPRLPMHNKNKALVAALDLQLSNYFDDCEDLTDTHSIMYCAAVAACRVAHVKFPSCDVSTRPKPAVPAWQCRIERRIGGARALIGKLICFREGNTRPRVMRFVRRAFSGTDISPRDYMSRVTERIDFLKQKVYAWANRIRRYKRRVERYTQNRTFRSNERWVYRAWERPDQGVTDTRLPDDDAMSSFWRSIWSVPVSHTEGDWTREVERACDPIPQMGAIDISPQDVARAVRPLPNWKSPGPDGLHNFWIKWFTRSHARLAYQFQSALESGSLPQFLTTGITHLLHKSGSTAEPKNYRPITCLPTVYKVLTSILRSKINSHIDKNLIMSPSQNGCRNGSRGTKELLLIDMTISQQVRRFRKDLSTCWIDYKKAYDSVPHTWLMRVLELYKIDTTLRTFLMSCMRQWSTVLRYPGCRHIQRNSEPVRIERGIFQGDSLSPLWFCLALNPLSTLLENSGLGYRLKRGGQVISHLLYMDDLKLFAPNNLQLMELLKVTETFSSAIRMEFGVDKCAVMHVKRGEVVESVGTQLTDSINLRSLSPTETYKYLGMSEALGINITDMKQSLKERFFGRLKKVFNSLLSGGNKVRAFNGWVMPVLMYSFGVLKWTQTELDALDRRVRTLLTAYRMHHPRSSVMRLYIPRKCGGRGFLNAKTLHNREVCSLREYFLATDVGMHRDVVAVDKGLTPLSLANENWRKPVVLDTNDRREVWQSKELHGRFFRAFHGPDVDQLASVAWLRFGDLFGETEGFVCAIMDEVIMTNNYRRFIVKDGTVDICRACHRPGESIRHIISGCSRLANGEYLHRHNLVARIIHQQLALKYSLVESEVPYYRYEPDPVLDNGHITLYWDRSIITDRTIVANKPDIVVVDRSERRAMIVDISVPHDENLVKAEKDKQIKYIDLAREVVDMWDVDSAIIVPIVVSANGLIAKSLDQHLRRLALGGWIKALIQKAVLLDTARIVRRFLSLEP

SEQ ID NO: 13518 - protein, 1046 aa, Mythimna impura
MLDDAVLDRLRLESRSSRVSPASPQAAVQLQSNVSLRPDHVGEDDDDGAISVSNQCNVRLRSALEDAFREYRFTPAELRPRLPRLPMHKKNRALVCALDSQLSNCFDSSEDLTDTHSILYCAAVAACRVARVKFPNSDRVTRPAVPAWQCRIERRIGEARALIGKLICFREGNTRPRVMRFVRRAFSGTDISPRDYLPHITERIDFLKQKVYAWANRIRRYKRRVERYTQNRTFQRNERWVYRAWERPDQGVIDTRLPDDDAMCSFWRSIWSVPVSHTEGDWIREIERTCDLIPEMGAITISPQDVARAVRPLPNWKSPGPDGLHNFWLKWFQRSHARLASQFQSALESGSLPQFLTTGITHLLHKSGSTAEPKNYRPITCLPTVYKVLTSILRAKINSHIETNSIMSASQNGCRNGSRGTKELLLIDVAISQQVRRSRRDLSTCWIDYKKAYDSVPHTWLMRVLELYKVDATLRTFLMSCMRQWRTALHYPGCRQIRESSEPIRIERGIFQGDSLSPLWFCLALNPLSTLLEGSGLGYRLRRGGHVISHLLYMDDLKLFASNNLELMELLKVTETFSSAIRMEFGLDKCAVMHVKRGEIMESVGTQLSDSIYIRSLCSTETYKYLGMSEALGINAADMKQSLRERFFGRLNKVLNSLLSGGNKVRAFNGWVMPVLMYSFGILKWTQTELDALDRRVRSLLTANRMHHPRSSVMRLYIPRKCGGRGFLNAKTLHNREICSLREYFLKTDVGMHRDVVAVDKGLTPLSLVNENWRKPTVMDTNERRAVWQGKELHGRFYRALHGPDVDLLASVSWLRFGDLFGETEGFVFAIMDEVMMTNNYRKYIVKDGTVDICRACHRPGESIRHIISGCSHLANGDYLHRHNLVARIIHQQLALKYNLVESEVPYYRYVPDPVLENGGVTLYWDRSIITDRTIVANKPDIVVIDRLERRTMIVDIAVPHDENLVKAEKDKQTKYLDLAREVVDMWEVDRAIIVPIVVTANGLIAKSLEQHLRRLSLGSWIKGLIQKAVLLDTARIVRRFLSQEP

SEQ ID NO: 13519 - protein, 930 aa, Mythimna impura
MYCAAVAACRVAHVKFPNSDVATRPKPAVPAWQCRIERRIGGARALIGKLICFREGNTRPRVMRFVRRAFSGTDISPRDYMSCVTERIDFLKQKVYAWANRIRRYKRRVERYTQNRTFRSNERWVYRAWEQPDQGGADTRLPDDDAMSSFWRNIWSVPVSHTEGGWTREVERACEPIPEMGAITISPQDVARAVRPLPNWKSPGPDGLHNFWIKWLQRSHARLASQYQTALESGSLPEFLTTGVTHLLHKSGSTAEPKNYRPITCLPTVYKVLTSILRAKINHHVDNNGIMSASQNGCRNGSRGTKELLLIDMAISQQVRRSRKDLSTCWIDYKKAYDSVPHTWLMRVLELYKIDATLRTFLMSCMRQWRTVLRYPGCRHIQRNSEPVRIERGIFQGDSLSPLWFCLALNPLSTLLENSGLGYRLKRGGQVISHLLYMDDLKLFAPNNLQLMELLKVTETFSSAIRMEFGVDKCAVMHVKRGEIVESVGTQLSDSINLRSLSPTETYKYLGMSEALGINATDMKQTLRERFFGRLKKVFNSLLSGGNKVRAFNGWVMPVLMYSFGVLKWTQTELEALDRRVRTLLTAYRMHHPRSSVMRLYIPRKCGGRGFLNAKILHNREVCSLREYFLTADVGMHRDVVAVDKGLTPLSLANESWRKPVVLDTNDRREVWQSKELHGRFFRALHGPDVDQLASVAWLRVGDLFGETEGFVCAIMDEVIMTNNYRRFIVKDGTVDICRACHRPGESIRHIISGCSRLANGEYLHRHNLVARIIHQQLALNYSLVESEVPYYRYVPDPVLDNGDITLYWDRSIITDRTIVANKPDIVVVDRRERRTMIVDISVPHDENLVKAEKDKQIKYIDLAREVVDMWDVDSAIIVPIVVSANGLIAKSLDQHLRRLALGGWIKGLIQKAVLLDTARIVRRFLSLEP

SEQ ID NO: 13520 - protein, 975 aa, Mythimna impura
MPLKLRPRLPRLPMCNKNKALVAALDSQLSKYFDDCEDLTDTHSIMYCAAVAACRVAHVKFPNSDVATRPKPAVPAWQCRIERRIGGARALIGKLICFREGNTRPRVMRFVRRAFSGTDVSPRDYMSCVTERIDFLKQKVYAWANRIRRYKRRVERYTQNHTFRSNERWVYRAWEQPDQGVADTRLPDDDVMSAFWRNIWSVPVSHTEGGWTREVERACEPIPEMGAITISPQDVARAVRPLPNWKTPGPDGLHNFWIKWLQRSHARLASQYQTALESGSLPEFLTTGVTHLLHKSGSTAEPKNYRPITCLPTVYKVLTSILRAKINHHVDNNAIMSASQNGCRNGSRGTKELLLIDMAISQQVRRSRKDLSTCWIDFKKAYDSVPHTWLMRVLELYKIDATLRTFLMSCMRQWRTVLRYPGCRHIQRNNEPVRIERGIFQGDSLSPLWFCLALNPLSTLLENSGLGYRLKRGGQVISHLLYMDDLKLFAPNNLQLMELLKVTETFSSAIRMEFGVDKCAVMHVKRGEIVESVGTQLSDSINLRSLSPTETYKYLGMSEALGINATDMKQTLRERFFGRLKKVFNSLLSGGNKVRAFNGWVMPVLMYSFGVLKWTQTELDALDRRVRTLLTAYRMHHPRSSVMRLYIPRKCGGRGFLNAKTLHNREVYSLREYFLTADVGMHRDVVAVDKGLTPLSLANESWRKPVVLDTNDRREVWQSKELHGRFFRALHGPDVDQLASVAWLRVGDLFGETEGFVCAIMDEVIMTNNYRRFIVKDGTVDICRACRRPGESIRHIISGCSRLANGEYLHRHNLVARIIHQQLALNYSLVESEVPYYRYVPDPVLDNGDITLYWDRSIITDRTIVANKPDIVVVDRRERRTMIVDISVPHDENLVKAEKDKQIKYIDLAREVVDMWDVDSAIIVPIVVSANGLIAKNLDQHLRRLALGGWIKGLIQKAVLLDTARIVRRFLSLEP

SEQ ID NO: 13521 - protein, 1200 aa, Mythimna impura
MLTRSRAKKANTHPTSSGSSLSSASQPPGPAPTVSPEIPVAAVASSSSDEYFSPPTTPPPARRRGRGRPPASLGPRGPPASDRVLAAGGSVQRMRWTQSINENVMRSYFGATEGGSNLTAYRGRMLSLFQVLEPAVNVSAQRLSDQVRVIQRNRMLDDAVLDRLRLESRSSRVSPASPQAAVQLQSNVSLRPDHVGEDDDDGAISVSNQCNVRLRSALEDAFREYRFTPAELRPRLPRLPMHKKNRALVCALDSQLSNCFDSSEDLTDTHSILYCAAVAACRVARVKFPNSDRVTRPAVPAWQCRIERRIGEARALIGKLICFREGNTRPRVMRFVRRAFSGTNISPRDYLPHITERIDFLKQKVYAWANRIRRYKRRVERYTQNRTFQRNERWVYRAWERPDQGVIDTRLPDDDAMCSFWRSIWSVPVSHTEGDWTREIERTCDLIPEMEPITISPQDVARAVRPLPNWKSPGPDGLHNFWLKWFQRSHARLASQFQSALESGSLPQFLTTGITHLLHKSGSTAEPKNYRPITCLPTVYKVLTSILRAKINSHIETNSIMSASQNGCRNGSRGTKELLLIDVAISQQVRRSRRDLSTCWIDYKKAYDSVPHTWLMRVLELYKVDATLRTFLMSCMRQWRTALHYPGCRQIRESSEPIRIERGIFQGDSLSPLWFCLALNPLSTLLEGSGLGYRLKRGGQVISHLLYMDDLKLFASNNLQLMELLKVTETFSSAIRMEFGLDKCAVMHVKRGEIMESVGTQLSDSIYIRSLCSTETYKYLGMSEALGINAADMKQSLRERFFGRLNKVLNSLLSGGNKVRAFNGWVMPVLMYSFGILKWTQTELDALDRRVRSLLTANRMHHPRSSVMRLYIPRKCGGRGFLNAKTLHNREICSLREYFLKTDVGMHRDVVAVDKGLTPLSLVNENWRKPTVMDTNERRAVWQGKELHGRFYRALHGPDVDLLASVSWLRFGNLFGETEGFVFAIMDEVMMTNNYRKYIVKDGTVDICRACHRPGESIRHIISGCSHLANGDYLHRHNLVARIIHQQLALEYNLVESEVPYYRYVPDPVLENGSVTLYWDRSIITDRTIVANKPDIVVIDRLERRTMIVDIAVPHDENLVKAEKDKQTKYLDLAREVVDMWEVDRAVIVPIVVTANGLIAKSLEQHLRRLSLGSWIKGLIQKAVLLDTARIVRRFLSQEP

SEQ ID NO: 13522 - protein, 960 aa, Mythimna impura
MHKRNRALVCALDSQLSNCFDSSKDLTDTHSILYCAAVAACRVAHVKFPNCDRATRPAVPAWQCRIEHRIGEARALIGKLICFREGNTRPRVMRFVRRAFSGTNISSRDYLPCVTERIDFLKQKIYAWANRIRRYKRRVERYTWNRTFQSNERWVYRDWERPDQGVTDTRLPDDDAMCSFWRSIWSAPVSHTEGDWIREVERACDLLPEMGAITISPQDIARAVRPLPNWKSPGPDGLHNFWVKWFQRSHARLASQFQSALESGSLPQFLTTGITHLLHKSGSTAEPKNYRPITCLPTVYKVLTSILRAKINSHIETNSIMSASQNGCRNGSRGTKELLLIDIAISQQVRRSRKNLSACWIDYKKAYDSVPHTWLMRVLELYKVDATLRTFLKSCMGQWRTVLHYPGCRQIQENNEPIRIERGIFQGDSLSPLWFCLALNPLSTLLEGSGLGYRLKRGGQVISHLLYMDDLKLFAPNNLQLVELLKVTETFSSAIRMEFGLDKCAVIHVKRGEIMESVGIQLSDSIHLRSLCSTETYKYLGMSESLGINTDDVKQSLKERFFGRLNKVLNSLLSGGNKVRAFNGWVMPVLMYSFGILKWTQTELDALDRRVRTLLTANRMHHPRSSVMRLYIPRKCGGRGFLNAKTLHNREVCSLREYFLKTDVGMHRDVVAVDKGLTPLSLANENWRKPIVLDTNDRREVWQSKELHGRFYRALHGPDVDLLASVSWLRFGDLFGETEGFVFAIMDEVMMTNNYRKYIVKDGTVDICRACHRPGESIRHIISGCSHLANGDYLHRHNLVARIIHQQLALKYNLVESEVPYYRYVPDPVLDNGNITLYWDRSIITDRTIVANKPDIVVIDRLERRTMIVDIAVPHDENLVKAEKDKQTTYLDLAREVVDMWEVDRAIIVPIVVTANGLIAKSLEQHLRRLSLGSWIKGLIQKAVLLDTARIVRRFLSQEP

SEQ ID NO: 13523 - protein, 1198 aa, Phlogophora meticulosa
MLTRSAARRARPPPPASSLSSASSPPKPSTIVSTVKPAVPVASSSSDEYFSPPTSPPPARRRRGRRPPDGLGPRGPPASDRVPAPGGSVQRMRWTQSINENVMRSYYGATEGGNNLTAYRVRMLSLFQVLEPAVNVSAQRLSDQVRVIQRNHMLDDVVLDRLRTEMQSSRVITSPSHTVVPPQYNIVSSSFADGEGSDKVTNVSTQCNEELRSALEGAIREYRFMLPALRPRLPRLPMHNKNRALVAALDSQLSNYFDNCDDLTDAHSILYCAAVAACRVAHVKFPNDIATRPKPAVPAWQCRIERRIAGARALIGKLVCYREGNTRPRVMRYVRRAFLGTDISPRDYMSRVTERIDFLKQKVYAWASRIRRYKRRVERYTQNRTFQSNERWVYRAWERPVQGVTDTHLPDDDVMCSFWRNIWSVPVSHTEGDWTREVERACDPIPQMGAITISPQDVARAVRPLPNWKSPGPDGLHNFWIKWLQKSHARLASQFQSALKTGSLPQFLTTGITHLLHKSGSTAEPKNYRPITCLPTVYKVLTSILRVKINNHIDSNSIMSASQNGCRNGSRGTKELLLIDTAISQQVRRSRKDLSTCWIDYKKAYDSVPHTWLKRVLELYKVDATLRTFLTSCMGQWRTVLRYPGCRQIQRNSEPIRIERGIFQGDSLSTLWFCLALNPLSTLLEDSGLGYRLKRGGQVVSHLLYMDDLKLFAPSDLQLMELLTVTKTFSSAIRMEFGVDKCAVMHIKRGKIVESVGTQLPDFINFRALSPIETYKYLGMSEALGINAADMKQSLKERFFGRLKKVCNSLLSGGNKVRAFNGWVMPVLMYSFGILKWTQTELDALDRRVRTFLTASRMHHPRSSVMRLYIPRKCGGRGFLNAKTLHNREICSLRDYFLETDVGMHRDVVAVDQGLTPLSLAKENWRKPVVLDTNDRKEVWQSKELHGRFFQALHGPDVDQLASVSWLRFGDLFGETEGFVCAIMDEVIMTNNYRRFIVKDGTVDICRACHRPGESIRHIISGCSRLANEEYLHRHNLVARIIHQQLALKYSLVESEVPYYKYVPDPVLENGSVTLYWDRSIITDRTIVANKPDIVVMDRIERRATIIDVTVPHDGNLVKAEKDKQIKYLDLAREVVDMWDVDSAIVVPIVVSANGLIAKSLDQHLRRLALGSWIKGLIQKAVLLDTARIVRRFLSLEP

SEQ ID NO: 13524 - protein, 1198 aa, Phlogophora meticulosa
MLTRSAARRARPPPPASSLSSASSPPKPSTIVSTVKPAVPVASSSSDEYFSPPTSPPPARRRRGRRLPDGLGPRGPPASDRVPAPGGSVQRMRWTQSINENVMRSYYGATEGGSNLTAYRVRMLSLFQVLEPAVNVSAQRLSDQVRVIQRNHMLDDVVLDRLRTEMQSSRVITSPSHTVVPPQYNIVLSSFADGEGSDKVTNVSTQYNEELRSALEGAIREYRFMLPALRPRLPRLPMHNKNRALVAALDSQLSNYFDNCDDLTDAHSILYCAAVAACRVAHVKFPYDIATRPKPAVPAWQCRIERRIAGARALIGKLVCYREGNTRPRVMRYVRRAFLGTDISPRDYMSRVTERIDFLKQKVYAWASRIRRYKRRVERYTQNRTFQSNERWVYRAWERPVQGVTDTHLPDDDVMCSFWRNIWSVPVSHTEGDWTREVERACDPIPQMGAITISPQDVARAVRPLPNWKSPGPDGLHNFWIKWLQKSHARLASQFQSALETGSLPQFLTTGITHLLHKSGSTAEPKNYRPITCLPTVYKVLTSILRVKINNHIDSNSIMSASQNGCRNGSRGTKELLLIDTAISQQVRRSRKDLSTCWIDYKKAYDSVPHTWLKRVLELYKVDATLRTFLTSCMGQWRTVLRYPGCRQIQRNSEPIRIERGIFQGDSLSPLWFCLALNPLSTLLEDSGLGYRLKRGGQVVSHLLYMDDLKLFAPSDLQLMELLTVTKTFSSAIRMEFGVDKCAVMHVKRGKIVESVGTQLPDFINFRALSPIETYKYLGMSEALGINAADMKQSLKERFFGRLKKVCNSLLSGGNKVRAFNGWVMPVLMYSFGILKWTQTELDALDRRVRTFLTASRMHHPRSSVMRLYIPRKCGGRGFLNAKTLHNREICSLRDYFLETDVGMHRDVVAVDQGLTPLSLAKENWRKPVILDTNDRKEVWQSKELHGRFFQALHGPDVDQLASVSWLRFGDLFGETEGFVCAIMDEVIMTNNYRRFIVKDGTVDICRACHRPGESIRHIISGCSRLANEEYLHRHNLVARIIHQQLALKYSLVESEVPYYKYVPDPVLENGSVTLYWDRSIITDRTIVANKPDIVVMDRIERRATIIDVTVPHDGNLVKAEKDKQIKYLDLAREVVDMWDVDSAIVVPIVVSANGLIAKSLDQHLRRLALGSWIKGLIQKAVLLDTARIVRRFLSLEP

SEQ ID NO: 13525 - protein, 1198 aa, Phlogophora meticulosa
MLTRSAARRARPPPPASSLSSASSPPKPSTIVSTVKPAVPVASSSSDEYFSPPTSPPPARRRRGRRPPDGLGPRGPLASDRVPAPGGSVQRMRWTQSINENVMRSYYGATEGGSNLTAYRVRMLSLFQVLEPAVNVSAQRLSDQVRVIQRNHMLDDVVLDRLRTEMQSSRVITSPSHTVVPPQYNIVLSSFADGEGSDKVINVSTQYNEELRSALEGAIREYRFMLPALRPRLPRLPMHNKNRALVAALDSQLSNYFDNCDDLTDAHSILYCAAVAACRVAHVKFPYDKATRPKPAVPAWQCRIERRIAGARALIGKLVCYREGNTRPRVMRYVRRAFLGTDISPRDYMSRVTERIDFLKQKVYAWASRIRRYKRRVERYTQNRTFQSNERWVYRAWERPVQGVTDTHLPDDDVMCSFWRNIWSVPVSHTEGDWTREVERACDPIPQMGAITISPQDVARAVRPLPNWKSPGPDGLHNFWIKWLQKSHARLASQFQSALETGSLPQFLTTGITHLLHKSGSTAEPKNYRPITCLPTVYKVLTSILRVKINNHIDSNSIMSASQNGCRNGSRGTKELLLIDTAISQQVRRSRKDLSTCWIDYKKAYDSVPHTWLKRVLELYKVDATLRTFLTSCMGQWRTVLRYPGCRQIQRNSESIRIERGIFQGDSLSPLWFCLALNPLSTLLEDSGLGYRLKRGGQVVSHLLYMDDLKLFAPSDLQLMELLTVTKTFSSAIRMEFGVDKCAVMHVKRGKIVESVGTQVPDFINFRALSPIETYKYLGMSEALGINAADMKQSLKERFFGRLKKVCNSLLSGGNKVRAFNGWVMPVLMYSFGILKWTQTELDALDRRVRTFLTASRMHHPRSSVMRLYIPRKCGGRGFLNAKTLHNREICSLRDYFLETDVGMHRDVVAVDQGLTPLSLAKENWRKPVVLDTNDRKEVWQSKELHGRFFQALHGPDVDQLASVSWLRFGDLFGETEGFVCAIMDEVIMTNNYRRFIVKDGTVDICRACHRPGESIRHIISGCSRLANEEYLHRHNLVARIIHQQLALKYSLVESEVPYYKYVPDPVLENGSVTLYWDRSIITDRTIVANKPDIVVMDRIERRATIIDVTVPHDGNLVKAEKDKQIKYLDLAREVVDMWDVDSAIVVPIVVSANGLIAKSLDQHLRRLALGSWIKGLIQKAVLLDTARIVRRFLSLEP

SEQ ID NO: 13526 - protein, 962 aa, Xestia xanthographa
MHNKNKALMCALDSQLSNCFDSSKDLTDTHSILYCGAVAACRVAHVKFPNNDGATRPKLAVPAWQCRIERRIGEARALIGKLICFREGNTRPRVMRFVRRAFSGTDISFRDYLARVTERIDSLKQKICAWASRIRRYKRRVERCTQNRTFQSDERWVYRAWERPDQGVTDTRLPDDSAMYSFWRNIWSVPVSHTEGDWTREVEQACDPIPEMGAIVISPQDVARAVRPLPNWKSPGPDGLHNFWIKWFQRSHARLASQFQSALESGSLPQFLTTGITHLLHKSGSAAEPKNYRPITCLPTVYKVLTSILRAKINQHIDSNSIMSASQNGCRNGSRGTKELLLIDMAISQQVRRSRKNLSTCWIDYKKAYDSVPHTWLMRVLELYKIDATLRTFLMSCMGHWRTVLRYPGCRQIQGNSEPIRIERGIFQGDSLSPLWFCLALNPLSTLLERSGLGYLLRRDGQVISHLLYMDDLKLFAPNNFQLMKLLKVTETFSSAIRMEFGVDKCAVMHVKRGEIMESEGTQLSDSIHLRSLSSTETYKYLGMSEALGINIADMKQSLRERFFGRLNKVLGSLLSGGNKVRAFNGWVMPVLMYSFGILKWTQTELDALDRRVRTLLTANRMHHPRSSVMRLYIPRKCGGRGFLNAKTLHNREVCSLREYFLEADGEMHRDVVSVDKGLTPLSLANENWRKPKVLDTNDRKVEWQSKELHGRFYRALHGPDVDFLPSVSWLRFGDLFGETEGFICAIMDEVMMTNNYRKYIVKDGTVDICRACHRPGESIRHIISGCSSLANGEYLHRHNLVARIIHQQLALKYNLVESEVPYYKYAPDPVLDNGHITLYWDRPITTDRTVVANRPDIVVIDRLERRTMIVDITIPHDENLVKAEKDKQFKYLDLAREVVDMWDVGTAVIVPIVVSANGLIAKSLDQHLRRLSLGSWIKGLIQKAVLLDTARIVRRFLSQEP

SEQ ID NO: 13527 - protein, 1198 aa, Xestia xanthographa
MLTRSAAARRARLPPPDSSLSSASPPPEPSPIVSAVTPAVAVASSSSDEYFSPPTTPPPARRRGGRRPPDGLGPRGPPASDRVPAPGGSVQRMRWTQSINANVMRAYYGATEGGNNLTAYRVRMLSLFQVLEPAVNVSAQRLSDQVRVIQRNRMLDDTVLDRLRTEIQSNHVIATPSQAVVPPQSSIIPNCDNDVSNDMVTNVSTQCNVEMRSALEGAIREYRFMQPDLRPRIPRLPMHNKNRALVAVLDSQLSNYFDNCEDLTDVHSILYCAAVATCRVAHVKFPSDRATRPKPAVPAWQYRIERRIGGARALIGKLVCFREGITRPRVMRFVRQAFSGTDISPRDYMSRVTERIDFLKQKVYAWANRIRRYKRRVDRYTQNRTFQKDERWVYRAWERPDQGVADTHLPDDDAMCSFWRSIWSVPVSHAEGEWTRVIERACDPISEMGAITISPQDVARAVRPLPNWKSPGPDGLHNFWIKWFTRSHARLATLFQSALESGSLPEFLTTGITHLLHKSGSTAEPKNYRPITCLPTVYKVLTSILRTKISKHIDDNSVMSASQNGCRNGSRGTKELLLIDMAISHQVRRSRKDLSTCWIDYKKAYDSVPHTWLMRVLQLYKVDATLRTFLMSCMGQWRTVLHYPGCRQIQRNSEPIRIERGIFQGDSLSPLWFCLALNPLSTLLEDSGLGYRLRKDGQVISHLLYMDDLKLFAPNDLRLMELLKVTETFSNAIRMEFGVDKCAVMHVKRGEIVESVGTQLSDSITLRSLSATETYKYLGMSEALGVNVADMKQSLKERFFGRLKKVLNSLLSGGNKVRAFNGWVMPVLMYSFGILKWTQTELDALDTKVRKLLTAYRMHHPRSSVMRLYIPRKCGGRGFLNAKTLHNREICSLREYFLGTDVGMHRDVVTMDKGLTPLSLAKENWRKPPVLDTNDRREVWQSKELHGRFFRALHGPDVDLSASVAWLRSGDLFGETEGFVCAIMDEVMMTNNYRRFIVKDGTVDICRACHRPGESIRHIISGCSRLANGEYLHRHNLVARIIHQQLALKYNLVESEVPYYRYVPDPVLDNGCITLYWDQSIITDRTIVANKPDIVVVDRSERRAMIVDITVPHDENLVKAEKDKQIKYLDLAREVVDMWEVDSAIIVPIVVSAHGLIAKSLDQYLRRLSLGSWIKGLIQKAVLLDTARIVRRFLSQEP

SEQ ID NO: 13528 - protein, 1198 aa, Xestia xanthographa
MLTRSAAARRARLPPPDSSLSSASPPPEPSPIVSAVTPAVAVASSSSDEYFSPPTTPPPARRRGGRRPPDGLGPRGPPASDRVPAPGGSVQRMRWTQSINENVMRAYYGATEGGNNLTAYRVRMLSLFQVLEPAVNVSAQRLSDQVRVIQRNRMLDDTVLDRLRTEIQSNHVIATPSQAVVPPQSSIIPNCDNDVSNDMVTNVSTQCNVEMRSALEGAIREYRFMQPDLRPRIPRLPMHNKNRALVAVLDSQLSNYFDNCEDLTDVHSILYCAAVAACRVAHVKFPSDRATRPKPAVPAWQYRIERRIGGARALIGKLVCFREGNTRPRVMRFVRQAFSGTDISPRDYMSRVTERIDFLKQKVYAWANRIRRYKRRVDRYTQNRTFQKDERWVYRAWERPDQGVADTHLPDDDAMCSFWRSIWSVPVSHAEGEWTRVIERACDPISEMGAITISPQDVARAVRPLPNWKSPGPDGLHNFWIKWFTRSHARLATLFQSALESGSLPEFLTTGITHLLHKSGSTAEPKNYRPITCLPTVYKVLTSILRTKISKHIDDNSVMSASQNGCRNGSRGTKELLLSDMAISHQVRRSRKDLSTCWIDYKKAYDSVPHTWLMRVLELYKVDATLRTFLMSCMGQWRTVLRYPGCQQIQRNSEPIRIERGIFQGDSLSPLWFCLALNPLSTLLEDSGLGYRLRKDGQVISHLLYMDDLKLFAPNNLRLMELLKVTETFSNAIRMEFGVDKCAVMHVKRGEIVESVGTQLSDSITLRSLSATETYKYLGMSEALGVNVADMKQSLKERFFGRLKKVLNSLLSGGNKVRAFNGWVMPVLMYSFGILKWTQTELDALDTKVRKLLTAYRMHHPRSSVMRLYIPRKCGGRGFLNAKTLHNREICSLREYFLGTDVGMHRDVVTMDKGLTPLSLAKENWRKPPVLDTNDRREVWQSKELHGRFFRALHGPDVDLSASVAWLRSGDLFGETEGFVCAIMDEVMMTNNYRRFIVKDGTVDLCRACHRPGESIRHIISGCSRLANGEYLHRHNLVARIIHQQLALKYNLVESEVPYYRYVPDPVLDNGCITLYWDQSIITDRTIVANKPDIVVVDRSERRAMIVDITVPHDENLVKAEKDKQIKYLDLAREVVDMWEVDSAIIVPIVVSAHGLIAKSLDQYLRRLSLGSWIKGLIQKAVLLDTARIVRRFLSLEP

SEQ ID NO: 13529 - protein, 1182 aa, Xestia xanthographa
MDCVKDDMGRKKVSDEIIIIIIIEFFSPPSTPPPPPSRGRRRGRGRPPAGLGPRGQQAPSRVPAAGGNVSRMRWTQSINENVMRAYYGATEGGSNLTAYRSRMLSLFQVLEPAVNVEAQRLSDQVRVIQRNHMLDDTVLDRLRSESRSNLVTPASPMIAVQQQNIPSAPPRSDYNGEEDRDEVISVSTQCNAQLRSALEGAFREYRSTPPELRPRLPRLPMHNKNKALMCALDSQLSNCFDSSKDLADTHSILYCGAVAAYRVAHVKFPNNDRATRPKLAVPAWQCRIERRIGEARALIGKLICFREGNTRPRVMRFVRRAFSGTDISFRDYLARVTERIDSLKQKICAWASRIRRYKRRVERYTQNRTFQSDERWVYRAWERPDQGVTDTRLPDDSAMYSFWRNIWSVPVSHTEGDWTREVEQACDPIPEMGAIIISPQDVARAVRPLPNWKSPGPDGLHNFWIKWFQRSHARLASQFQPALESGSLPQFLTTGITHLLHKSGSVAEPKNYRPITCLPTVYKVLTSILRAKINQHIDSNSIMSASQNGCRNGSRGTKELLLIDMAISQQVRRSRKNLSTCWIDYKKAYDSVPHTWLMRVLELYKIDATLRTFLMSCMGHWRTVLRYPGCRQIQGNSEPIRIERGIFQGDSLSPLWFCLALNPLSTLLERSGLGYLLRRDGQVISHLLYMDDLKLFAPNNLQLMKLLKVTETFSSAIRMEFGVDKCAVMHVKRGEIMESVGTQLSDSIHLRSLSSTETYKYLGMSEALGINTADMKQSLRERFFGRLNKVLGSLLSGGNKVRAFNGWVMPVLMYSFGILKWTQTELDALDRRVRTLLTANRMHHPRSSVMRLYIPRKCGGRGFLNAKTLHNREVCSLREYFLEADGEMHRDVVSVDKGLTPFSLANENWRKPKVLDTNDRKVEWQGKELHGRFYRALHGPDVDFLPSVSWLRFGDLFGETEGFICAIMDEVMMTNNYRKYIVKDGTVDICRACHRPGESIRHIISGCSSLANGEYLHRHNLVARIIHQQLALKYNFVESEVPYYKYAPDPVLDNGHITLYWDRPITTDRTVVANRPDIVVIDRLERRTMIVDITIPHDENLVKAEKDKQFKYLDLAREVVDMWDVGTAVIVPIVVSANGLIAKSLDQHLRRLSLGSWIKGLIQKAVLLDTARIVRRFLSQEP

SEQ ID NO: 13530 - protein, 1196 aa, Xestia xanthographa
MLTRSAAARRARLPPPDSSLSSASPPPESSPIVNAVTPAVAVASSSSDEYFSPPTTPPPARRRGGRRPPDGLGPRGPPASNRVPAPGGSVQRMRWTQSINENVMRAYYGATEGGNNLTAYRVRMLSLFQVLEPAVNVSAQRLSDQVRVIQRNRMLDDTVLDRLRTEIQSSHVIATPPPSQAVVPPIPNCDNDVSNDMVTNVSTQCNVEMRSALEGAIREYRFMQPDLRPRIPRLPMHNKNRALVAVLDSQLSNYFDNCEDLTDVHSILYCAAVAACRVAHVKFPSDRATRLKPAVPAWQYRIERRIGGARALIGKLVCFREGNTRPRVMRFVRQAFSGTDISPRDYMSRVTERIDFLKQKVYAWANRIRRYKRRVDRYTQNRTFQKDERWVYRAWERPDQGVADTHLPDDDAMCSFWRSIWSVPVSHAEGEWTRVIERACDPVSDMGAITISRQDVARAVRPLPNWKSPGPDGLHNFWIKWFTRSHARLATLFQSALESGSLPEFLTTGITHLLHKSGSTAEPKNYRPITCLPTVYKVLTSILRTKISKHIDDNFVMSASQNGCRNGSRGTKELLLIDMAISHQVRRFQKDLSTCWIDYKKAYDSVPHTWLMRVLELYKVDATLRTFLMSCMGQWRTVLRYPGCRQIQRNSEPIRIERGIFQGDSLSPLWFCLALNPLSTLLEDSGLGYRLRKDGQVISHLLYMDDLKLFAPNDLRLMELLKVTETFSSAIRMEFGVDKCAVMHVKRGEIVESVGTQLSDSITLRSLSATETYKYLGMSEALGVNVTDMKQSLKERFFGRLKKVLNSLLSGGNKVRAFNGWVMPVLMYSFGILKWTQTELDALDTKVRKLLTAYRMHHPRSSVMRLYIPRKCGGRGFLNAKTLHNREICSLREYFLGTDVGMHRDVVTMDKGLTPLSLAKENWRKPPVLDTNDRREVWQSKELHGRFFRALHGPDVDLSASVAWLRSGDLFGETEGFVCAIMDEVMMTNNYRRFIVKDGTVDICRACHRPGESIRHIISGCSRLANGEYLHRHNLVARIIHQQLALKYNLVESEVPYYRYVPDPVLDNGCITLYWDQSIITDRTIVANKPDIVVVDRSERRAMIVDITVPHDENLVKAEKDKQIKYLDLAREVVDMWEVDSAIIVPIVVSAHGLIAKSLDQYLRRLSLGSWIKGLIQKAVLLDTARIVRRFLSLEP

SEQ ID NO: 13531 - protein, 1206 aa, Cosmia trapezina
MMQTRAKTRNQAHPPSPDSSLNSASQPPPVRASTVSAVSPVAAIASSSSDEFFSPPSSPTPPRRRGRGRPPAGLGPRGQPAPNRVPAAVGNVSRMRWTQSINENVMRAYYGATEGGINLTAYRGRMLSLFQVLEPAVNVSAQRLSDQVRVIQHNHRLDNATLDRLRSEMQSSSASNPPPSQNVMHVPAEIPLRANQRDEEENARAISADNLCNVEIRSALDDAIREYRFTSPDLRPRLPRLPMNKKNRGLVCALDALLPNFIESSADLCDTHSILYCTAVAACRVACVKFPNTDRATRPKPAAPAWQCRIERRINEARVLIGKLICFREGNTRPRVMRFVRRAFSGTNISPQEYVSRVTERIDFLKQKVYAWANRIRRYRRRVDRYSQNRMFQSDERWVYRAWERPIPTQGVTDVRPPDNETMSAFWRSIWSVPVSHTEGDWMRIVEQACDSIPNMDAVTISPLDEACAVRPLPNWKSPGPDGLHNFWIKWLQRSHACLASQFQSSLETGSLPLLFTTGVTHLLHKSGSTAEPKNYRPITCLPTVYKVLTSILRAKIAHHIYNNSIMSVSQNGCRNGSRGTKELLLIDMTISQQVRRSRKDLSTCWIDYKKAYDSVPHTWLIRVLELYKIDATLRTFLMSCMGQWKTVLLYPGCRRIPGIDEPIRIERGIFQGDSLSPLWFCLALNPLSTLLEDSGLGYRLRRGGQVISHLLYMDDLKLFAPNNLRLMELLKVTENFSSAIRMEFGVDKCAVMHVKRGEIMESVGTQLSDSIHLRSLSSTETYKYLGMSEALGINVADMKQSLKERFFGRLKKVFNSLLSGGNKVRAFNGWVMPVLMYSFGVLKWTQTELDALDRRVRTLLTAYRMHHPRSSTMRLYIPRKCGGRGFLNAKTLHNREICSLREYFLEADVGMHRDVVAVDKGLTPLSLAKENWRKPAVLDTNDRREVWQGKELHGRFFRALHGPDVDFLASVSWLRFGDLFGETEGFVCAIMDEVIMTNNYRKYIVKDGTVDICRACHRPGESIRHIVSGCSRLANGEYLHRHNLVARIIHQQLALQYNLVESEVPYYRYVPDPVLENGQATLYWDRSIITDRTIVANKPDIVVIDRRERRAIIVDIAVPHDENLVKAEKDKKIKYLDLAHEVVDMWDVDSAIIVPIIVTVNGLIAQSLDQHLRRLSLRGWIKGLIQKAVLLDTARIVRRFLSLEP

SEQ ID NO: 13532 - protein, 1201 aa, Cosmia trapezina
MLTRSATRKARLPPPDSSLSSASPPPVPSLTVSAVSTPAAVVASSSSDEYFSPPTTPPPARRRGGRRPPDGLGPRGPPASDRVPAPGESVQRMRWTRAINENVMRSYYGATEGGNNLTAYRVRMHSLFQVLEPALNVSAQRLSDQVRVIQRNHMLDDTVLDRLRNEMQSSRVIAPLSQTIVAPPPPPQCNTTQADEGSDGTAANVSTQCNEELRSALEGAIQEYRFVSPELRPRLPRLPMHNKNRALVAALDSQLSNYFDDCEDLTDTHSILYCAAVAACRVAHVKFANDSRATRPKPAVPAWQCRIERRIGGARALIGKLICFREGNTRPRVMRFVRRAFSGTDVSPQDYMSRVTERIDFLRQKVYAWANRIRRYKRRVDRYTQNRTFQSDERWVYRGWERPDQGVTDTRLPDDDAMCSFWRSIWSVPVSHTEGDWAREVRRACDPIPEMGAITICPQDVARAVRPLPNWKSPGPDGLHNFWIKWFLGSHARLAAQYQSALQSGSLPQFLTTGITHLLHKSGSTTEPKNYRPITCLPTVYKVLTSILRAKINEHIDTNSIMSASQNGSRNGSRGTKELLLIDMAISQQVRRSRRDLSTCWIDYKKAYDSVPHTWLMRVLELYKVDATLRTFLMSCMGQWRTVLRYPGCRNIQRNSEPIRIERGIFQGDSLSPLWFCLALNPLSTLLEDSGLGYRLRRGGQVISHLLYMDDLKLFAPSNLQLMELLKVTETFSSAIRMEFGVDKCAVMHVKRGEIVESVGTQLPDSINLRTLSAAETYKYLGMSEALGINVADMKQSLKERFFGRLKKVFNSLLSGGNKVRAFNGWVMPVLMYSFGILKWTQTELDALDRRVRTLLTAYRMHHPRSSVMRLYIPRKCGGRGFLNAKTLHNREICSLREYFLETDVGMHRDVVAVDKGLTPLSLAKENWRKPVVLDANDRMEVWQSKELHGRFLRALHGPDVNLLASVAWLRSGDLFGETEGFVCAIMDEVIMTNNYRRFIVKDGTVDICRACHRPGESIRHIISGCSRLANEEYLHRHNLVARIIHQQLALKYSLVESEVPYYRYVPDPVLENGHITLYWDRSIITDRTIFANKPDIVVVDRTERRAMIVDITVPHDGNLVKAEKDKQIKYIDLAREVVDMWDVDSAVIVPIVVSANGLIAKSLDQHLRRLSLGSWIKGLIQKAVLLDTARIVRRFLSLEP

SEQ ID NO: 13533 - protein, 1205 aa, Cosmia trapezina
MLTRSRAQHLRNTHPTSSGSSLSSASQLPEPAPDVSQVIPAAAVASSSSDEYFSPPTTPPPVRRRGRGRPPASLGPRGPTASDRVPAPGGSVQRMRWTQTVNENVMRAYFGATEGGSNLTAYRGRMFSLFQVLEPAVNVSAQRLSDQVRVIQRNHMLDDVVLDRLRLESRNSRVTSDSPMVAVQLQNLPSASPRPDRVGEEDDSGAISVSSQCNVQLRSALEDAFREYRSTPPGLRPRLPRLPMHKKNKALVCALDSQLSNCFDGSKDLADTHSILYCAAVAACRVAHVKFHNNDRVTRPKPAVPTWQCRIQRRIGEARALIGKLICFREGNTRPRVMRFVRRAFSGMDISPRDYLTCVTERIDFLKQKICAWANRIRRYRRRVERYTQNRTFQSDERWVYRAWERPDQGVADTQLPDDDAMCSFWRSIWSVPVSHTEGDWTREVERACDHIPQMGALTISPQDVARAVRPLPNWKSPGPDGLHNFWIKWFQRSHARLASQFQSALQSGSLPQFLTTGITHLLHKSGSTAEPRNYRPITCLPTVYKVLTSILRAKINKHIDTNSIMSASQNGCGNGSRGTKELLLIDMTISQQVRRSRKDLSTCWIDYKKAYDSVPHTWLMRVLELYKIDATLRTFLMSCMGQWRTVLRYPGCRNIQRNSEPIRIERGIFQGDSLSPLWFCLALNPLSTLLEDSGLGYRLRRGGQVISHLLYMDDLKLFAPNNLQLMELLKVTETFSSAIRMEFGVDKCAVMHVKRGEIVESVRTQLSDSIHLRSLSSLETYKYLGMSEALGINAADMKQSLRERFFGRLNKVLNSLLSGGNKVRAFNGWVMPVLMYSFGILKWTQTELDALDRRVRTLLTANRMHHPRSSVMRLYIPRKCGGRGFLNAKTLHNREVCSLREYFLEADVGMHREVVSVDKGLTPLSLANENWRKPIVLDTNDRREVWQSKELHGRFYRVLHGPDVDFLASVSWLRFGDLFGETEGFVFAIMDEVMMTNNYRKYIVKDGTVDICRACHRPGESIRHIISGCSRLANGDYLHRHNLVARIIHQQLALKYSLVESEVPYYRYVPDPVLENGNITLYWDRSIITDRTIVANKPDIVVIDRLERRTVIVDIAVPHDENLVKAEKDKQIKYLDLAREVVDMWDVDTAIIVPIVVTANGIIAKSLDQHLRRLSLGGWIKGLIQKAVLLDTARIVRRFLSQQP

SEQ ID NO: 13534 - protein, 1196 aa, Mamestra brassicae
MVRVYLGPSDKDAPTDPRLESQPPGPAPAVSPEIPVAAVASSSSDEYFSPPTTPPPARRRGRGRPPTSLGPRGPPASDRVPAIGGSVQRMRWTQTINENVMRSYFGATEGGTNLTAYRGRMLSLFQVLEPAVNVSAQRLSDQVRVILRNRMLDDAVLDRLRLESRSGRVSPASPPAAVPIQSSISPRSNNVGEDDDDGAISVSTQCNERLRSALEDAFREYRSTPPELRPRLPRLPMHNKNRALVCALDSQLTNCFDSSEDLADTHSILYCAAAAACRVAHVKFHKSDRATRPAVPAWQCRIERRIGEARALIGKLICFREGNTRRRVMRFVRRAFSGTDTSPRDYLTRVTERIDFLKQKIYAWANRIRRYKRRVERYTQNRTFQSNERWVYRAWERPDQGVTDTRLPDDDVMCSFWRNIWSVPVSHTEGDWIREVERACDPILEMGATTISPQDVARAVRPLPNWKSPGPDGLHNFWIKWFTGSHARLASQFQSALESGSLPQFLTTGITHLLHKSGSTAEPKNYRPITCLPTVYKVLTSILRAKINHHIESNSIMSASQNGCRNGSRGTKELLLMDIAISQQVRRSRKDLSTCWIDYKKAYDSVPHTWLMRVLELYKVDAVLRTFLMSCMGQWRTVLRYPGCRQIQVNGDPIRIERGIFQGDSLSPLWFCLALNPLSTLLEGSGQGYRLRRGGQVISHLLYMDDLKLFAPNNLQLMELLKVTETFSSAISMEFGVDKCAVMHVKRGEIMESAGTQLSDSIHLRSLSSTETYKYLGMSEALGINANDMKQSLKERFFGRLNKVLNSLLSGGNKVRAFNGWVMPVLMYSFGILKWTQTELDALDRRVRSLLTANRMHHPRSSVMRLYIPRKCGGRGFLNAKTLHNREICSLREFFLEADVGMHRDVVAVDKGLTALSLANENWRKPVVLDTNDRRKVWQSKELHGRFYRVLHGPDVDFLASVAWLRFGDLFGETEGFVCAIMDEVMMTNNYRKYIVKDGTVDICRACHRPGESIRHIISGCSSLANGDYLHRHNLVARIIHQQLALKYNLVESEVPYYRYVPDPVLENGNCTLYWDRSIITDRTIVANKPDIVVIDRLERRAMIVDIAVPHDENLVKTEKDKQTKYLDLAREVVDMWDVNTAVIVPIVVTANGIIAKSLDQHLKRLSLGSWIKGLIQKAVLLDTARIVRRFLSQGP

SEQ ID NO: 13535 - protein, 1200 aa, Mamestra brassicae
MLTRSRARAQTAQPTSSGSSLSSASQPPGPAPAVSPEIPVAAVASSSSDEYFSPPTTPPPARRRGRGRPPTSLGPRGPPASDRVPAIGGSVQRMRWTQTINENVMRSYYGATEGGTNLTAYRGRMLSLFQVLEPAVNVSAQRLSDQVRVILRNRMLDDAVLDRLRLESRSGRVSPASPPAAVQIQSSISPRSNNVGEDDDDGAISVSTQCNERLRSALEDAFREYRSTPPELRPRLPRLPMHNKNRALVCALDSQLTNCFDSSEDLADTHSILYCAAAAACRVAHVKFLNSDRATRPAVPAWQCRIERRIGEARALIGKLICFREGNTRRRVMRFVRRAFSGTDTSPRDYLTRVTERIDFLKQKIYAWANRIRRYKRRVERYTQNRTFQSNERWVYRAWERPDQGVTDTRLPDDDVMCSFWRNIWSVPVGHTEGDWIREVERACDPILEMGATTISPQDVARAVRPLPNWKSPGPDGLHNFWIKWFTGSHARLASQFQSALESGSLPQFLTTGITHLLHKSGSTAEPKNYRPITCLPTVYKVLTSILRAKINHHIESNSIMSASQNGCRNGSRGTKELLLMDIAISQQVRRSRKDLSTCWIDYKKAYDSVPHTWLMRVLELYKVDAVLRTFLMSCMGQWRTVLRYPGCRQIQVNGDPIRIERGIFQGDSLNPLWFCLALNPLSTLLEGSGQGYRLRRGGQVISHLLYMDDLKLFAPNNLQLMELLKVTETFSSAISMEFGVDKCAVMHVKRGEIMESVGTQLSDSIHLRSLSSTETYKYLGMSEALGINANDMKQSLKERFFGRLNKVLNSLLSGGNKVRAFNGWVMPVLMYSFGILKWTQTELDALDRRVRSLLTANRMHHPRSSVMRLYIPRKCGGRGFLNAKTLHNREICSLREFFLEADVGMHRDVVAVDKGLTALSLANENWRKPVVLDTNDRRKVWQSKELHGRFYRVLHGPDVDFLASVAWLRFGDLFGETEGFVCAIMDEVMMTNNYRKYIVKDGTVDICRACHRPGESIRHIISGCPSLANGDYLHRHNLVARIIHQQLALKYNLVESEVPYYRYVPDPVLENGNCTLYWDRSIITDRTIVANKPDIVVIDRLERRAMIVDIAVPHDENLVKTEKDKQTKYLDLAREVVDMWDVNTAVIVPIVVTANGIIAKSLDQHLKRLSLGSWIKGLIQKAVLLDTARIVRRFLSQGP

SEQ ID NO: 13536 - protein, 1196 aa, Mamestra brassicae
MLTRSRARHLATHPSPSASSLSSASPPPEPSPTVSAVTPAVAVASSSNDEYFSPPTTPPPARRRRGRRPPDGLGPRGPPASDRVPAPGGSVQRMRWTQSINENVMRSYFGATEGGTNLTAYRGRMLSLFQVLEPAVNVSAQRLSDQVRVIRNRMLDDSVLDRLRMEMCGHVITPPSQTVAPPQSQISSHADEESNDRVTNVSTQCNEELRSALECAIREYRYVPNELRPRLPRLPMHNKNRALVAALDSQLSNYFDDCEDLTDTHSIMYCAAVAACRVAHVKMTNDRVTRPKPAVPAWQCRIERRIGGARALIGKLICFREGNTRPRVMRFVRRAFSGTDISPRDYMSRVTERIDFLKQKVYAWANRIRRYRRRVERYTQNRTFRSNERWVYRVWEQPDQGVTDTRLPDDDAMCSFWRNIWSVPVSHTEGGWIREVERACDPLPEMGAITISPQDVARAVRPLPNWKSPGPDGLHNFWIKWLQRSHARLASQYQTALESGSLPEFLTTGVTHLLHKSGSTAEPKNYRPITCLPTVYKVLTSILRAKINNHINSNNIMSVSQNGCRNGSRGTKELLLIDMAISQQVRRSRKDLSTCWIGYKKAYDSVPHTWLMRVLELYKIDTMLRTFLMSCMGQWRTVLRYPGCRNIQRNSEPVRIERGIFQGDSLSPLWFYLALNPLSTLLENSGLGYRLKRGGQVISHLLYMDDLKLFAPSNLQLMELLKVTETFSSAIRMEFGVDKCAVMHVKRGEIMESVGTQLSDSINLRSLSSTETYKYLGMSEALGINVTDMKQSLKERFFGRLKKVFNSLLSGGNKVRAFNGWVMPVLMHSFGVLKWTQTELDALDRRVRTLLTAYRMHHPRSSVMRLYIPRKCGGRGFLNAKTLHNREICSLREYFLAVDVGMHRDVVAVDKGLTPLSLANENWRKPAVLDTNDRRAVWQSKELHGRYFRALHGPDVDQLASVAWLRFGDLFGETEGFVCAIMDEVIMTNNYRRFIVKDGTVDICRACHRPGESIRHIISGCSRLANGEYLHRHNLVARIIHQQLALKYSLVELEVPYYRYAPDPVLDNGNITLYWDRSIITDRTIVANKPDIVVVDRIERRAMIVDITVPHDENLVKAEKDKQIKYIDLAREVVDMWDVDSAIIVPIVVSANGLIATSLDQHLRRLSLGSWIKGLIQKAVLLDTARIVRRFLSLEP

SEQ ID NO: 13537 - protein, 1200 aa, Mamestra brassicae
MLTRSRARAQTAQPTSSGSSLSSASQPPGPAPAVSPEIPVAAVASSSSDEYFSPPTTPPPARRRGRGRPPTSLGPRGPPASDRVPAIGGSVQRMRWTQTINENVMRSYYGATEGGTNLTAYRGRMLSLFQVLEPAVNVSAQRLSDQVRVILRNRMLDDAVLDRLRLESRSGRVSPASPPAAVEIQSSISPRPNNVGEDDDDGAISVSTQCNERLRSALEDAFREYRSTPPELRPRLPRLPMHNKNRALVCALDSQLTNCFDSSEDLADTHSILYCAAAAACRVAHVKFLNSDRATRPAVPAWQCRIERRIGEARALIGKLICFREGNTRRRVMRFVRRAFSGTDTSPRDYLTRVTERIDFLKQKIYAWANRIRRYKRRVERYTQNRTFQSNERWVYRAWERPDQGVTDTRLPDDDVMCSFWRNIWSVPVSHTEGDWIREVERACDPILEMGATTISPQDVARAVRPLPNWKSPGPDGLHNFWIKWFTGSHARLASQFQSALESGSLPQFLTTGITHLLHKSGSTAEPKNYRPITCLPTVYKVLTSILRAKINHHIESNSIMSASQNGCRNGSRGTKELLLMDIAISQQVRRSRKDLSTCWIDYKKAYDSVPHTWLMRVLELYKVDAVLRTFLMSCMGQWRTVLRYPGCRQIQVNGDPIRIERGIFQGDSLSPLWFCLALNPLSTLLEGSGQGYRLRRGGQVISHLLYMDDLKLFAPNNLQLMELLKVTETFSSAISMEFGVDKCAVMHVKRGEIMESVGTQLSDSIHLRSLSSTETYKYLGMSEALGINANDMKQSLKERFFGRLNKVLNSLLSGGNKVRAFNGWVMPVLMYSFGILKWTQTELDALDRRVRSLLTANRMHHPRSSVMRLYIPRKCGGRGFLNAKTLHNREICSLREFFLEADVGMHRDVVAVDKGLTALSLANENWRKPVVLDTNDRREVWQSKELHGRFYRVLHGPDVDFLASVAWLRFGDLLGETEGFVCAIMDEVMMTNNYRKYIVKDGTVDICRACHRPGESIRHIISGCSSLANGDYLHRHNLVARIIHQQLALKYNLVESEVPYYRYVPDPVLENGNCTLYWDRSIITDRTIVANKPDIVVIDRLERRAMIVDIAVPHDENLVKTEKDKQTKYLDLAREVVDMWDVNTAVIVPIVVTANGIIAKSLDQHLKRLSLGSWIKGLIQKAVLLDTARIVRRFLSQGP

SEQ ID NO: 13538 - protein, 1198 aa, Noctua fimbriata
MLTRSAARRARLSPPDPSLSSASPPPESSPVVSAVTPAVAVASSSSDEYFSPPTTPPPVRRRGGRRPPDGLGPRGPPASDRVPAPGGSVQRMRWTQSINANVMRAYYGATEGGNNLTAYRVRMLSLFQVIEPAVNVSAQRLSDQVRVIQRNRMLDDTVLDRLRTEMQSSHVIATPPPQAVVPPQSTIIPNRDNDVSNDIVTNVSTQCNEEMRSALEGAIREYRFMQPDLRPRIPRLPMHNKNRALVAVLDSQLSNYFDNCEDLTDAHSILYCAAVAACRVAHVKFSDDRATRPKPAVPPWQYRIERRIGGARALIGKLICFREGNTRPRVMRFVRRAFSGTDISPRDYMSRITERIDFLKQKVYAWANRIRRYKRRVDRYTQNRTFQRDERWVYRAWERPDQGVADTRLPDDDAMCSFWRSIWSVPVSHTEGEWTQGVERACDLVPEMGAITISPQDVVRAVRPLPNWKSPGPDGLQNFWIKWFTRSHARLAILFQSALESGSLPEFLTTGITHLLHKSGSTAEPKNYRPVTCLPTVYKVLTSILRAKINKHIDDNSIMSASQNGCRNGSRGTKELLLIDMAISQQVRRSRSDLSTCWIDYKKAYDSVPHTWLMRVLELYKVDATLRTFLMSCMGQWRTVLRYPGYRQIQRNSEPIRIERGIFQGDSLSPLWFCLALNPLSTLLEDSGLGYRLRRGGQVISHLLYMDDLKLFAPNDLQLMELLKVTETFSSAIRMEFGVDKCAVMHVKRGEIVESVGTQLSDSINLRSLSATETYKYLGMSEALGINVADMKQSLKERFFGRLKKVFNSLLSGGNKVRAFNGWVMPVLMYSFGILKWTQTELDALDRRVRTLLTAYRMHHPRSSVMRLYIPRKCGGRGFLNAKTLHNREIYSLREYFLETDVGMHRDVVAVDKGLTPLSLAKENWRKPLVLDTNDRMEVWQSKELHGRFFRALHGPDVDLSASVAWLRCGDLFGETEGFVCAIMDEVMMTNNYRRFIVKDGTVDICRACHRPGESIRHIISGCSRLANGEYLHRHNLVARIIHQQLALKYNLVESEVPYYKYVPDPVLENGSITLYWDQSIITDRTIVANKPDIVVVDRSERRTMIVDITVPHDENLVKAEKDKKIKYLDLAREVVDMWDVDSAIIVPIVVSAHGLIAKSLDQYLRRLSLGSWIKGLIQKAVLLDTARIVRRFLSLEP

SEQ ID NO: 13539 - protein, 1198 aa, Noctua fimbriata
MLTRSAARRARLSPPDPSLSSASPPPESSPVVSAVTPAVAVASSSSDEYFSPPTTPPPVRRWGGRRPPDGLGPRGPPASDRVPAPGGSVQRMRWTQSINANVMRAYYGATEGGNNLTAYRVRMLSLFQVLEPAVNVSAQRLSDQVRVIQRNRMLDDTVLDRLRTEMQSSHVIATPPPQAVVPPQSTIIPNRDNDVSNDIVTNVSTQCSEEMRSALEGAIREYRFMQPDLRPRIPRLPMHNKNRALVAVLDSQLSNYFDNCEDLTDAHSILYCAAVAACRVAHVKFSDDRATRPKPAVPPWQYRIERRIGGATALIGKLICFREGNTRPRVMRFVRRAFSGTDISPRDYMSRITERIDFLKQKVYAWANRIRRYKRRVDRYTQNRTFQRDERWVYRAWERPDQGVADTRLPDDDAMCSFWRSIWSVPVSHTEGEWTQGVERACDLVPEMGAITISPQDVVRAVRPLPNWKSPGPDGLNNFWIKWFTRSHARLAILFQSALESGSLPEFLTTGITHLLHKSGSTAEPKNYRPITCLPTVYKVLTSILRAKINKHIDDNSIMSASQNGCRNGSRGTKELLLIDMAISQQVRRSRSDLSTCWIDYKKAYDSVPHTWLMRVLELYKVDATLRTFLMSCMGQWRTVLRYPGCRQIQRNSEPIRIERGIFQGDSLSPLWFCLALNPLSTLLEDSGLGYRLRRGGQVISHLLYMDDLKLFAPNDLQLMELLKVTETFSSAIRMEFGVDKCAVMHVKRGEIVESVGTQLSDSINLRSLSATETYKYLGMSEALGINVADMKQSLKERFFGRLKKVFNSLLSGGNKVRAFNGWVMPVLMYSFGILKWTQTELDALDRRVRTLLTAYRMHHPRSSVMRLYIPRKCGGRGFLNAKTLHNREICSLREYFLETDVGMHRDVVAVDKGLTPLSLAKENWRKPVVFDTNYRMEVWQSKELHGRFFRALHGPDVDLSASVAWLRSGDLFGETEGFVCAIMDEVMMTNNYRRFIVKDGTVDICRACHRPGESIRHIISGCSRLANGEYLHRHNLVARIIHQQLALKYNLVELEVPYYKYVPDPVLENGSITLYWDQSIITDRTIVANKPDIVVVDRSERRTMIVDITVPHDENLVKAEKDKKIKYLDLAREVVDMWDVDSAIIVPIVVSAHGLIAKSLDQYLRRLSLGSWIKGLIQKAVLLDTARIVRRFLSLEP

SEQ ID NO: 13540 - protein, 1198 aa, Noctua fimbriata
MLTRSAARRARLSPPDPSLSSASPPPESSPVVSAVTPAVAVASSSSDEYFSPPTTPPPVRRRGGRRPPDGLGPRGPPASDRVPAPGGSVQRMRWTQSINANVMRAYYGATEGGNNLTAYRVRMLSLFQVLEPAVNVSAQRLSDQVRVIQRNRMLDDTVLDRLRTEMQSSHVIATPPPQAVVPPQSTIIPNRDNDVSNDIVTNVSTQCNEEMRSALEGAIREYRFMQPDLRPRIPRLPMHNKNRALVAVLDSQLSNYFDNCEDLTDAHSILYCAAVAACRVAHVKFSDDRATRPKPAVPPWQYRIERRIGGARALIGKLICFREGNTRPRVMRFVRRAFSGTDISPRDYMSRITERIDFLKQKVYAWANRIRRYKRRVDRYTQNRTFQRDERWVYRAWERPDQGVADTRLPDDDAMCSFWRSIWSVPVSHTEGEWTQGVERACDLVPEMGAITISPQDVVRAVRPLPNWKSPGPDGLHNFWIKWFTRSHARLAILFQSALESGSLPEFLTTGITHLLHKSGSTAEPKNYRPITCLPTVYKVLTSILRAKINKHIDDNSIMSASQNGCRNGSRGTKELLLIDMAISQQVRRSRSDLSTCWIDYKKAYDSVPHTWLMRVLELYKVNATLRTFLMSCMGQWRTVLRYPGCRQIQRNSEPIRIERGIFQGDSLSPLWFCLALNPLSTLLEDSGLGYRLRRGGQVISHLLYMDDLKLFAPNDLQLMELLKVTETFSSAIRMEFGVDKCAVMHVKRGEIVESVGIQLSDSINLRSLSATETYKYLGMSEALGINVADMKQSLKERFFGRLKKVFNSLLSGGNKVRAFNGWVMPVLMYSFGILKWTQTELDALDRRVRTLLTAYRMHHPRSSVMRLYIPRKCGGRGFLNAKTLHNREICSLREYFLETDVGMHRDVVAVDKGLTPLSLAKENWRKPLVPDTNDRMEVWQSKELHGRFFRALHGPDVDLSASVAWLRSGDLFGETEGFVCAIMDEVMMTNNYRRFIVKDGTVDICRACHRPGESIRHIISGCSRLANGEYLHRHNLVARIIHQQLALKYNLVESEVPYYKYVPDPVLENGSITLYWDQSIITDRTIVANKPDIVVVDRSERRTMIVDITVPHDENLVKAEKDKKIKYLDLAREVVDMWDVDSAIIVPIVVSAHGLIAKSLDQYLRRLSLGSWIKGLIQKAVLLDTARIVRRFLCLEP

SEQ ID NO: 13541 - protein, 1107 aa, Noctua fimbriata
MRWTQSINENVMRSYYGATEGGNNLTAYRVRMLSLFQVLEPAVNVSAQRLSDQVRVIQRNRMLDDTVLDRLRTEMQSSHVIATPPPQAVVPPQSTIIPNRDNDVSNDIVTNVSTQCNEEMRSALEGAIREYRFMQPDLRPRIPRLPMHNKNRALVAVLDSQLSNYFDNCEDLTDAHSILYCAAVAACRVAHVKFSNDRATRPKPAVPPWQYRIERRIGGARALIGKLICFREGNTRPRVMRFVRRAFSGTDISPRDYMSRITERIDFLKQKVYAWANRIRRYKRRVDRYTQNRTFQRDERWVYRAWERPDQGVADTRLPDDDAMCSFWRSIWSVPVSHTEGEWTQGVERACDLVPEMGAITISPQDVVRAVRPLPNWKSPGPDGLHNFWIKWFTRSHARLAILFQSALESGSLPEFLTTGITHLLHKSGSTAEPKNYRPITCLPTVYKVLTSILRAKINKHIDDNSIMSASQNGCRNGSRGTKELLLIDMAISQQVRRSRRDLSTCWIDYKKAYDSVPHTWLMRVLELYKVDATLRTFLMSCMGQWRTVLRYPGCRQIQRNSEPIRIERGIFQGDSLSPLWFCLALNPLSTLLEDSGLGYRLRRGGQVISHLLYMDDLKLFAPNDLQLMELLKVTETFSSAIRMEFGVDKCAVMHVKRGEIVESVGTQLSDSINLRSLSATETYKYLGMSEALGINVADMKQSLKERFFGRLKKVFNSLLSGGNKVRAFNGWVMPVLMYSFGILKWTQTELDALDRRVRTLLTAYRMHHPRSSIMRLYIPRKCGGRGFLNAKTLHNREICSLREYFLETDVGMHRDVVAVDKGLTPLSLAKENWRKPLVLDTNDRMEVWQSKELHGRFFRALHGPDVDLSASVAWLRSGDLFGETEGFVCAIMDEVMMTNNYRRFIVKDGTVDICRACHRPGESIRHIISGCSRLANGEYLHRHNLVARIIHQQLALKYNLVESEVPYYKYVPDPVLENGSITLYWDQSIITDRTIVANKPDIVVVDRSERRTMIVDITVPHDENLVKAEKDKKIKYLDLAREVVDMWDVDSAIIVPIVVSAHGLIAKSLDQYLRRLSLGSWIKALIQKAVLLDTARIVRRFLSLEP

SEQ ID NO: 13542 - protein, 1197 aa, Noctua fimbriata
MLTRAAAKRARLSPPDPSLSSASPPPESSPVVSAVTPAVAVASSSSDEYFSPPTTPPPVRRRGGRRPPDGLGPRGPPASDRVPAPGGSVQRMRWTQSINENVMRSYYGATEGGNNLTAYRVRMLSLFQVLEPAVNVSAQRLSDQVRVIQRNRMLDDTVLDRLRTETQSSHVITPSAQAVVLPQSSTIPNRDNDVSNDLVTNVSTQCNEEMRSALEGAIREYRFMQPDLRPRIPRLPMHNKNRALVAVLDSQLSNYFDNCEDLTDAHSILYCAAVAACRIAHVKFSDDRATRPKPAVPPWQYRIERRIGGARALIGKLICFREGNTRPRVMRFVRRAFSGTDISPRDYMSRITERIDFLKQKVYAWASRIRRYKRRVDRYTQNRTFQRDERWVYRTWERPDQGVADTRIPDDDAMCSFWRSIWSVPVSHTEGEWTREVERACDLVSEMGAITISPQDVVRAVRPLPNWKSPGPDGLHNFWIKWFTRSNARLAILFQSALESGSPPEFLTTGITHLLHKSGSTAEPKNYRPITCLPTVYKVLTSILRAKINKHIDDNSIMSASQNGCRKGSRGTKELLLIDMAISQQVRRSRRDLSTCWIDYKKAYDSVPHTWLMRVLELYKLDATLRTFLMSCMGQWRTVLRYPRCWQIQRNSEPIRIERGIFQGDSLSPLWFCLALNPLSTLLEDSGLGYQLRRGGQVISHLLYMDDLKLFAPNDLQLMELLKVTETFSSAIRMEFGVDKCAVMHVKRGEIVESVGTQLSDSIHLRSLSATETYKYLGMSEALGINVADMKQSLKERFFGRLKKVFNSLLSGGNKVRAFNGWVMPVLMYSFGILKWTQTELDALDRRVRTLLTAYRMHHPRSSVMRLYIPQKCGGRGFLNAKTLHNREICSLREYFLETDVGMHRDVVAMDKGLTPLSLAKENWRKPLVLDTNDRMEVWQSKELHGRFFRALHGPDVDLSASVAWLRSGDLFGETEGFVCAIMDEVMMTNNYRRFIVKDGTVDICRACHRPGESIRHIISGCSRLANGEYLHRHNLVARIIHQQLALKYNLVESEVPYYKYVPDPVLENGSITLYWDQSIITDRTIVANKPDIVVVDRSERRTMIVDITVPHDENLVKAEKDKKIKYFDLAREVVDMWDVDSAIIVPIVVSAHGLIAKSLDQYLRRLSLGSWIKGLIQKAVLLDTARIVRRFLSLEP

SEQ ID NO: 13543 - protein, 1198 aa, Noctua fimbriata
MLTRSAARRARLSPPDPSLSSASPPPESSPVVSAVTPAVAVASSSSDEYFSPPTTPPPVRRRGGRRPPDGLGPRGPPASDRVPAPGGSVQRMRWTQSINANFMRAYYGATEGGNNLTAYRVRMLSLFQVLEPAVNVSAQRLSDQVRVIQRNRMLDDTVLDRLRTEMQSSHVIATPPPQAVVPPQSTIIPNRDNDVSNDIVTNVSTQCNEEMRSALEGAIREYRFMQPDLRPRIPRLPMHNKNRALVAVLDSQLSNYFDNCEDLTDAHSILYCAAVAACRVAHVKFSDDRATRPKPAVPPWQYRIERRIGGARALIGKLICFREGNTRPRVMRFVRRAFSGTDISPRDYMSRITERIDFLKQKVYAWANRIRRYKRRVDRYTQNRTFQRDERWVYRAWERPDQGVADTRLPDDDAMCSFWRSIWSVPVSHTEGEWTQGVERACDLVPEMGAITISPQDVVRAVRPLPNWKSPGPDGLHNFWIKWFTRSHARLAILFQSALESGSLPEFLTTGITHLLHKSGSTAEPKNYRPITCLPTVYKVLTSILRAKINKHIDDNSIMSASQNGCRNGSRGTKELLLIDMAISQQVRRSRSDLSTCWIDYKKAYDSVPHTWLMRVLELYKVDATLRTFLMSCMGQWRTVLRYPGCRQIQRNSEPIRIERGIFQGDSLSPLWFCLALNPLSTLLEDSGLGYRLRRGGQVISHLLYMDDLKLFAPNDLQLMELLKVTETFSSAIRMKFGVDKCAVMHVKRGEIVESVGTQLSDSINLRSLSATETYKYLGMSEALGINVADMKQSLKERFFGRLKKVFNSLLSGGNKVRAFNGWVMPVLMYSFGILKWTQTELDALDRRVRTLLTAYRMHHPRSSVMRLYIPRKCGGRGFLNAKTLHNCEICSLREYFLETDVGMHRDVVAVDKGLTPLSLAKENWRKPLVPNTNDRMEVWQSKELHGRFFRALHGPDVDLSASVAWLRCGDLFGETEGFVCAIMDEVMMTNNYRRFIVKDGTVDICRACHRPGESIRHIISGCSRLANGEYLHRHNLVARIIHQQLALKYNLVESEVPYYKYVPDPVLENGSITLYWDQSIITDRTIVANKPDIVVVDRSERRTMIVDITVPHDENLVKAEKDKKIKYLDLAREVVDMWDVDSAIIVPIVVSAHGLIAKSLDQYLRRLSLGSWIKGLIQKAVLLDTARIVRRFLSLEP

SEQ ID NO: 13544 - protein, 975 aa, Atethmia centrago
MSPELRPRLPRLPMHKKNRALVAALDSQLSNYFDDCEDLTDTHSILYCAAVAVCRVAHVKFAKDSRTTRPKPTVPAWQCRIESRIGGARALIGKLICFREGNTRPRVMRFVRRAFSGTDIGPQDYMTRVTERIDFLKQKVYAWANRIRRYKRRVERYTQNRTFQSDERWVYRGWERPDQDVTDTRLPDDDVMCSFWRSIWSVPVSHTEGDWARKVERACDPIPEMGAITICPQDVARAVRPLPNWKSPGPDGLHNFWLKWFLRSHARLAAQYQTALESGSLPQFLTTGVTHLLHKSGSTAEPKNYRPITCLPTVYKLLTSILRAKINKHIDTNSIMSASQNGCRNGSRGTKELLLIDMTISQQVRRSRKDLSTCWIDYKKAYDSVPHTWLMRVLELYKVDATLRTFLISCMGQWRTVLRYPGCRNIQRNSEPIRIEWGIFQGDSLSPLWFCLALNPLSTLLEDSGLGYRMRRGGQVISHLLYMDDLKLFASNNLQLMELLKITESFSSAIRMEFGVDKCAVMHIKRGKIVESVGTQLSDSINLRTLSASETYKYLGMLEALGINVTDMKQSLKERFFGRLKKVFNSLLSGGNKVRAFNGWVMPVLMYSFGILKWTQTELDALDRRVRTLLTVYRMHHPRSSVMRLYIPRKCGGRGFLNAKILHNREVCSLREYFLEADVGMHRDVVAVDKGLTPLSLAKENWRKLVVLDTNDRREVWQSKELHGRFFRALHEPDVDFQASVAWLRFGDLFGETEGFVCAIMDEVIMTKNYRRFIVKDGTVDVCRACHRPGESIRHIISGCSRLANEEYLHRHNLVARIIHQQLALKYSLVESEVPYYRYVPDPVLDNGNITLYWDRSIITDRTIVANKPDIVVVDRTERRAMIVDITVPHDGNLVKAEKDKQIKYLDLAREVVDMWDVDSAIIVPIVVSANGLIAKSLDQHLKRLTLHGWIKGLIQKAVLLDTARIVRRFLSLEP

SEQ ID NO: 13545 - protein, 1201 aa, Mesoligia furuncula
MLTRLAARRARLLPPDSSLSSASPPPVPSPTVSAVMTPAAAVASSSSDEYFSPPTTPPPARRRRGRRPPDGLGLRGPPASDRVPAPGGSVQRMRWTQSINENVMRSYYGATEGGNILTAYRVRMLSLFQVLEPAVNVSAQRLSDQVRVIQRNHMLDDTVLDRLRSEMQSSHVIAPQSQTAVILPQPNISHADEGSNDTAINVSTQCNEELRSALEDAIQEYRFMSPELRPRLPRLPMHNKNRALVAALDSQLSKYFDTCEDLIDTHSILYCAAVAACRVAHVKFANDSRATRVTRPKQAVPAWQCRIERRIGGARTLIGKLICFREGNTRPRVMRFVRRAFSGTDISPQDYISCVTERIDFLKQKVYAWANRIRRYRRRVERYTQNRTFQSDERWVYRGWERPDQGVAETCLRDDDAMCSFWRNIWSVPVSHTEGDWAREVERACDPIPEMGAITICPQDVARAVRPLPNWKSPGPDGLHNFWIKWFPRSHALLASQFQTALKSGSLPQFLTTGITHLLHKSGSTAEPKNYRPITCLPTVYKVLTSILRTKINKHIDTNSIMSASQNGCRNGSRGTKELLLIDMAISQQVRRFRKDLSTCWIDYKKAYDSVPHTWLMRVLELYKVDTTLRTFLMSCMGQWRTVLRYPGCRNIQRNSEPIRIERGIFQGDSLSPLWFCLALNPLSTLLEDSGLGYRLRRGGQVISHLLYMDDLKLFAPNNLQLMELLKITETFSSAIRMEFGVDKCAVMHVKRGEIAESVGTQLSDSTNLRALSASETYKYLGMSEALGINVTDMKQSVKERFFGRLKKVLNSLLSGGNKVRAFNGWVMPVLMYSFGILKWTQTELDALDRRVRTLLTANQMHHPRSSVMRLYIPRKCGGRGFLNAKTLHNREICSLREYFLETDVGMHRDVVIVDKGLTPLSLAKENWRKPVVLDTNDRMEVWQSKELHGRFLRALRGPDVDLQASVAWLRFGNLFGETEGFVCAIMDEVMMTNNYRRFIVKDGTVDICRACHRPGESIRHIISGCSRLANGEYLHRHNLVARIIHQQLALKYNLVESEVPYYRYVPDPVLENGNITLYWDRSIITDRTIVANKPDIVVVDRSERRAMIVDITVPHDENLVKAEKDKQIKYLDLAREVVDMWDVDTAIIVPIVVTANGLIAKSLDQHLRRLSLGSWIKGLIQRAVLLDTARIVRRFLSLEP

SEQ ID NO: 13546 - protein, 1198 aa, Mesoligia furuncula
MLTRLAAKRARLLPPDSSLSSASPPPVPSPTVSAVMTPAAAVASSSSDEYFSPPTTPPPARRRRGRRPPDCLGLRGPPASDRVPAPGGSVQRMRWTQSINENVMRSYYGATEGGNILTAYRVRMLSLFQVLEPAVNVSAQRLSDQVRVIQRNHMLDDTVLDRLRSEMQSSHVIAPQSQTAVILPQPNISHADEGSNDRAINVSTQCNEELRSALEDAIQEYRFMSPELRPRLPRLPMHNKNRALVAALDSQLSKYFDTCEDLIDTHSILYCAAIAACRVAHVKFANDSRATRPKQAVPAWQCRIERRIGGARTLIGKLICFREGNTRPRVMRFVRRAFSGTDISPQDYMSCVTERIDFLKQKVYAWANRIRRYRRRVERYTQNRTFQSDERWVYRGWERPDQGVAETCLPDDDAMCSFWRNIWSVPVSHTEGDWAREVERACDPIPEMGAITICPQDVARAVRPLPNWKSPGPDGLHNFWIKWFPGSHARLASQFQTALKSGSLPQFLTTGITHLLHKSGSTAEPKNYKPITCLPTVYKVLTSILRTKINKHIDTNSIMSASQNGCRNGSRGTKELLLIDMAISQQVRRFRKDLSTCWIDYKKAYDSVPHTWLMRVLELYKVDTTLRTFLMSCMGQWRTVLRYPGCRNIQRNSEPIRIERGIFQGDSLSPLWFCLALNPLSTLLEDSGLGYRLRRGGQVISHLLYMDDLKLFAPNNFQLMELLKITETFSSAIRMEFGVDKCAVMHVKRGEIVESVGTQLSDSTNLRALSASETYKYLGMSEALGINVTDMKQSVKERFFGRLKKVLNSLLSGGNKVRAFNGWVMPVLMYSFGILKWTQTELDALDRRVRTLLTANRMHHPRSSVMRLYIPRKCGGRGFLNAKTLHNREICSLREYFLETDVGMHRDVVIVDKGLTPLSLAKENWRKPVVLDTNDRMEVWQSKELHGRFLRALRGPDVDLQASVAWLRFGNLFGETEGFVCAIMDEVMMTNNYRRFIVKDGTVDICRACHRPGESIRHIISGCSRLANGEYLHRHNLVARIIHQQLALKYNLVESEVPYYRYVPDPVLENGNITLYWDRSIITDRTIVANKPDIVVVDRSERRAMIVDITVPHDENLVKAEKDKQIKYLDLAREVVDMWDVDTAIIVPIVVTANGLIAKSLDQHLRRLSLGSWIKGLIQRAVLLDTARIVRRFLSLEP

SEQ ID NO: 13547 - protein, 1183 aa, Mesoligia furuncula
MLTRSRARQLNKTTHPTSSGSSLSSASPLPEPAPDGGPETPAAAVASSSSDEYFSPPTTPPPPVCRRGRGRPPASLGLRGPPASDRVPAPGGSVQRLRWTQTVNENVMRAYFGATEGGSNLTAYRGRMLSLFQVLEPAINVSAQRLSDQVRVILRNHMLDNVVLDRLRLESRNSHVTSASSSVAVQLQNLPNVSQRPDRVDVEDGDEAISVSPQCNARLRSALEDAFCEYRSVPPGLRPRLPRLPMHKKNKALVCALDSQLSNYFNDSKDLTDTHSILYCAAVAACRVAHVKFPNSDRAPRPKPAVPAWQCRIECRIGEARALIGKLICFREGNTRPRVMRFVRRAFSRTDISSRDYLSRVTERIDFLKQKICAWANRIRRYRRRVERYTQNTRDTRLPDDDAMCSFWRNIWSVPVSHTEGDWTRKIERTCDLLPEMGVLTISPQDVARAVRPLPNWKSPGPDGLHNFWIKWFQGSHARLASQFQSALESGSLPKFLTTGITHLLHKSGSTADPKNYRPITCLPTVYKVLTSILRAKINKHIDTNSIMSVSQNGCGNGSRGTKELLLIDMTISQQVRRFRKDLSTCWIDYKKAYDSVPHTWLMRVLELYKVDTTLRTFLMSCMGQWRTVLRYPGCRNIQRNSEPIRIERGIFQGDSLSPLWFCLALNPLSTLLEDSGLGYRLRRGGQVISHLLYMDDLKLFAPNNLQLMELLKITETFSSAIRMEFGVDKCAVMHVKRGEIVESVGTQLSDSTNLRALSASETYKYLGMSEALGINVTDMKQSLKERFFGRLKKVFNSLLSDGNKVRAFNGWVMPVLMYSFGILKWTQTELDALDRKVRTLLTANRMHHPRSSVMRLYIPRKCGGRGFLNAKTLHNREICSLREYFLETDVGMHRDVVAVDKGLTPLSLGKENWRKPVVLDTNDRMEVWQSKELHGRFFRALHGPDVDLIASVAWLRFGDLFGETEGFVCAIMDEVMMTNNYRRFIVKDGTVDICRACHRPGESIRHIISGCSRLANGEYLHRHNLVARIIHQQLALKYSLVESEVPYYRYVPDPVLENGNITLYWDRSIITDRTIVANKPDIVVVDRSERRAMIVDITVPHDENLVKAEKDKQVKYLDLAREVVDMWDVDSAIIVPIVVTANGLIAKSLDQHLKRLSLGSWIKGLIQKAVLLDTARIVYKMK

SEQ ID NO: 13548 - protein, 1206 aa, Mesoligia furuncula
MLTRSRARHLLKNTHPTSSGSSLSSASQLPDPAPDVSSVRPAAAVASSSSDEYFSPPTTPPPVCRRGRGRPPASLGLRGPPASDRVPAPGGSVQRMRWTQTVNENVMRAYFGATEGGSNLTAYRDRMLSLFQVLEPAVNVSAQRLSDQVRVIQRNHMLDNVVLDRLRLESRNSHVTPASSLIAVQLQNVPSVSPRPDHVYVEDDDEAITVSSQCNARLRSALEDAFREYRSIPPGLRPRLPRLPMHKKNKALVCALDLQLSNCFNNSKDLTDTHSILYCAAVAACRVAHVKFPNSDRAPRPKPAVPAWQCRIECRIGEARALIGKLICFREGNTRPRVMRFVRRAFSGTDISSRDYLSRVTERIDFLKQKIYAWANRIRRYRRRVERYTQNRTFQNDERWVYRAWERPDQGVTDTPLPDDDAMCSFWRNIWSVPVSHTEGDWTAKIERACDLIPEMGVLTISPQDVARAVRPLPNWKSPGPDRLHNFWIKWFQGSHARLASQFQSALESGSLPQFLTTGITHLLHKSGSTADPKNYRPITCLPTVYKVLTSILRAKINKHIDTNSIMSVSQNGCRNGSRGTKELLLIDMTISQQVRRFRKDLSTCWIDYKKAYDSVPHTWLMRVLELYKVDTTLRTFLMSCMGQWRTVLRYPGCRNIQRNSEPIRIERGIFQGDSLSPLWFCLALNPLSTLLEDSGLGYRLRRGGQVISHLLYMDDLKLFAPNNLRLMELLRITETFSSAIRMEFGVDKCAVMHVKRGEIVESVGTQLSDSTNLRALSASETYKYLGMSEALGINVTDMKQSLKERFFGRLKKVFNSLLSGGNKVRAFNSWVMPVLMYSFGILKWTQTELDALDRKVRTLLTANRMHHPRSSVMRLYIPRKCGGRGFLNAKTLHNREICSLREYFLETDVGMHRDVVAVDKGLTPLSLGKENWRKPVVLDTNDRMEVWQSKELHGRFFRALHGPDVDLLASVAWLRFGDLFGETEGFVYAIMDEVMMTNNYRRFIVKDGTVDICRACHRPGESIRHIISGCSRLANGEYLHRHNLVARIIHQQLALKYSLVESEVPYYRYVPDPVLENGNITLYWDRSIITDRTIVANKPDIVVVDRSERRAMIVDITVPHDENLVKAEKDKQVKYLDLAREVVDMWDVDSAIIVPIVVTANGLIAKSLDQHLKRLSLGSWIKGLIQKAVLLDTARIVRRFLSLEP

SEQ ID NO: 13549 - protein, 1111 aa, Spilarctia lutea
MKWTHSINENVMRAYFRATELGTNLTAYRVRLVSLFQELEPAVNVSAQRLSDQVRAIQRCHLLDDAALERIRSDIRNSLTVPSSSHVLNVVTNSTPQVPQNDDISELVDSEIISVSTQYNDRIRSTLEDAIREYRYVNLNNRPRLSRLPIHKRNLALVSALDSLLPKYFSNSEDLSDTHSILYCAAIAVCRVAGVKFAEYTTTTRQENTLPAWQYRIERRIAEARTLIGKLMSFRSGNTRPRVMRFVKRAFLGTTISPQEYMSCVTERIDFLKQKVYAWANRIRRYRKRVDRYNQSRMFQRNEKWVYRKSENLSPCMSDGQVPDENATNSFWHNIWSVPVTHTEGDWCRDVERSCESLLPMEPISIDEEDVSCAVRSLPNWKAPGPDGLHNFWLKWFRSSHACLASQFQTALDSGSLPQFLTTGITHLLYKSGDAMDPKNFRPITCLPTLYKLLTSILRLKITTHINHNSILSISQNGCRSGTRGTKELLIIDMTISQQVRRNRKSLATCWIDYKKAFDSVPHTWLLKVLELYKIDTTLCTFLKVCMGQWRTALRYPGCRQSAMNDVLIKIERGIFQGDSLSPLWFCLALNPLSTLLEGSGLGYRLQKDDRVISHLFYMDDLKLLAPTKLQLTALLKVTENFSNSIKMEFGVDKCAVMYVKKGEIVESEGIELSDSTKLRSLSATETYKYLGFSQSLGMPESDMKQTLRERFFGRLKKVLNSLLSGGNKVRACNGWVMPVLMYSFGVLRWTQTELDAIDRRVRTLLTAFRMHHPRSSVMRLYIPRRLGGRGLLNIKTLHNREVYNLREYFLQTDVGVHRSVVTVDTGLTPLALAKENWRKPVVLSTNDRREVWKGKVLHGRFYRALNGPDIDFKASTSWLRYSDLFGETEGFVCAIMDEVIMTNNYRKYILKDGTVDICRACHRPGESIRHIISGCSRLANGEYLHRHNQVARIVHQQLALKYNLVISEVPYYRYVPDPVLENGRATLYWDRSIITDRTIVANKPDIVVIDRLERRAMIVDIAVPHDENLVKVEKEKQIKYLDLSHEIVDMWNVDSVIIVPIVVSAHGLIAKSLDQHLKRLTLGGWIKGLIQKAVLLDTARIVRRFLSLEP

SEQ ID NO: 13550 - protein, 1198 aa, Xestia c-nigrum
MLTRSAARRALLPPPDPSLSSASPPPEPSPIVSAVTPAVAVASSSSDEYFSPPTTPPPARRRGGRRPPDGLGPRGPPASDRVPAPGGSVQRMRWTQSNNENVMRAYYGATEGGNNLTAYRVRMLSLFQVLEPAVNVSAQRLSDQVRVIQRNRMLDDTVLDRLRTEVQSSHVTATPPSQAVVPPQSTVITDRDDDVCSDMITNVATQCSEDMRSALEGAIREYRFVTPELRPRLPRLPMNNKNRMLVAVLDSQLSNYFDDCEDLTDVHSVLYCAAVAACRVARAKFSDDRVTRPKPAVPAWQYRIEQRIGGARALIGKLIYFREGNTRPRVMRFVRRAFSGTDISPRDYMSRVTERIDFLKQKVYAWASRIRRYKRRVDRYTQNRTFQRDERWVYRAWERPDQGVADTHLPDDDAMCSFWRSIWLVPVSHAEGEWTRVIERACDPVPEMGAITISPQDVACAVRPLPNWKSPGPDGLHNFWIKWFTGSHARLATLFQSALDSGSLPEFLTTGLTHLLHKSGSTAEPKNYRPITCLPTVYKVLTSILRTKICKHIDDNSVISASQNGCRNGSRGTKELLLIDMAISQQVRRSRKDLSTCWIDYKKAYDSVPHTWLMRVLELYKVDATLRTFLMSCMRQWRTVLRYPGCRQIQRNSEPIRIERGIFQGDSLSPLWFCLALNPLSTLLEDSGLGYQLRKDGRVISHLLYMDDLKLFAPNDLQLMELLKVTETFSSAIRMEFGVDKCAVMHVKRGEIVESVGTQLSDSINLRSLSATETYKYLGMSEALGINVADMKQSLKERFFGRLKKVFNSLLSGGNKVRAFNGWVMPVLMYSFGILKWTQTELDALDTKVRKLLTAFRMHHPRSSVMRLYIPRKCGGRGFLNAKTLHNREICSLREYFQEADVEMHRDVVAMDKGLTPLSLAKENWRKPIVLTTDDRRKEWQGKELHGRFYRALHGPDVDFLASVSWIRSGDLFGETEGFVCAIMDEVMMTNNYRRFIVKDGTVDICRACHRPGESIRHIISGCSRLANGEYLHRHNLVARIIHQQLALKYNLVESEVPYYRYVPDPVLVNGNITLYWDQSIITDRTVIANRPDIVVMDRSERRAMIVDITVPHDENLVKAEKDKQIKYIDLAREVVDMWEVDSAIIVPIVVSAHGLIAKSLDQHLRRLSLGSWIKGLIQKAVLLDTARIVRRFFSLEP

SEQ ID NO: 13551 - protein, 1199 aa, Xestia c-nigrum
MLTRAAARRARLSPPDPSLSSASPPPEPSPIVSAVTPAVAVASSSSDEYFSPPTTPPPARRRGGRRPPDGLGPRGPLASDRVPAPGGSVQRMRWTQSNNENVMRAYYGATEGGINLTAYRVRMLSLFQVLEPAVNVSAQRLSDQVRVIQRNRMLDDTVLDRLRTEVQSSRVTATPPSQAVVPPQSTVTTPYCDGDVSSDMVTNVSTQCSEDMRSALEGAIREYRFMKPELRPRLPRLPMHNKNKMLMAVLDSQLSNYFDSCEDLTDIHSILYCAAVAACRVAHVKFSDDRATRPKPAVPAWQYRIEQRIGGARALIGKLICFREGNTRPRVMRFVRRAFSGTDISPRDYMFRVTERIDFLKQKVYAWASRIRRYKRRVDRYTQNRTFQRDERWVYRAWERPDQGVADTRLPDDDAMCSFWRSIWSVPVSHAEGEWTRVVERACDPVPEMGAITISPQDVACAVRPLPNWKSPGPDGLHNFWIKWFTRSHARLATLFQSALESGSLPEFLTTGITHLLHKSGSTAEPKNYRPITCLPTVYKVLTSILRAKITKHIDENSVMSASQNGCRNGSRGTKELLLIDMAISQQVRRSRKDLSTCWIDYKKAYDSVPHTWLRRVLELYKVDATLRTFLMSCMGQWRTVLRYPGCRQIQRNSEPIRIERGIFQGDSLSPLWFCLALNPLSTLLEDSGLGYQLRKDGRVISHLLYMDDLKLFAPNDLQLMELLKVTETFSSAIRMEFGVDKCAVMHVKRGGIVESVGTQLSDSINLRSLSATETYKYLGMSEALGISVADMKQLLKERFFGRLKKVFNSLLSGGNKVRAFNGWVMPVLMYSFGILKWTQTELDALDTKVRKLLTAYRMHHPRSSVMRLYIPRKCGGRGFLNAKTLHNREICSLREYFLAADVGMHRDVVAMDKGLTPLSLAKENWRIPVVFTTDDRRKEWQSKELHGRFYRALHGPDVDFQASVSWLRSGDLFGETEGFVCAIMDEVMMTNNYRRFIVKDGTVDICRACHRPGESIRHIISGCSRLANGEYLHRHNLVARIIHQQLALKYNLVESEVPYYRYVPDPVLNSGSITLYWDQSIITDRTVIANRPDIVVMDRSERRAMIVDITVPHDENLVKAEKDKQIKYIDLAREVVDMWEVDSAIIVPIVVSAHGLIAKSLDQYLRRLSLGSWIKGLIQKAVLLDTARIVRRFLSLEP

SEQ ID NO: 13552 - protein, 1199 aa, Xestia c-nigrum
MLTRAAARRARLSPPDPSLSSASPPPEPSPIVSAVTPAVAVASSSSDEYFSPPTTPLPARRRGGRRPPDGLGPRGPLASDRVPAPGGSVQRMRWTQSNNENVMRAYYGATEGGNNLTAYRVRMLSLFQVLEPAVNVSAQRLSDQVRVIQRNRMLDDTVLDRLRTEVQSSRVTATPPSQAVVPPQSTVTTPFCDGDVSSDMVTNVSTQCSEDMRSALEGAIRDYRFMTPELRPRLPRLPMHNKNKMLVAVLDSQLSNYFDSCEDLTDIHSILYCAAVAACRVAHVKFSDDRATRPKPAVPAWQYKIEQRIGGARALIGKLICFREGNTRPRVMRFVRRAFSGTDISPRDYISRVTERIDFLKQKVYAWASRIRRYKRRVDRYTQNRTFQRDERWVYRAWERPDQGVADTRLPDDDATCSFWRSIWSVPVSHAEGEWTRVVERACDPVPEMGAITISPQDVACAVRPLPNWKSPGPDGLHNFWIKWFTRSHARLATLFQSALESGSLPEFLTTGITHLLHKSGSTAEPKNYRPITCLPTVYKVLTSILRATITKHIDENSVMSASQNGCRNGSRGTKELLLIDMAISQQVRRSRKDLSTCWIDYKKAYDSVPHTWLRRVLELYKVDATLRTFLMSCMGQWRTVLRYPGCRQIQRNSEPIRIERGIFQGDSLSPLWFCLALNPLSTLLEDSGLGYQLRKDGRVISHLLYMDDLKLFAPNDLQLMELLKVTETFSSAIRMEFGVDKCAVMHVKRGGIVESVGTQLSDSINLRSLSATETYKYLGMSEALGISVADMKQSLKERFFGRLKKVFNSLLSGGNKVRAFNGWVMPVLMYSFGILKWTQTELDALDTKVRKLLTAYRMHHPRSSVMRLYIPRKCGGRGFLNAKTLHKREICSLREYFLAADVGMHRDVVAMDKGLTPLSLAKENWRIPVVFTTDDRRKEWQSKELHGRFYRALHGPDVDFQASVSWLRSGDLFGETEGFVCAIMDEVMMTNNYRRFIVKDGTVDICRACHRPGESIRHIIFGCSRLANGEYLHRHNLVARIIHQQLALKYNLVESEVPYYRYVPDPVLNSGSITLYWDQSIITDRTVIANRPDIVVMDRSERRAMIVDITVPHDENLVKAEKDKQIKYLDLAREVVDMWEVDSAIIVPIVVSAHGLIAKSLDQYLRRLSLGSWIKGLIQRAVLLDTARIVRRFLSLEP

SEQ ID NO: 13553 - protein, 1145 aa, Griposia aprilina
MLTRSAARRARPPPPDSSLSSASLPPVSSPTVSAVTTPAAVVASSSSDEYFSPPTTPPPVRQRGGHRPPDGLGPRGPPASDRVPAPGGSVQRMRWTRSINENVMRSYYGATEGGNNLTAYRVRMLSLFQVLEPAVNVSAQRLSDQVRVIQRNHMLDDTVLDRLRNEMQSSHVIAPPSQTVVVLPQSNTSQADEESDDRATNVSTQCNDELRSALEDAIREYRFISPELRPRLPRLPMHNKNRVLVAALDAQLSNYFDDCVDLTDTHSILYCAAVAACRVAHVKFANDSRATRPKPAVPAWQCRIERRIGEARALIGKLICFREGNTRPRVMRFVRRAFAGTNISPQDYMSCVTERIDFLKQKVYAWANRIRRYKRRVERYTQNRTFQRDERWVYRGWERPDQGVADTCLPDDDAMCSFWRNIWSVPVSHTEGDWTREVERACDPIPEMGAITICPQDVTRAVRPLPNWKSPGPDGLHNFWIKWFGRSHARLAAQYQVALESGSLPQFLTTGVTHLLHKSGSTAEPKNYRPIACLPTVYKVLTSILRDKINKHIDTNYIMSPSQNGCRNGSRGTKELLLIDMAISQQVRRSRKDLSTCWIDYKKAYDSVPHTWLMRVLELYKVEATLRTFLMSCMGQWRTVLHYPACRNTQRNSEPIRIERGIFQGDSLSPLWFCLALNPLSTLLEDSGLGYRLRRGGQVISHLLYMDDLKLFAPNNSQLMDLLKVTETFSSAIRMEFGVDKCAVMHVKRGEIVESVGTQLSDSINLRALSASETYKYLGMSEALGINGTDMKQSLKDRFFGRLKKVFNSLLSGGNKVRAFNGWVMPVLMYSFGILKWTQTELDALDRKVRTLLTANRMHHPRSSVMRLYIPRKCGGRGFLNAKTLHNREICSLREYFLEADVGMHRDVVTVDKGLTPLSLAKENWRKPVVLDTNDRMEVWQSKELHGRFFRALHGPDVDQLASVAWLRFGDLFGETEGFVCAIMDEVMMTNNYRRFIVKDGTVDICRACHRPGESIRHIISGCSRLANEEYLHRHNLIARIIHQQLALKYSLVESEVPYYRYVPDPVLENGHITLYWDRSIITDRTIVANKPDIVVVDRLKRRAMIVDIMVPHDGNLVKAEKDKQIKYLGLAREVVDMWDVDSCR

SEQ ID NO: 13554 - protein, 1106 aa, Griposia aprilina
MRWTRSINENVMRSYYGATEGGNNLTAYRVRMLSLFQVLEPAVNVSAQRLSDQVRVIQRNHMLDDTVLDRLRNEMQSSHVIAPPSQTVVVLPQSNTSQADEESDDRATNVSTQCNDELRSALEDAIREYRFISPELRPRLPRLPMHNKNRVLVAALDAQLSNYFDDCVDLTDTHSILYCAAVAACRVAHVKFANDSRATRPKPAVPAWQCRIERRIGGARALIGKLICFREGNTRPRVMRFVRRAFAGTNISPQDYMSCVTERIDFLKQKVYAWANRIRRCKRRVERYTQNRTFQRDERWVYRDWERPDQGVADTCLPDDDAMCSFWRNIWSVPVSHTEGDWAREVERACDPIPEMGAISICPQDVTRAVRPLPNWKSPGPDGLHNFWIKWFGRSHARLAAQYQVALESGSLPQFLTTGVTHLLHKSGSTAEPKNYRPITCLPTVYKVLTSILRAKINKHIDTNSIMSPSQNGCRNGSRGTKELLLIDMAISQQVRRSRKDLSTCWIDYKKAYDSVPHTWLVRVLELYKVDATLCTFLKSCMGQWRTVLHYPGCRNIQRNNEPIRIERGIFQGDSLSPLWFCLALNPLSTLLEDSGLGYRLRRGGQVISHLLYMDDLKLFAPNNLQLMELLKVTETFSSPIRMEFGVDKCAVMHVKRGEIVESVGTQLSDSINLRALSAFETYKYLGMSEALGINGTDMKQLLKERFFGRLKKVFNSLLSGGNKVRAFNGWVISVLMYSFGILKWTQTELDALDRKVRTLLTANRMHHPRSSVMRLYIPRKCGGRGFLNAKTLHNREICSLREYFLEADVGMHRDVVTVDKGLTPLSLAKENWRKPVVLDTNDRMEVWQSKELHGRFFRALHGPDVDQLASVAWLRFGDLFGETEGFVCAIMDEVILTNNYRRHIMKDGTVDVCRACHRPGESIRHIISGCSRLANEEYLHRHNLVARIIHQQLALKYSLVESEVPYYRYVPDPVLENGHITLYWDRSIITDRTIVANKPDIVMVDRLERRAMIVDITVPHDGYLVKAEKDKQIKYLDLAREVVDMWDVDSAIIVPIVVTANGLIAKSLDQHLRRLSLGSWIKGLIQKAVLLDTARIVRRFLSLEP

SEQ ID NO: 13555 - protein, 1199 aa, Griposia aprilina
MMLTRSAKRRAHPPPPDSSLSSASPLPVSSPTVSAVTTPAAVVASSSSDEYFSPPTTPPPVRRRGGHRPPDGLGPRGPPASDRVPAPGGSVQRMRWTRSINENVMRSYYGATEGGNNLTAYRVRMLSLFQVLEPAVNVSAQRLSDQVRVIQRNHMLDDTVLDRLRNEMQSSHVIAPPSQTVVVLPQSNTSQADEESDDRATNVSIQCNDELRSALEDAIREYRFISPELRPRLPRLPMHNKNRVLVAALDAQLSNYFDDCVDLTDTHSILYCAAVAACRVAHIKFANDSRPTRPKPAVPAWQCRIERRIGGARALIGKLICFREGNTRPRVMRFVRRAFAGTNISPQDYMSCVTERIDFLKQKVYAWANRIRRYKRRVERYTQNRTFQHDERWVYRGWERPDQGVADTCLPDDDAMCSFWRNIWSVPVSHTEGDWGREVERACDPIPEMGAISICPQDVTRAVRPLPNWKSPGPDGLQNFWIKWFGRSHARLAAQYQVAIESGSLPQFLTTGVTHLLHKSGSTAEPKNYRPITCLPTVYKVLTSILRAKINKHIDTNSIMSPSQNGCRNGSRGTKELLLIDMAISQQVRRSRKDLSTCWIDYKKAYDSVPHTWLVRVLELYKVDATLRTFLKSCMGQWRTILHYPGCRNIQRDNEPIRIERGIFQGDSLSPLWFCLALNPLSTLLEDSGLGYRLRRGGQVISHLLYMDDLKLFAPNNLQLMELLKVTETFSSAIRMEFGVDKCAVMHVKRGEIVESVGTQLSYSINLRALSASDTYKYLGMSEALGINGTDMKQSLKERFFGRLKKVFNSLLSGGNKVRAFNGWVMPVLMYSFGILKWTQTELDALDRKVRTLLTANRMHHPRSSVMRLYIPRKCGGRGFLNAKTLHNREICSLREYFLEADVGMHTDVVKVDKGLTPLSLAKENWRKPVVLDTNDRMEVWQSKELHGRFFRALHEPDVDQLASVAWLRFGDLFGETEGFVCAIMDEVILTNNYRRHIMKDGTVDVCRACHRPGESIRHIISGCSRLANEEYLHRHNLVARIIHQQLALKYSLVESEVPYYRYVPDPVLENGHITLYWDRSIITDRTIVANKPDIVVVDRLERRAMIVDITVPHDGNLVKAEKDKQIKYLDLAREVVDMWDVDSAIIVPIVVTANGLIAKSLDQHLRRLSLGSWIKGLIQKAVLLDTARIVRRFLSLEP

SEQ ID NO: 13556 - protein, 1198 aa, Griposia aprilina
MLTRSAKRRARPPPPDSSLSSASPPPVSSPIVSAVTTPAAVVASSSSDEYFSPPTTPPPARRRGGHRPPDGLGPRGPPASDRVPAPGGSVQRMRWTRSINENVMRSYYGATEGGNNLTAYRVRMLSLFQVLEPAVNVTAQRLSDQVRVIQRNHMLDDTVLDRLRNEMQSSHVIAPPSQTVIVLPQYNTTQADEESDDRATNVSTQCNEELRSALEDAIREYRFISPELRPRLPRLPMHNKNRALVAALDTQLSNYFDDCVDLTDTHSILYCAAVAACRVAHVKFANDSRATRPKPVVPAWQCRIERRIGGARALIGKLICFREGNTRPRVMRFVRRAFAGTDISPQDYISCVTERIDFLKQKVYAWANRIRRYKRRVERYTQNRTFQRDERWVYRGWERPDQGVADTYLPDDDAMCSFWRNIWSVPVSHSEGDWTREVERACEPLPEMGAITICPQDVTRAVRPLPNWKSPGPDGLHNFWIKWFLRSHARLAAQFQVALESGLLPQFLTTGVTHLLHKSGSTAEPKNYRPITCLPTVYKVLTSILRAKINNHIDTNSIMSPSQNGCRNGSRGTKELLLIDMTISQQVRRSRKDLSTCWIDYKKAYDSVPHTWLMRVLELYKVDSTLRTFLKSCMGQWRTVLHYPGCRNVQRNSEPIRIERGIFQGDSLSPLWFCLALNPLSTLLENSGLGYRLRRGGQVISHLLYMDDLKLFAPNNLQLMELLKVTETFSSAIRMEFGVDKCAVMHVKRGEIVESVGTQLSDSINLRALSASETYKYLGISEALGINGTDMKQSLKERFFGRLKKVFNSLLSGGNKVRAFNGWVMPVLMYSFGILKWTQTELDALDKKVRSLLTANRMHHPRSSVMRLYIPRKCGGRGFLNAKTLHNREICSLREYFLEADVGMHRDVVTVDKGLTPLSLAKENWRKPVVLDTNDRMEVWQSKELHGRFFRALHGPDVDQLASVAWLRFGDLFGETEGFVCAIMDEVMMTKNYRRFIVKDGTVDICRACHRPGESIRHIISGCSRLANEEYLHRHNLVARIIHQQLALKYSLVESEVPYYRYVPDPVLENGHITLYWDRSIITDRTIVANKPDIVVVDRIERRAVIVDITIPHDGNLVKAEKDKQIKYLDLAREVVDMWDVDSAIIVPIVVTANGLIAKSLDQHLRRLSLGSWIKGLIQKAVLLDTARIVRRFLSLEP

SEQ ID NO: 13557 - protein, 1196 aa, Griposia aprilina
MLTRSRRARPPPPDSSLSSASLPPVSSPTVSAVTTPAAVVASSSSDEYFSPPTTPPPARRRGGHRPPDGLGPRGPPASDRVPAPGGSVQRMRWTRSINENVMRSYYRATEGGSNLTAYRVRMLSLFQVLEPAVNVSAQRLSDQVRVIQRNHMLDDTVLDRLRNEMQSSHVIAPPSQTVIVLPQCNTTQADEESDDRATNVSTQCNEELRSALEDAIREYRFISPELRPRLPRLPMHNKNRVLVAALDAQLSNYFDDCVDLTDTHSILYCAAVAVCRVAHVKFANDSRATRPKPAVPAWQCRIERRIGGARALIGKIICFREGNTRPRVMRFVRRAFAGTNISPQDYMSYVTERIDFLKQKVYAWANRIRRYKRRVERYTQNRTFQRDERWVYRGWERPDQGVADTCLPADDAMCSFWRNIWSVPVSHTEGDWAREVERACDPIPEMGAISICPQDVTRAVRPLPNWKSPGPDGLHNFWIKWFGRSHARLAAQYQVALESGSLPQFLTTGVTHLLHKSGSTAEPKNYRPITCLPTVYKVLTSILRAKINKHIDTNYIMSPSQNGCRNGSRGTKELLLIDMAISQQVRRSRKDLSTCWIDYKKAYDSVPHTWLVKVLELYKVDATLRTFLKSCMGQWRTVLHYPGCRNIQRDNEPIRIERGIFQGDSLSPLWFCLALNPLSTLLEDSGLGYRLRRGGQVISHLLYMDDLKLFAPNNLQLMELLKVTETFSSAIRMEFGVDKCAVMHVKRGEIVESVRTQLSDSINLRALSASETYKYLGMSEALGINGTDMKQSLKERFFGRLKKVFNSLLSGGNKVRAFNGWVMPVLMYSFGILKWTQTELDALDRKVRTLLTANRMHHPRSSVMRLYIPRKCGGRGFLNAKTLHNREICSLREYFLEADVGMHRDVVTVDKGLTPLSLAKENWRKPVVLDTNDRMEVWQSKELHGRFFRALHGPDVDQLASVAWLRFGDLFGETEGFVCAIMDEVILTNNYRRHIMKDGTVDVCRACHRPGESIRHIISGCSRLANEEYLHRHNLVARIIHQQLALKYSLVESEVPYYRYVPDPVLENGHITLYWDRSIITDRTIVANKPDIVVVDRLERRAMIVDITVPHDGNLVKAEKDKQIKYLDLAREVVDMWDVDSAIIVPIVVTANGLIAKSLDQHLRRLSLGSWIKGLIQKAVLLDTARIVRRFLSLEP

SEQ ID NO: 13558 - protein, 1197 aa, Griposia aprilina
MLTRSAALRARLPTPDSSLSSASPPPVSSPIVSAVTTPAAVVASSSSDEYFSPPTTPPPARRRGGHRPPDGLGPRGPPASDRVPAPGGSVQRMRWTQSINENVMRSYYGATEGGNNLTAYRVRMLSLFQVLEPAVNVSAQRLSDQVRVIQRNHMLDDTVLDRLRSEMQSSHVIAPPSRTVVVLPQPITSHDEGSDDRATNVSTQCNEELRSALEGAIREYRFMSPELRPRLPRLPMHNKNRALVAALDSQLSNYFDDCVDLTDTHSILYCAAVAACRVAHVKFANDSRATRPKTAVPAWQCRIERRIGGARALIGKLICFKEGNTRPRVMRFVRRAFAGTDVSPQDYISCVTERIDFLKQKVYAWASRIRRYKRRVERYTQNRTFQRDERWVYRDWERPDQGVADTYLPDDDAMCSFWHNIWSVPVSHTEGDWTREVERACEPIPEMGAITICPQDVARAVRPLPNWKSPGPDGLHNFWIKWFLKSHARLAAQFQAAIESGSLPQFLTTGVTHLLHKSGSIAEPKNYRPITCLPTVYKVLTSILRAKINKHIDTNSIMSASQNGCRNGSRGTKELLLIDMAISQQVRRSRKDLSTCWIDYKKAYDSVPHTWLMRVLELYKVDATLRTFLKSCMGQWRTVLRYPTCQNTQRNSEPIRIERGIFQGDSLSPLWFCLALNPLSTLLEDSGLGYRLRRGGRVISHLLYMDDLKLFAPNNLQLIELLKVTETFSSAIRMEFGLDKCAVMHVKRGEIVASVGTQLSDSMNLRALSASETYKYLGMSEALGVNNTDMKQSLKERFFGRLKKVFNSLLSGGNKVRAFNGWVMPVLMYSFGILKWTQTELDTLDRRVRTLLTANRMHHPRSSVMRLYIPRKCGGRGFLNAKTLHNREICSLREYFLEADVGMHRDVVAVDKGLTPLSLAKENWRKPVVLDTNDRMEVWQSKELHGRFFRALHGPDVDVQASVAWLRFGDLFGETEGFVCAIMDEVMMTNNYRRFIVKDGTVDICRACHRPGESIRHIISGCSRLANEEYLHRHNLVARIIHQQLALKYSFVESEVPYYRYVPDPVLENGTITLYWDRSIITDRTIIANKPDIVLVDRRERRAMIVDITIPHDGNLVKAEKDKQIKYLDLAREVVDMWDVDSAIIVPIVVTANGLIAKSLDQHLRRLSLSSWIKGLIQKAVLLDTARIVRRFLSLEP

SEQ ID NO: 13559 - protein, 1204 aa, Omphaloscelis lunosa
MLTRSATRRAHPPPPDSSLSSASPPSIPNPTVNVVTTPAAAVASSSSDEYFSPPTSPTPVRRQGRGRPPAGLGPRGQQAPNRVPAAGGYVSRIRWTQSMNENVMRAYYGATEGGINLTAYRSRMLSLFQVLEPTINVSAQRLSDQVRVIQHNHRLDNATLDRLRLEMQNSFASNPPPSQNVMQAPAAVPLQANQHEEEEDGRAISADNLCNVELRSALEDAIREYRFTSPDLRPRLPRLPMNKRNRALVFALDALLPNFIGSSTNLCDTHSILYCTAVAACRIARVKFPNTDRSVRPKPVAPAWQCRIECRINEARVLIGKLICFREGNTRPRVMRFVRRAFSGTSISPREYVSHVTERIDFLKQKVYAWANRIRRYRRRVDRYTQNRMFQNDERWVYRTWERPTPNQGVTDTRLPNSDAMKAFWQSIWSVPVSHTEGDWMRVVEQACDPIPHMEAISITPLDVARAVRPLPNWKSPGPDGLHNFWLKWLQRSHTCLATQFQSSLDTGSLPLFFTTGVTHLLHKSGSTAEPKNYRPITCLPTIYKVLTSILRAKISHHINNNLIMSVSQNGCKNGSRGTKELLLIDMTISQQVRKSRKDLSTCWIDYKKAYDSVPHTWLMRVLELYKIDATLRTFLMSCMRQWRTVLLYPGCRQIRGIDEPIRIERGIFQGDSLSPLWFCLALNPLSTMLEDSGLGYRLRRGGQVISHLLYMDDLKLFAPNNLRLMELLKITETFSSAIRMEFGVDKCAVMHVKRGEIMESVGTQLADSIHLRSLSSTETYKYLGMSEALGINVTDMKQSLKERFFGRLNKVLNSLLSGGNKVRAFNGWVMPVLMYSFGILKWTQTELDALDRKVRTLLTANRMHHPRSSVMRLYIPRKCGGRGFLNAKTLHNREIYSLREYFLQTNVGMHRDVVAVDKGLTPLSLAKENWRKPTVLDTNDRKEIWQGKELHGRFFRALHGPDVDFLTSVSWLRFGDLFGETEGFVCAIMDEVIMTNNYRKYIVKDGTVDICRACHQPGESIRHIVSGCSRLANGEYLHRHNLVARIIHQQLALQYNLIESEVPYYRYVPDPVLENGHTTLYWDRSIITDRTIVANKPDIVVIDRRERRAMIVDIAVPHDENLVKAEKDKKIKYLDLAHEVVDMWDVDSAIIVPIIVTVNGLIAKSLDQHLRRLSLRGWIKGLIQKAVLLDTARIVRRFLSLEP

SEQ ID NO: 13560 - protein, 1201 aa, Omphaloscelis lunosa
MLTRLAARRARLPPPDSPLSSASSPPVRSPTVNAVMTPAAAVASSSSDEYFSPPTTPPPARRRGRRRPPDGLGPRGPPASDRVPAPGGSVQRMRWTRSINENVMRSYYGATEGGNNLTAYRVRMLSLFQVLEPAVNVSAQRLSDQVRVIQRNHMLDDTVLDRLRSEMQSSHVIAPPLRSVIIPSQMSSVITSQADERIDDRATNVSTQCNEDLRSALEGAIQEYRFMSPELRPRLPRLPMHNKNKALVAVLDSQLSNYFDDCEDLTDTHSILYCAAVAVCRVAHLKFSNDSRATRPKPAAPAWQCRIERRISGARTLIGKLICFREGNTRPRVMRFVRRAFLGTDISPQDYMTRVTERIDFLKQKVYAWANRIRRYKRRVERYTQNRTFQSDERWVYRAWERPDQGVADTHLPDDDAMCSFWRSIWSVPVSHTEGDWTREVERAYDPIPEMGAITICPQDVARAVRPLPNWKSPGPDGLHNFWIKWFVRSHARLAAQYQTALESGSLPQFLTTGVTHLLHKSGSTAEPKNYRPITCLPTVYKVLTSILRAKINKHIDTNSIMSVSQNGCRNGSRGTKELLLIDMAISQQVRRSRKDLSTCWIDYKKAYDSVPHTWLMRVLELYKVHTTLRTFLMSCMGQWRTVLRYPGCRNIQRNSEPIRIERGIFQGDSLSPLWFCLALNPLSTLLEDSGLGYRLRRGGQVISHLLYMDDLKLFAPNNLQLMELLKVTEIFSSAIRMEFGVDKCAVMHVKRGEIMESVGTQLSDFINLRALSASETYKYLGMSEALGINVTDMKQSLKERFFGRLKKVLNSLLSGGNKVRAFNGWVMPVLMYSFGILKWTQTELDALDRRVRTLLTAYRMHHPRSSVMRLYIPRKCGGRGFLNAKTLHNREICSLREYFLGVDVGMHRDVVVVDKGLTPLSLAKENWRKPVVLDTKDRMEIWQSKELHGRYFRALHGPDVDLPASVTWLRFGDLFGETEGFVCAIMDEVMMTNNYRRFIVKDGTVDICRACHRPGESIRHIISGCSRLANEEYLHRHNLVARIIHQQLALKYNLVESEVPYYRYVPDPVLENGNITVYWDRSIITDRTIAANKPDIVVVDRGERRTMIIDITVPHDENLVKAEKDKQIKYLDLAREVVDMWDVDSAIIVPIVVTANGLIAKSLDQHLRRLSLGSWIKGLIQRAVLLDTARIVRRFLSLEP

SEQ ID NO: 13561 - protein, 1080 aa, Omphaloscelis lunosa
MLSLFQVLEPAVNVSAQRLSDQVRVIQRNHMLDDVVLDRLRLESRNNHVTPASPLVTVQLQNLPSSSPRSDRVGEEDDDGVISVSSQCNVRLRSALEDAFREYRSIPPGLRPQLPRLPMHKKNKALMCTLDSLLSNCFDGSKDLADTHSILYCAAVAACRVAHVKFPNSDRAPRPKPAVPAWQCRIERRIGEARVLIGKLICFREGNTRPRVMRFVKRAFSGTDISFQDYLTRVTERIDFLKQKIYAWANRIRRYRRRVERYTQNRTFQSDERWVYRAWERPDQGVADTHLPDDDAMCSFWRSIWSVPVSHTEGDWTREVERACDPIPEMGAITICPQDVARAVRPLPNWKSPGPDGLHNFWIKWFQRSHARLASQFQSALESGSLPQFLTTGITHLLHKSGSTAEPKNYRPITCLPTVYKVFTSILRTKINKHIDTNSIMSASQNGCRNGSRGTKELLLIDMAINQQVRRSRRDLSTCWIDYKKAYDSVPHTWLMRVLELYKVNATLRTFLMSCMGQWRTVLRYPGCRQILRNSEPIRIERGIFQGDSLSPLWFCLALNPLSTLLEDSGLGYRLRRGDQVISHLLYMDDLKLFAPNNLQLLELLKVTETFSSAIRMEFGVDKCAVMHVKRGEIVESVGTQLSDSIQLRSLSSIETYKYLGMSEALGVNAADMKQSLKERFFNRLNKVLNSLLSGGNKVRAFNGWVMPVLMYSFGILKWTQTELDALDRRVRTLLTANRMHHPRSSVMRLYIPRKCGGRGFLNAKTLHNREVCSLREYFLEADVGMHRDVVTVDKGLTPLSLANENWRKPIVLDTNDRREVWQSKELHGRFYRALHGPDVDLLASVSWLRFGDLFGETEGFVFAIMDEVMMTKNYRKYIVKDGTVDICRACHRPGESIRHIISGCSRLANGDYLHRHNLVARIIHQQLALKYSLVESEVPYYRYVPDPVLENGNITLYWDRSIITDRTIVANKPDIVVIDRLERRTMIIDIAVPHDENLVKAEKDKQIKYLDLAREVVDMWDVDTAIIVPIVVTANGIIAKSIDQHLKRLSLGSWIKGLIQKAVLLDTARIVRRFLSQEP

SEQ ID NO: 13562 - protein, 962 aa, Omphaloscelis lunosa
MHKKNKALMCTLDSLLSNCFDGSKDLADTHSILYCAAVAACRVAHVKFPNSDRAPRPKPAVPAWQCRIERRIGEARVLIGKLICFREGNTRPRVMRFVKRAFSGTDISFQDYLTRVTERIDFLKQKIYAWANRIRRYRRRVERYTQNCTFQSDERWVYRAWERLDQGVIDTRLPDDDAMCSFWRSIWSAPVSHTEGDWTREIERACEQIPEMGALTISPQDIARAVRPLPNWKSPGPDGLHNFWIKWFQRSHARLASQFQSALESGSLPQFLTTGITHLLHKSGSTAEPKNYRPITCLPTVYKVFTSILRTKINKHIDTNSIMSASQNGCRNGSRGTKELLLIDMAINQQVRRSRRDLSTCWIDYKKAYDSVPHTWLMRVLELYKVNATLRTFLMSCMGQWRTVLRYPGCRQILRNSEPIRIERGIFQGDSLSPLWFCLALNPLSTLLEDSGLGYRLRRGGQVISHLLYMDDLKLFAPNNLQLLELLKVTETFSSAIRMEFGVDKCAVMHVKRGEIVESVGTQLSDSIQLRSLSSIETYNYLGMSEALGVNAADMKQSLKERFFNRLNKVLNSLLSGGNKVRAFNGWVMPVLMYSFGILKWTQTELDALDRRVRTLLTANRMHHPRSSVMRLYIPRKCGGRGFLNAKTLHNREVCSLREYFLEADVGMHRDVVTVDKGLTPLSLANENWRKPIVLDTNDRREVWQSKELHGRFYRALHGPDVDLLASVSWLRFGDLFGETEGFVFAIMDEVMMTNNYRKYIVKDGTVDICRACHRPGESIRHIISGCSRLANGDYLHRHNLVARIIHQQLALKYSLVESEVPYYRYVPDPVLENGNITLYWDRSIITDRTIVANKPDIVVIDRLERRTMIIDIAVPHDENLVKVEKDKQIKYLDLAREVVDMWDVDTAIIVPIVVTANGIIAKSLDQHLKRLSLGSWIKGLIQKAVLLDTARIVRRFLSQEP

SEQ ID NO: 13563 - protein, 1205 aa, Omphaloscelis lunosa
MLTRSRARKLIDTHPTSSGSSLSSASQLPDPAPDVSPVIPVAAVASSSSDEYFSPPTTPPPTRQRGRGRPPASLGLRGPPASDRVPAPGGSVQRMRWTQTVNENVMRAYFGATEGGSNLTAYRGRMLSLFQVLEPAVNVSAQRLSDQVRVIQRNHMLDDVVLDRLPLESRNNHVTPASPLVTVQLQNLPSSSPRSDRVGEEDDDGVISVSSQCNVRLRSALEDAFREYRSIPPGLRPQLPRLPMHKKNKALMCTLDSLLSNCFDGSKDLADTHSILYCAAVAACRVAHVKFPNSDRAPRPKPAVPAWQCRIERRIGEARVLIGKLICFREGNTRPRVMRFVKRAFSGTDISFQDYLTRVTERIDFLKQKIYAWANRIRRYRRRVERYTQNRTFQSDERWVYRAWERPDQGVADTHLPDDDAMCSFWRSIWSVPVSHTEGDWTREVERACDPIPEMGAITICPQDVARAVRPLPNWKSPGPDGLHNFWIKWFQRSHARLASQFQSALESGSLPQFLTTGITHLLHKSGSTAEPKNYRPITCLPTVYKVFTSILRTKINKHIDTNSIMSASQNGCRNGSRGTKELLLIDMAINQQVRRSRRDLSTCWIDYKKAYDSVPHTWLMRVLELYKVNATLRTFLMSCMGQWRTVLRYPGCRQILRNSEPIRIERGIFQGDSLSPLWFCLALNPLSTLLEDSGLGYRLRRGGQVISHLLYMDDLKLFAPNNLQLLELLKVTETFSSAIRMEFGVDKCAVMHVKRGEIVESVGTQLSDSIQLRSLSSIETYKYLGMSEALGVNAADMKQSLKERFFNRLNKVLNSLLSGGNKVRAFNGWVMPVLMYSFGILKWTQTELDALDRRVRTLLTANRMHHPRSSVMRLYIPRKCGGRGFLNAKTLHNREVCSLREYFLEADVGMHRDVVTVDKGLTPLSLANENWRKPIVLDTNDRREVWQSKELHGRFYRALHGPDVDLLASVSWLRFGDLFGETEGFVFAIMDEVMMTNNYRKYIVKDGTVDICRACHRPGESIRHIISGCSRLANGDYLHRHNLVARIIHQQLALKYSLVESEVPYYRYVPDPVLENGNITLYWDRSIITDRTIVANKPDIVVIDRLERRTMIIDIAVPHDENLVKAEKDKQIKYLDLAREVVDMWDVDTAIIVPIVVTANGIIAKSLDQHLKRLSLGSWIKGLIQKAVLLDTARIVRRFLSQEP

SEQ ID NO: 13564 - protein, 1104 aa, Sesamia nonagrioides
MRWTQSINENVMRSYYGATEGGNNLTAYRVRMLSLFQVLEPAVNVSAQRMSDQVRVIQRNHMLDDTVLDRLRNEMQSSRVIAHQSQSAEIPPQPNYADEGSNDRATNVSTQCNEELRNALEAAIWEYRSISAELRPRLPRLPMHNRNRALIAALDAQLSNYFDTCEDLTDTHSILYCAAVAACRVAHVKFPSDSRATRPKPVVPAWQHRIERRIGGARALIGKLICFREGNTRPRVMRFVRRAFSGTNTSPQNYMARVTERIDFLKQKVYAWANRIRRYKRRVERYTQNRTFQSNERRVYRDWERPEQGVTDTCLPDDDAMCSFWRSIWSVPVSHTEGDWARDVERACDPIPEMGAITICPQDVACAVRPLPNWKSPGPDGLHNFWIKWFPRSHARLASQFQTALVSGSLPQFLTTGITHLLHKSGSTAEPKNYRPITCLPTVYKVLTSILKTKINKHIDSNSILSASQNGCRSGSRGTKELLLIDMAISQQVRRSRKDLSTCWIDYKKAYDSVPHTWLMRVLELYKVDATLRTFLMTCMRTWRTVLRYPGCRNIQRNSEPIRIERGIFQGDSLSPLWFCLALNPLSTLLEDSGLGYRLRRGGQVISHLLYMDDLKLFAPNNSQLNELLKITEIFSSSIRMEFGVDKCAVMHVKRGEIMEPVGAQLTSSINLRALSASETYKYLGMSEALGINVTDMKQSLKERFFSRLKKVLNSLLSGGNKVRAFNGWVMPVLMYSFGILKLTQTELDALDQRVRTLLTANRLHHPRSSVMRLYIPRKCGGRGFLNAKTLHNREICSLRDYFLETDVGMHRDVVAADKGLTPLSLAKENWRKPVVLDTNDRMEVWKSKELHGRFFLVLHGPDVDFQASVAWLRFGDLFGETEGFVFAIMDEVMVTNNYRRFIVKDGTVDICRACHRPGESIRHIISGCSRLANGEYLHRHNLVARIIHQQLALKYKLVESEVPYYRYMPDPVLENGHITLYWDRSIITDRTIIANKPDIVLVDRSERRAMIVDITIPHDENLVKAEKDKQTKYLDLAHEVVDMWEVDSAIIVPIVVTANGLIAKSLDQHLRRLSLGSWIKGLIQKAVLLDTARIVRKFLSLEP

SEQ ID NO: 13565 - protein, 1200 aa, Sesamia nonagrioides
MLTRSAARRARPPSPDSSLSSASPPPVSSPTVNAVMTPAAVVASSSSDEYFSPPTTPPPARRRGGRRPPDRLGPRGPSASDRVPAPGGSVQRMRWTQSINENVMRSYYGATEGGNNLTAYRVRMLSLFQVLEPAVNVSAQRLSDQVRVIQRNHMLDDVVLDRLRLESRNSHVTPASSLVAVQLNSVSPRPNHVDEEDDDRAISVSPQCNEKLRSALEDAFREYRSIPPELRPRLPRLPMHKKNKALVCALDSQLSNYLKDSKDLNDTHSILYCGAVAICRVAHVKFPDSDRATRPKSTVPAWQCRIERRIGETRALIGKLISFREGNTRPRVMRFVRRAFSGTDTSTRDYLFRVTERIDFFKQKIYAWANRIRRYKRRVERYSQNRNFQSDERRVYRAWERSDQGVTDTCLPDDAATCSFWRNIWSVPVSHTEGSWTRVVERACDPVTEMGAITICPQDVARAVRPLPNWKSPGPDGLHNFWIKWFSRSHARLASQFQTALESGSLPQFLTTGVTHLLHKSGSTAEPKNYRPITCLPTVYKVLTSILKSKISTHIDSNSIMSASQNGYRSGSRGTKELLLIDMVISQQVRRSRKDLSTCWIDYKKAYDSVPHTWLLRVLELYKVDATLRTFLMTCMRTWRTVLRYPGCRNIQRNSEPIRIERGIFQGDSLSPLWFCLALNPLSTLLEDSGLGYRLRRGGQVISHLLYMDDLKLFAHTDSQLKELLKITETFSSSIRMEFGVDKCAVMHVKRGEIMESVGTQLTSSINLRALSASETYKYLGMSEALGINVTDMKQSLKERFFGRLKKVLNSLLSGGNKVRAFNGWVMPVLMYSFGILKWTQTELDALDQRVRTLLTANRLHHPRSSVMRLYIPRKCGGRGFLNAKTLHNREICSLREYFLTTDVGMHRDVVAVDKGLTPLSLAKENWRKPVVLDTNDRMEVWKSKELHGRFFKALHGPDVDLQASVAWLRFGDLFGETEGFVCAIMDEVMMTNNYRRFIVKDGTVDICRACHRPGESIRHIISGCSRLANGEYLHRHNLVARIIHQQLALKYNLVESEVPYYRYTPDPVLENDHITLYWDRSIITDRTIVANKPGIVLVDRSERRAMIVDITIPHDENLVKAEKDKQIKYLDLAHEVVDMWEVDSAIIVPIVVTANGLIAKSLDQHLRRLSLGSWIKGLIQKAVLLDTARIVRKFLSLEP

SEQ ID NO: 13566 - protein, 962 aa, Sesamia nonagrioides
MHNRNSALMAALDAQLSNYFDTCEDLTDTHSILYCAAVAACRVAHVKFPSDSRATRPKPVVPAWQHRIERRIGGARALIGKLICFREGNTRPRVMRFVRRAFAGTNISPQNYMARVTERIDFLKQKVYAWANRIRRYKRRVERYTQNRTFQSNERWVYRDWERPEQGVTDTCLPDDDAMCSFWGSIWSVPVSHTEGDWARDVERTCDPIPEMGAITICPQDVACAVRPLPNWKSPGPDGLHNFWIKWFPRSHARLASQYQTALVSGSLPQFLTTGITHLLHKSGSTAEPKNYRPVTCLPTVYKVLTSILKTKINKHIDSNSIMSASQNGCKSGSRGTKELLLIDMAISQQVRRSRKDLSTCWIDYRKAYDSVPHTWLMRVLELYKVDATLRTFLMSCMRTWRTVLRYPGCRNIQRNSEPIRIERGIFQGDSLSPLWFCLALNPLSTLLEDSGLGYRLRRGGQVISHLLYMDDLKLFAPNNSQLRELLKITETFSSSISMEFGVDKCAVMHVKRGEIMESVGTQPTDSINLRALSASETYKYLGMSEALSINVTDMKQSLKERFFGRLKKVLNSLLSGGNKVRAFNGWVMPVLMYSFGILKWTQTELDALDQRVRTLLTANRLHHPRSSVMRLYIPRKCGGRGFLNAKTLHNREVCSLREYFLETNVGMHRDVVAADKGLTPLSLAKENWRKPVVLDTNDRLEVWKSKELHGRFFRALHGPDVDFQASVAWLRFGDLFGETEGFVFAIMDEVMMTNNYRRFIVKDGTVDICRACHRPGESIRHIISGCSRLANGEYLHRHNLVARIIHQQLALKYNLVESEVPYYRYMPDPVLENGHITLYWDRSIITDRTIVANKPDIVLVDRSERRAMIVDITIPHDENLVKAEKDKQIKYLDLAHEVVDMWEVDSAIIVPIVVTANGLIAKSLDQHLRRLSLGSWIKGLIQKAVLLDTARIVRKFLSLEP

SEQ ID NO: 13567 - protein, 1194 aa, Sesamia nonagrioides
MQRKTGTYDSCHVKSRENIGEMKKNTLNMLTRSAALRARPPPPDSLLSSASPPPVSSATVSAVTTPAAAVALSSSDEYFSPPTTPPPARRRGGRRPPDRLGPRGPSASDRVPAPGGSVQRMRWTQSINENVMRSYYGATEGGNNLTAYRVRMLSLFQVLEPAVNVSAQRLSDQVRVIQRNHMLDDTVLDRLRNEMQSSRVIAHQSQTAEIPPQSTNYADEGSNDRATNVSTQCNEELINALEAAIREYRYTSAELRPRLPRLPMHNRNRALMAALDAQLSNYFDTCEDLTDTHSILYCAAVAACRVAHVKFPSDSRATRPKPVVPAWQHRIERRIGGARALIGKLICFREGNTRPRVMRFVRRAFAGTNISPQNYMARVTERIDFLKQKVYAWANRIRRYKRRVERYTQNRTFRSNERWVYRDWERPEQGVTDTCLPDDDAMCSFWRSIWSVPVSHTEGDWARDVERACDPIPEMGAITICPQDVACAVRPLPNWKSPGPDGLHNFWIKWFPRSHARLASQFQTALVSGSLPQFLTTGITHLLHKSGSTAEPKNYRPITCLPTVYKVLTSILKTKINKHIDSNSIMSASQNGCRSGSRGTKELLLIDMAISQQVRRSRKDLSTCWIDYRKAYDSVPHTWLMRVLELYKVDATLRTFLMSCMRTWRTVLRYPGCRNIQRNSEPIRIERGIFQGDSLSPLWFCLALNPLSTLLEDSGLGYRLRRGGQVISHLLYMDDLKLFAPNNSQLRELLKITETFSSSIRMEFGVDKCAVMHVKRGEIMESVGTQPTDSINLRALSASETYKYLGMSEALGINVTDMKQSLKERFFGRLKKVLNSLLSGGNKVRAFNGWVMPVLMYSFGILKWTQTELDALDQRVRTLLTANRLHHPRSSVMRLYIPRKCGGRGFLNAKTLHNREVCSLREYFLETDVGMHRDVVAADKGLTPLSLAKENWRKPVVLDTNDRLEVWKSKELHGRFFRALHGPDVDFQASVAWLRFGDLFGETEGFVFAIMDEVMMTNNYRRFIVKDGTVDICRACHRPGESIRHIISGCSRLANGEYLHRHNLVARIIHQQLALKYKLVESEVPYYRYMPDPVLENGHITLYWDRSIITDRTIVANKPDIVLVDRSERRAMIVDITIPHDENLVKAEKDKQIKYLDLAHEVVDMWEVDSAIIVPCAFAQRNVVEFKDFKYADI

SEQ ID NO: 13568 - protein, 1197 aa, Sesamia nonagrioides
MLTRSAARRARPPSPDSLLSSASLPPASSTTVSAVTTPAAAVALSSSDEYFSPPTTPPPARRRGGRRPPDRLGPRGPSASDRVPAPGGSVQRMRWTQSINENVMRSYYGATEGGNNLTAYRVRMLSLFQVLEPAVNVSAQRLSDQVRVIQRNHMLDDTVLDRLRNEMQSSRIIAHQSQTAEIPPQPTNYADEVSNDRATNVSTQCNEELINALEAAIREYRFTPAEQRPRLPRLPMHNRNRALMAALDAQLSDYFDTCEDLTDTHSILYCAAVAACRVAHVKFPSDSRATRPKPVVPAWQRRIERRIGGARALIGKLICFREGNTRPRVMRFVRQAFAGTNISPQNYMARVTERIDFLKQKVYAWANRIRRYKRRVERYTQNRTFQSNERWVYRDWERPEQGVTDTCLPDDDAMCSFWRSIWSVPVSHTEGDWARDVERACDPIPEMGAITICPQDVACAVRPLPNWKSPGPDGLHNFWIKWFPRSHARLASQFQTALVSGSLPQFLTTGITHLLHKSGSTAEPKNYRPITCLPTVYKVLTSILKSKINTHIDSNSIMSASQSGCKSGSRGTKELLLIDMAISQQVRRSRKDLSTCWIDYRKAYDSVPHTWLMRVLELYKVDATLRTFLMSCMKTWRTVLRYPGCRNIQRNSEPIRIERGIFQGDSLSPLWFCLALNPLSTLLEDSGLGYRLRRGGQVISHLLYMDDLKLFAPNNSQLRELLKITETFSSSIRMEFGVDKCAVMHVKRGEIMESVGTQLTDSINLRALSASETYKYLGMSEALGINVTDMKQSLKERFFGRLKKVLNSLLSGGNKVRAFNGWVMPVLMYSFGILKWTQTELDALDQRVRTLLTANRLHHPRSSVMRLYIPRKCGGRGFLNAKTLHNREVCSLRDYFLVTDVGMHRDVVAADKGLTPLSLAKENWRKPVVLDTNDRMEVWKSKELHGRFFRALHGPDVDFQASVAWLRFGDLFGETEGFVFAIMDEVMMTNNYRRFIVKDGTVDICRACHRPGESIRHIISGCSRLANGEYLHRHNLVARIIHQQLALKYNLVESEVPYYRYTPDPVLENGYITLYWDRSIITDRTIVANKPDIVMVDRSERRAMIVDITIPHDENLVKAEKDKQIKYLDLAHEVVDMWEVDSAIIVPIVVTANGLIAKSLDQHLRRLSLGSWIKGLIQKAVLLDTARIVRKFLSLEP

SEQ ID NO: 13569 - protein, 1201 aa, Sesamia nonagrioides
MLTRSAARKRARPPSPDSLLSSASPPPVSSPTVSAVTTPAAAVASSSSGEYFSPPTTPPPVRRRGGRRPPDRLGPRGPSASDRVPAPGGSVQRMRWTQSINENVMRSYYGATEGGNNLTAYRVRMLSLFQVLEPGVNVSAQRLSDQVRVIQRNHMLDDVVLDRLRLESRNSHVTPASSLVAVQLNSVSPRPNRVDEEDDDRAISVSPQCIEKLRSALEDAFCEYRSTPPELRPRLPRLPMHKKNKALVCALDSQLSYYLKDSKDLTDTHSILYCGAVAICRVAHVKFPDSDRATRPKSAVPAWQCRIERRIGETRALIGKLTSFREGNTRPRVMRFVRRAFSGTDTSTRDYLFRVTERIDFFKQKIYAWANRIRRYKRRVERYSQNRNFQSDERRVYRAWERSDQGVTDTCLPDDDAMCSFWRNIWSVPVSHTEGSWTRVVERACDPVPEMGAITICPQDVARAVRPLPNWKSPGPDGLHNFWIKWFSGSHARLASQFQTALESGSLPQFLTTGVTHLLHKSGSTAEPKNYRPITCLPTVYKVLTSILKSKINTHIDSNSIMSASQNGCRSGSRGTKELLLIDMAISQQVRRSRKDLSTCWIDYKKAYDSVPHTWLMRVLELYKVDATLRTFLMTCMRTWRTVLRYPGCRNIQRNSEPIRIERGIFQGDSLSPLWFCLALNPLSTLLEDSGLGYRLRRGGQVISHLLYMDDLKLFAHTDSQLKELLKITETFSSSIRMEFGVDKCAVMHVKRGEIMESVGTQLTSSINLRALSASETYKYLGMSEALGINVTDMKQSLKERFFGRLKKVLNSLLSGGNKVRAFNGWVMPVLMYSFGILKWTQTELDALDQRVRTLLTANRLHHPRSSVMRLYIPRKCGGRGFLNAKTLHNREVCSLREYFLETDVGMHRDVVAADKGLTPLSLAKENWRKPVVLDTNDRLEVWKSKELHGRFFRALHGPDVDFRASVAWLRFGDLFGETEGFVFAIMDEVMMTNNYRRFIVKDGTVDICRACHRPGESIRHIISGCSRLANGEYLHRHNLVARIIHQQLALKYNLVESEVPYYRYMPDPVLENGHITLYWDRSIITDRTIVANKPDIVLVDRSERRAMIVDITIPHDENLVKAEKDKQIKYLDLAHEVVDMWEVDSAIIVPIVVTANGLIAKSLDQHLRRLSLGSWIKGLIQKAVLLDTARIVRKFLSLEP

SEQ ID NO: 13570 - protein, 868 aa, Sesamia nonagrioides
MRFVRRAFSGTDTSTRDYLFRVTERIDFFKQKIYAWANRIRRYRRRVERYSQNRNFQSDERRVYRAWERSDQGVTDTCLPDDVATCSFWRNIWSVPVSHTEGSWTRVVERACDPVPEMGAITICPQDVARGVRPLPNWKSPGPDGLHNFWIKWFSGSHARLASQFQTALESGSLPQFLTTGVTHLLHKSGSTAEPRNYRPITCLPTVYKVLTSILKSKINTHIDSNSIMSASQNGCRSGSRGTKELLLIDMAISQQVRRSRKDLSTCWIDYKKAYDSVPHTWLMRVLELYKVDATLRTFLMTCMRTWRTVLRYPGCRNIQRNSEPIRIERGIFQGDSLSPLWFCLALNPLSTLLEDSGLGYRLRRGGQVISHLLYMDDLKLFAHTDSQLKELLKITETFSSSIRMEFGVDKCAVMHVKRGEIMESVGTQLTSSINLRALSASETYKYLGMSEALGINVTDMKQSLKERFFGRLKKVLNSLLSGGNKVRAFNGWVMPVLMYSFGILKWTQTELDALDRRVRTLLTANRLHHPRSSVMRLYIPRKCGGRGFLNAKTLHNREICSLREYFLTTDVGMHRDVVAVDKGLTSLSLAKENWRKPVVLDTNDRMEVWKSKELHGRFFKALHGPDVDLQASVAWLRFGDLFGETEGFVCAITDEVMMTNNYRRFIVKDGTVDICRACHRPGESIRHIISGCSRLANGEYLHRHNLVARIIHQQLALKYNLVESEVPYYRYTPDPVLENDHITLYWDRSIITDRTIIANKPDIVLVDRSERRAMIVDITIPHDENLVKAEKDKQIKYLDLAHEVVDMWEVDSAIIVPIVVTANGLIAKSLDQHLRRLSLGSWIKGLIQKAVLLDTARIVRKFLSLEP

SEQ ID NO: 13571 - protein, 1200 aa, Sesamia nonagrioides
MLTRSAARRARPPSPDSSLSSASPPPVSSPTVNAVMTPAAVVASSSSDEYFSPPTTPPPARRRGGRRPPDRLGPRGPSASDRVPAPGGSVQRMRWTQSINENVMRSYYGATEGGNNLTAYRVRMLSLFQVLEPAVNVSAQRLSDQVRVIQRNHMLGDVVLDRLRLESRNSHVTPASSLVAVQLNSVSPRPNHIDEEDDDRAISVSPQCNEKLRSALEDAFREYRSIPPELRPRLPRLPMHKKNKALVCALDSQLSNYLKDSKDLNDTHSILYCGAVAICRVAHVKFPDNDRATRPKSAVPAWQCRIERRIGETRALIGKLVSFREGNTRPRVMRFVRRAFSGTDTSTRDYLFRVTERIDFFKQKIYAWANRIRRYRRRVERYSQNRNFQSDERRVYRAWERSDQGVTDTCLPDDDATCSFWRNIWSVPVSHTEGSWTRVVERACDPVPEMGAITICPQDVARAVRPLPNWKSPGPDGLHNFWIKWFSGSHARLASQFQTALESGSLPQFLTTGVTHLLHKSGSTAEPRNYRPITCLPTVYKVLTSILKSKINTHIDSNSIMSASQNGCRSGSRGTKELLLIDMAISQQVRRSRKDLSTCWIDYKKAYDSVPHTWLMRVLELYKVDATLRTFLMTCMRTWRTVLRYPGCRNIQRNSEPIRIERGIFQGDSLSPLWFCLALNPLSTLLEDSGLGYRLRRGGQVISHLLYMDDLKLFAHTDSQLKELLKITETFSSSVRMEFGVDKCAVMHVKRGEIMESVGTQLTSSINLRALSASETYKYLGMSEALGINVTDMKQSLKERFFGRLKKVLNSLLSGGNKVRAFNGWVMPVLMYSFGILKWTQTELDALDRRVRTLLTANRLHHPRSSVMRLYIPRKCGGRGFLNAKTLHNREICSLREYFLRTDVGMHRDVVAVDKGLTSLSLAKENWRKPVVLDTNDRMEVWKSKELHGRFFKALHGPDVDLQASVAWLRFGDLFGETEGFVCAITDEVMMTNNYRRFIVKDGTVDICRACHRPGESIRHIISGCSRLANGEYLHRHNLVARIIHQQLALKYNLVESEVPYYRYTPDPVLENDHITLYWDRSIITDRTIIANKPNIVLVDRSERRAMIVDITIPHDENLVKAEKDKQINYLDLAHEVVDMWEVDSAIIVPIVVTANGLIAKSLDQHLRRLSLGSWIKGLIQKAVLLDTARIVRKFLSLEP

SEQ ID NO: 13572 - protein, 1197 aa, Sesamia nonagrioides
MLTRSAARRARPPSPDSLLGSASPPPVSSPTVSAVTTPAAAVALSSSDEYFSPPTTPPPVRRRGGRRPPDRLGPRGPTASDRVPAPGGSVQRMRWTQSINENVMRSYYGATEGGNNLTAYRVRMLSLFQVLEPAVNVSAQRLSDQVRVIQRNHMLDDTVLDRLRNEMQSSRVIAHQSQTAEIPPQSTDYADEGSNDRATNVSTQCNEELINALEAAIREYRSTSAELRPRLPRLPMHNRNRALMAALDAQLSNYFDTCEDLTDTHSILYCAAVAACRVAHVKFPSDSRATRPKPVVPAWQHRIERRIGGARALIGKLICFREGNTRPRVMRFVRRAFAGTNISPQNYMARVTERIDFLKQKVYAWANRIRRYKRRVERYTQNRTFQNNERWVYRDWERPEQGVTDTCLPDDDVMCSFWRSIWSVPVSHTEGDWARDVERACDLIPEMGAITICPQDVACAVRPLPNWKSPGPDGLHNFWIKWFPRSHARLASQLQTALVSGSLPQFLTTGITHLLHKSGSTAEPKNYRPITCLPTVYKVLTSILKTKINKHIDSNSIMSASQNGCKSGSRGTKELLLIDMVISQQVRRSRKDLSTCWIDYRKAYDSVPHTWLMRVLELYKVDATLRTFLMSCMRTWRTVLRYPGCRNIQRNSEPIRIERGIFQGDSLSPLWFCLALNPLSTLLEDSGLGYRLRRGGQVISHLLYMDDLKLFAPNNSQLRELLKITETFSSSIRMEFGVDKSAVMHVKRGEIMESVGTQLTGSINLRALSASETYKYLGMSEALGINVTDMKQSLKERFFGRLKKVLNSLLSGGNKVRAFNGWVMPVLMYSFGILKWTQTELDALDQRVRTLLTANRLHHPRSSVMRLYIPRKCGGRGFLNAKTLHNREVCSLREYFLETDVGMHRDVVAADKGLTPLSLAKENWRKPVVLDTNDRLEVWKSKELHGRFFRALHGPDVDFQASVAWLRFGDLFGETEGFVFAIMDEVMMTNNYRRFIVKDGTVDICRACHRPGESIRHIISGCSRLANGEYLHRHNLVARIIHQQLALKYKLVESEVPYYRYMPDPVLENGHITLYWDRSIITDRTIVANKPDIVLVDRSERRAMIVDITIPHDENLVKAEKDKQIKYLDLAHEVVDMWEVDSAIIVPIVVTANGLIAKSLDQHLRRLSLGSWIKGLIQKAVLLDTARIVRKFLSLEP

SEQ ID NO: 13573 - protein, 1206 aa, Drepana arcuata
MFTRSQARRHNAHPPPSASPPSSVSQTPADSDSATLDFRVVATAASSSSDEYFSPPTSPRPVRRQGRVQPPPNGLGPRGQSAPDRVLAVGGNVQRMRCTHTINENVMRAYYGATEGGTSLTAYRSRMLLLFQELELTVNFSAQRLSDQVRVIQRNHRLDDNVLDRLRSEMQGSHVTSAPAQSAAQSLVSSITLPQPSYTDMEGGDRPLNAGTQYNELVRSTLKDAVQQYKFVSPGLRPRLPRLPMHKKNLALVAILDSLLPEYLDCCEDLTETHQILYCAAIAACRLAHVNFPNHERTGQPKPAVPIWQRRIQRRIDDARVLIGKLSCFREGNTRPRLMRYVRKAFSGSDINPRDYVACVTERIDYLKQKVYAWANRIRRYKQRVDRYTQNHMFQNDQKWVYRGWERSEQGVSDEQLPDNDAVCTFWSNIWSVPVTHTEGDWIEEIKKVCESIHEMGEVTISPKDVADAVQSLSNWKSPGPDGLHNFWLKWLRTSHARLASQFQSSLESGSLPSFLMTGITHLLHKSGSTMDPKNYRPITCLPTMYKLFTSILRAKISIHINNNVIMSASQNGCKNGSRGTKELLLIDMTISQQVRRSRKNLSTCWIDYKKAYDSVPHTWLMRVLELYKVNSTLRIFLKSIMGQWKTVLHYPRGRQIPENDEPIRIERGIFQGDSLSPLWFCLALNPLSTLLECSGLGYRLRRGGQVISHLLYMDDLKLFAPSELQLTELLNVTQNFSNSIRMEFGIDKCAVMHGKRGNIVESVGIQLSDSINIRSLTPTENYKYLGMSEALGIHEADMKKSLLDRFYGRLTKVIKSLLTGGNKVRAYNGWVMPVLMYSFGILKWTQRELEITDRKVRTLLTSYRMHHPRSSIMRLYIPRKCGGRGFLNAKTLHNREVYKLREYFRSTEVGMHRDVVAVDKGLTALSLAKENWRKPVVLTTNDRREIWQSKELHGRFYRALHGPDVDLEASLAWLRFGDLFGETEGFVCAIMDEVMMTNNYRKYILRDGTVDICRACHRPGESLRHIISGCSHLANGEYLHRHNQVAKIIHQQLALKYNLVDSEVPYYKYSPDPVLENGHVTLYWDRSIITDRCITANKPDIVLIDRLERRTMIVDITVPHDGNLVKAEKDKQIKYLDLAHEIVSMWDVDSAIIVPIVITANGLMAKSLDQHLKRLSLDGWIKCLIQKAVLLETARIVRRFLSLGP

SEQ ID NO: 13574 - protein, 868 aa, Apamea monoglypha
MRFVRRAFLGTDISSQDYLSRVTERIDFLKQKVYAWANRIRRYKRRVERYTQNRTFQNDERWVYRGWERPDQSVADTCLPDDDAMCSFWRSIWSAPVSHTEGDWTGKIERACELIPEMGAITICPQDVARAVRPLPNWKSPGPDGLHNFWIKWFQRSHAPLAAQFQSALESGLLPQFITTGITHLLHKSGSTADPKNYRPITCLPTIYKVLTSILRAKINKHIDSNSIMSVSQNGCRNGSRGTKELLLIDMAISQQVRRSRKDLSTCWIDYKKAYDSVPHTWLMRVLELYKVDTTLRTFLMTCMGQWRTVLRYPGCRNIQRNSEPIRIERGIFQGDSLSPLWFCLALNPLSTLLDDSGLGYRLRRGGQVISHLLYMDDLKLFAPNNLQLMELLKITETFSSAIRMEFGVDKCAVMHVKRGEIVESVGTQLSDSTNLRALSASETYKYLGMSEALGINVTDMKQSLKERFFGRLKKVLNSLLSGGNKVRAFNSWVMPVLMYSFGILKWTQTELDALDRRVRTLLTANRLHHPRSSVMRLYIPRKCGGRGFLNAKTLHNREICSLREYFLETDVGMHRDVVAVDKGLTPLSLAKENWRKPVVLDTNDRMEVWQSKELHGRFYRALHGPDVDLLASVAWLRFGDLFGETEGFVCAIMDEVMMTNNYRRFIVKDGTVDICRACHRPGESIRHIISGCSRLANGEYLHRHNLVARIIHQQLALKYNLVESEVPYYRYVPDPVLENGNITLYWDRSIITDRTIVANKPDIVVVDRSERRAMIVDITVPHDENLVKAEKDKQIKYLDLAREVVDMWHVDSAIIVPIVVTANGLIAKSLDQHLRRLSLGSWIKGLIQKAVLLDTARIVRRFLSLEP

SEQ ID NO: 13575 - protein, 975 aa, Apamea monoglypha
MSPELRPRLPRLPMHNKNRALVAVLDAQLSSHFDACEDLTDTHSILYCAAVAACRVAHVKFDSDSRATRPKPAIPAWQCRIERRIGGARALIGKLICFREGNTRPRVMRFVRRAFLGTDISSQDYLSRVTERIDFLKQKVYAWANRIRRYKRRVERYTQNRTFQSDERWVYRGWERPDQDVADTCLPDDDAMCSFWRSIWSAPVSHTEGDWAREVERACDPIPEMEAITICPQDVARAVRPLPNWKSPGPDGLHNFWVKWFTRSHARLASQFQTALESGSLPQFLTTGVTHLLHKSGSTAEPKNYRPITCLPTVYKVLTSILRAKINKHIDTNSIMSASQNGCKNGSRGTKELLLIDMAISQQVRRSRKDLSTCWIDYKKAYDSVPHTWLMRVLDLYKVDATLRTFLMSCMGQWRTVLRYPGCRNIQRNSEPIRIERGIFQGDSLSPLWFCLALNPLSTLLEDSGLGYRLRRGGQVISHLLYMDDLKLFAPNNLQLMELLKVTETFSSDIRMEFGVDKCAVMHVKRGEIVESVGTQLSDSTNLRALSVSETYKYLGMSEALGINVTDMKQSLKERFFVRLKKVLNSLLSGGNKVRAFNSWVMPVLMYSFGILKWTQTELDALDRKVRTLLTAHRMHHPRSSVMRLYIPRKCGGRGFLNAKTLHNREICSLREYFLETDVGMHRDVVAVDKGLTPLSLAKENWRKPVVLDTNDRMEVWQSKELHGRFYRALHGPDVDLLASVAWLRFGDLFGETEGFVCAIMDEVMMTNNYRRFIVKDGTVDICRACHRPGESIRHIISGCSRLANGEYLHRHNLVARIIHQQLALKYNLVESEVPYYRYVPDPVLENGNITLYWDRSIITDRTIVANKPDIVVVDRSERRAMIVDITVPHDENLVKAEKDKQIKYLDLAREVVDMWDVDSTVIVPIVVTANGLIAKSLDQHLRRLSLGSWIKGLIQKAVLLDTARIVRRFLSLEP

SEQ ID NO: 13576 - protein, 1198 aa, Apamea monoglypha
MLTRAASRRARLPPPDSSLSSASPPPVPSLTVSAVTTPAAVVASSSSDEYFSPPTTPPPARRRGGRRPPDGLGPRGPPASDRVPAPGGGVQRMRWTQSINENVMRSYYGATEGGNNLTAYRVRMLSLFQVLEPAVNVTAQRLSDQVRVIQRNHMLDDTVLDRLRSEMQSSHVIAHQSQTAAVLPQSNTSHADEGSNDMATNVSIQYNEELRNALEGAIREYRFMSPELRPRLPRLPMHNKNRALVAVLDAQLSSYFDACEDLTDTHSILYCAAVAACRVAHVKFASDSEATRPKPTIPAWQYRIERRIGGARALIGKLICFREGNTRPRVMRFVRRAFLGTDISSQDYLSRVTERIDFLKQKVYAWANRIRRYKRRVERYTQNRTFQSDERWVYRGWERPDQGVADTCLPDDDAMCSFWRSIWSAPVSHTEGDWTGKIEQACDLIPEMGALIISPQDVARAVRPLPNWKSPGPDGLHNFWIKWFQRSHAPLAAQFQSALESGLLPQFITTGITHLLHKSGSTADPKNYRPITCLPTIYKVLTSILRGKINKHIDSNSIMSVSQNGCRNGSRGTKELLLIDMAISQQVRRSRKDLSTCWIDYKKAYDSVPHTWLMRVLELYKVDTTLCTFLMTCMGQWRTVLRYPGCRNIQRNSEPIRIKRGIFQGDSLSPLWFCLALNPLSTLLEDSGLGYRLRRGGQVISHLLYMDDLKLFAPNNLQLMKLLKITETFSSAIRMEFGVDKCAVMHVKRGEIVESVGTQLSDFTNLRALSAAETYKYLGMSEALGINVTDMKQSLKERFFGRLKKVFNSLLSGGNKVRAFNSWVMPVLMYSFGILKWTQTELEALDRRVRTLLTANRMHHPRSSVMRLYIPRKCGGRGFLNAKTLHNREICSLREYFLETDVGMHRDVVEVDKGLTPLSLAKENWRKPVVLDTNDRMEVWQSKELHGRFYRALHGPDVDLLASVAWLRFGDLFGETEGFVCAIMDEVMMTNNYRRYIVKDGTVDICRACHRPGESIRHIISGCSRLANGEYLHRHNLVARIIHQQLALKYSLVESEVPYYRYVPDPVLENGNITLYWDRSIITDRTIVANKPDIVVVDRSERRAMIVDITVPHDENLVKAEKDKQIKYLDLAREVVDMWDVDSAIIVPIVVSANGLIAKSLDQHLRRLSLGSWIKGLIQKAVLLDTARIVRRFLSLEP

SEQ ID NO: 13577 - protein, 1102 aa, Furcula furcula
MRAYYEATEGGTSLTAYRNRMLSLFQALEPAVNVSAQRLSDQVRAIQRSHMLDGAVLDRLRSEVQGSRVTPCTSSSQAVAPAVNTAPAPRLVAISDDDRDDITTNVSTNISTQLRSTLEDVVREYRTMPCGLRPRLPRLPMHKRNRALVCALDSLLSSYFDSSEDLADAHSLLYCAAMTACRVARVKLQNTDAATRPRPAVPAWQCRIERRIGEARVLIGKLTCFREGNTRPRVMRFVRRAFSGTGVDPREYLSRVTERIDFLKQKVCAWASRIRRYRARADRYFQNNMFQRDQRWVYRSWERPSQTEGDVRRPDDDAMATFWRNIWSVPVTHSEGDWIGDVEQVCEPLPEMGAITIWPQDVADAVRLLPNWKAPGPDGLHNFWLKSIRSSHICLASLFQSALESGSLPEFMTTGITHLLHKTNSTTDPKNYRPITCLPTVYKTLTSILKTKIYRHVEDNSIMSASQNGCRSGARGTKELLLIDMAICQQARRNRKDLSTCWIDYKKAYDSVPHTWLMRVLELYKVNATLRTFLASCMRQWRTVLRYPGSRQTLGDGEPIRIERGIFQGDSLSPLWFCLALNPLSTLLKSSGLGYRLRRGGQVISHLLYMDDLKLFAPTELQQMGLLRVTETFSNSIRMEFGVDKCAVMHVKRGRIVESRSVQLSDSTDLKTLSATETYKYLGMSQALGINATDMKQSLRDRFLGRLRKVLKSLLSGGNRVRAYNGWVMPVLMYSFGILKWTQTELDTLDRTVRALLTTYRMHHPRSSVMRLYIPRKCGGRGFLNAKTLHNREIYNLREYFLHCGGEMHTGVVAVDNGLTPLSLAKGNWRKPVVLTTGDREAVWQSKELQGRFYRALHGPDVDFSASVAWLRFGDLFGETEGFVCAIMDEVVMTNNYRKYILRDGTIDICRACHRPGESLRHIISGCSRLANGEYLHRHNQVARIIHQQLALRYRLVTSEVPYYRYVPEPVLEDGHITLYWDRSIITDRTIVANRPDIVLIDRTERRAMIVDVTVPHDENLVKAEKDKECKYLDLAHEVVDMWDIDKAIIVPIVLSAHGLMAKSLDKHLKRLTLDGWIKGQIQKAVLLETARIVRRFLSLEP

SEQ ID NO: 13578 - protein, 1176 aa, Spodoptera exigua
MLTRAAARRARPSPPASSLSSASPPPGSSLIVSEVTPAAAAASSSSDEYYSPPTTPPPTRRRGGRRPPAGLGPRGPSASDRVPAAGGSVQRMRWTQSINENVMRAYYRATEGGNNLTAYRVRMLSLFQVLEPAVNVSAQRLSDQVRVIQRNRMLDDTVLDRLRTEMGSRASASSSRTVVPAMMPPSNHGIVGTAADEESTDTAAYVSTQCSNEMRSALECAIREYRYMSPELRPRLPRLPMHNKNKALVAALDSQLSNHFDDCEDLGDIHSMMYCAAVAACRVAHVKLPTSNVATRPKLAVPAWQRRIELRIAGARALIGKLICFREGNTRPRVMRFVRRAFSGTDISPQDYMSRITERIDFLKQKVYAWANRIRRYKRRVQRYTQNRTFRSNERWVYRAWERPDQGVTDTRLPDDDAMCSFWRSIWSVPVSHTEGDWIREVERACDPIPQMGAININPQDVARAVRPLPNWKSPGPDGLHNFWIKWFTRSHARLASQFQAALESGSLPQFLTTGVTHLLHKSGSTTEPKNYRPITCLPTVYKVLTSILRSKINSHIDKNNIMSTAQNGCNSGSRGTKELLLIDMTISQQVRRSRKDLSTCWIDYKKAYDSVPHTWLMRVLELYKIDTKLRTFLMSCMRQWSTVLRYPGCRHIQTNSETVRIERGIFQGDSLSPLWFCLALNPLSTLLENSGLGYRLKRGGQVISHLLYMDDLKLFAPNRLQLMELLKLTETFSSAIRMEFGVDKCAVMHVKRGEIVESVGTQLTDSINLRSLSTTETYKYLGMSEALGINVTDMKQSLKERFFGRLKKVFNSFLSGGNKVRAFNDWVMPVLMYSFGVLKWSQTELDALDRRVRTMLTAYRMHHPRSSVMRLYIPRKCGGRGFLNAKTLHNREVCSLREYFLAADVGMHRDVVAVDKGLTPLSLASENWRKPVVLDTNARREVWQSKELHGRFFRALHGPDVDQLASVSWLRSGDLFGETEGFVCAIMDEVIMTNNYRRFIVKDGTADICRACHRPGESIRHIISGCSRLANGEYLHRHNLVARIIHQQLALKYSLVGSEVPYYRYETDPVLENGHITLYWDRSIITDRTIVANKPDIVVVDRNERRAMIVDIAVPHDENLVKAEKDKLIKYIDLAREVVDMWDVDSAVIVPIVVSANGLIAKSLDQHLKRLSLGG

SEQ ID NO: 13579 - protein, 1195 aa, Mamestra configurata
MLTTSRARHLATHPSPSASSLSSASPPPEPSPTVSAVTPAVAAASSSSDEYFSPPTTPPPARRRRGRRPPDGLGPRGPPASDRVPAPGGSVQRMRWTQSINENVMRSYFGATEGGTNLTAYRGRMLSLFQVLEPAVNVSAQRLSDQVRVIQRNRMLDDSVLDRLRMEMCGHVITPPSQTVAPPQSQISSHADEESNDRVTNVSTQCNEELRSALECAIREYRYVPPELRPRLPRLPMHNKNRALVAALDSQLSNYFDDCEDLTDTHSIMYCAAVAACRVAHVKITNDRVTRPKPAVPAWQCRIERRIGGARALIGKLICFREGNTRPRVMRFVRRAFSGTDISPRDYMSRVTERIDFLKQKVYAWANRIRRYRRRVERYTQNRTFRSNERWVYRVWEQPDQGVTDTRLPDDDAMCSFWRNIWSVPVSHTEGDWIREVERACDPLPEMGAITISPQDVARAVRPLPNWKSPGPDGLHNFWIKWLQRSHARLASQYQTALESGSLPEFLTTGVTHLLHKSGSTAEPKNYRPITCLPTVYKVLTSILRAKINNHINSNNIMSVSQNGCRNGSRGTKELLLIDMAISQQVRRSRKDLSTCWIDYKKAYDSVPHTWLMRVLELYKIDTMLRTFLMSCMGQWRTVLRYPGCRNIQRNSEPVRIERGIFQGDSLSPLWFCLALNPLSTLLENSGLGYRLKRGGQVISHLLYMDDLKLFAPSNLQLMELLKVTETFSSAIRMEFGVDKCAVMHVKRGEIMESVGTQLSDSINLRSLSSTETYKYLGMSEALGINVTDMKQSLKERFFGRLKKVFNSLLSGGNKVRAFNGWVMPVLMHSFGVLKWTQTELDALDRRVRTLLTAYRMHHPRSSVMRLYIPRKCGGRGFLNAKTLHNREICSLREYFLAVDVGMHRDVVAVDKGLTPLSLANENWRKPAVLDTNDRRAVWQSKELHGRYFRALHGPDVDQLASVAWLRFGDLFGETEGFVCAIMDEVIMTNNYRRFIVKDGTVDICRACHRPGESIRHIVSGCSRLANGEYLHRHNLVPSIIHQQLALKYSLVESEVPYYRYAPDPVLDNGNITLYWDRSIITDRTIVANKPVVVDRILRRAMIVDITVPHDENLVKAEKDKQIKYIDLAREVVDMWDVDSAIIVPIVVSANGLIATSLDQHLRRLSLDSWIKGLIQKAVLLDTARIVRRFLSLEP

SEQ ID NO: 13580 - protein, 1132 aa, Amphipyra berbera
MGPRGPPASDRVPAPGGSVQRMRWTLTMNENCMRAYFGATEGGTNLTAYRGRMLSLFQVLEPTVNVSAQRLSDQVRVIQRDHRLTDAALDRLRSEVQSNRIISLQSQTAAQPQTPTMVPPLPIHADEESDDRVTNVSTQCNEQLRSALELAIREYRFTPPNIRPRIPRLPMHRKNRALMCALDSLLSSYFDNSENLEDTHSILYCAAVAACRVAHAKFDNNDRATRPKPAVPAWQCRIERRINEARALIGKLICFREGNTRPRVMRFVRRAFSGTDINPRDYLSRVTERIDFLKQKVYAWANRIRRYKRRVERYTQNRMFHSDERWVYRTWERPDHDVSYTHLPDNDVMNTFWRNIWSMPVTHTEGDWMQEVQRACEPIEEMGDITIVPQDVTSAVRPMANWKSPGPDGLHNFWLKWLRSSHARLASQFQSSLESGSLPEFLTTGVTHLLHKSGSTAEPKNYRPITCLPTVYKLLTSILRAKINSHIINNSIMSVSQNGCKNGSRGTKELLLIDMAISQQVRRSRKDLSTCWIDYKKAYDSVPHTWLMRVLELYKVNTTLCAFLTSCMGQWRTVLHYPGCRQIQGRGEPIRIERGIFQGDSLSPLWFCLALNPLSTLLEGSGLGYRLRRGGQVISHLLYMDDLKLFAPNNLQLMKLLKVTETFSNSIRMEFGVDKCAVMHVKRGGIMESVGTQLSDSIHLRPLSSTETYKYLGMSEALGINETDMKQSLRERFYGRLKKVLKSLLSGGNKVRAFNGWVMPVLMYSFGILKWTQTELDALDRRVRTLLTAYRMHHPRSSVMRLYIPRKCGGRGFLNAKTLHNREVCSLREYFLQADVGMHRDVVAVDKGYTPLSLAKENWRKPVVLDTNGRREVWQSKELHGRFYRALYGPDVDFLASVAWLRFGDLFGETEGFVCAIMDEVMMTNNYRKYIVKDGTVDICRACHCPGESIRHIISGCSRLANGEYLHRHNLVARIIHQQLALKYNLVDAEVPYYKYVPDPVLENGHITLYWDRSIITDRTIVANKPDIVVIDRSERLTMIVDITVPHDENLVKAEKDKEIKYQDLAHEVVDMWEVDSAVIVPIVVTANGLIAKSLDQHLTRLALGSWVKGLIQKAVLLDTARIVRKFLSLRP

SEQ ID NO: 13581 - protein, 1076 aa, Amphipyra berbera
MGPRGPPASDRVPAPGGSVQRMRWTLTMNENCMRAYFGATEGGTNLTAYRGRMLSLFQVLEPTVNVSAQRLSDQVRVIQRDHRLTDAALDRLRSEVQSNRIISLQSQTAAQPQTPTVVPPLPIHADEESDDRVTNVSTQCNEQLRSALELAIREYRFTPPNIRPRIPRLPMHRKNRALMCALDSLLSSYFDNSENLEDTHSILYCAAVAACRVAHAKFDNNDRATRPKPAVPAWQCRIERRINEARALIGKLICFREGNTRPRVMRFVRRAFSGTDINPRDYLSRVTERIDFLKQKVYAWANRIRRYKRRVERYTQNRMFHSDERWVYRTWERPDHDVSDTHLPDNDVMNTFWRNIWSMPVTHAEGDWMQEVQRACEPIEEMGDITIVPQDVTSAVRPMANWKSPGPDGLHNFWLKWLRSSHARLASQFQSSLESGSLPEFLTTGVTHLLHKSGSTAEPKNYRPITCLPTVYKLLTSILRAKINSHIINNSIMSVSQNGCKNGSRGTKELLLIDMAISQQVRRSRKDLSTCWIDYKKAYDSVPHTWLMRVLELYKVNTTLCAFLTSCMGQWRTVLHYPGCRQIQGRGEPIRIERGIFQGDSLSPLWFCLALNPLSTLLEGSGLGYRLRRGGQVISHLLYMDDLKLFAPNNLQLMKLLKVTETFSNSIRMEFGVDKCAVMHVKRGGIMESVGTQLSDSIHLRPLSSTETYKYLGMSEALGINETDMKQSLRERFYGRLKKVLKSLLSGGNKVRAFNGWVMPVLMYSFGILKWTQTELDALDRRVRTLLTAYRMHHPRSSVMRLYIPRKCGGRGFLNAKTLHNREVCSLREYFLQADVGMHRDVVAVDKGFTPLSLAKENWRKPVVLDTNGRREVWQSKELHGRFYRALYGTDVDFLASVAWLRFGDLFGETEGFVCAIMDEVMMTNNYRKYIVKDGTVDICRACHCPGESIRHIISGCSRLANGEYLHRHNLVARIIHQQLALKYNLVDAEVPYYKYVPDPVLEYGHITLYWDRSIITDRTIVANKPDIVVIDRSERLTMIVDITVPHDENLVKAEKDKEIKYQDLAHEVVDMWEVD

SEQ ID NO: 13582 - protein, 1213 aa, Amphipyra berbera
MLTRSRTETQDTRTRPRPSASSLSSASQPPDSSIVSDVTPAAAVASSSSDEFYSPPTSPPPPPPPPPPRRGRRGRGRPPACMGPRGPPASDRVPAPGGSVQRMRWTLTMNENCMRAYFGATEGGTNLTAYRGRMLSLFQVLEPTVNVSAQRLSDQVRVIQRDHRLTDAALDRLRSEVQSNRIISLQSQTAAQPQTPTVVPPLPIHADEESDDRVTNVSTQCNEQLRSALELAIREYRFTPPNIRPRIPRLPMHRKNRALMCALDSLLSSYFDNSENLEDTHSILYCAAVAACRVAHAKFDNNDRATRPKPAVPAWQCRIERRINEARALIGKLICFREGNTRPRVMRFVRRAFSGIDINPRDYMSRVTERIDFLKQKVYAWANRIRRYKRRVERYTQNRMFHSDERWVYRTWERPDHDVSDAHLPDNDVMNTFWRNIWSMPVTHTEGDWMQEVQRACEPIKEMGDITIVPQDVTSAVRPMANWKSPGPDGLHNFWIKWLRSSHARLASQFQSSLESGSLPEFLTTGVTHLLHKSGSTAEPKNYRPITCLPTVYKLLTSILRAKINSHILYNSIMSVSQNGCKNGSRGTKELLLIDMAISQQVRRSRKDLSTCWIDYKKAYDSVPHTWLMRVLELYKVNTTLCAFLTSCMGQWRTVLHYPGCRQIQGRGEPIRIERGIFQGDSLSPLWFCLALNPLSTLLEGSGLGYRLRRGGQVISHLLYMDDLKLFAPNNLQLMKLLKVTETFSNSIRMEFGVDKCAVMHVKRGGIMESVGTQLSDSIHLRSLSSTETYKYLGMSEALGINETDMKQSLRERFYGRLKKVLKSLLSGGNKVRAFNGWVMPVLMYSFGILKWTQTELDALDRRVRTLLTAYRMHHPRSSVMRLYIPRKCGGRGFLNAKTLHNREVCSLREYFLQADVGMHRDVVAVDKGFTPLSLAKENWRKPVVLDTNGRREVWQSKELHGRFYRALHGPEVDFLASVAWLRFGDLFGETEGFVCAIMDEVMMTNNYRKYIVKDGTVDICRACHCPGESIRHIISGCSRLANGEYLHRHNLVARIIHQQLALKYNLVDAEVPYYKYVPDPVLENGHITLYWDRSIITDRTIVANKPDIVVIDRTERLTMIVDITVPHDGNLVKAEKDKEIKYQDLAHEVVDMWEVDSAVIVPIVVTANGLIAKSLDHHLTRLSLGSWVKGLIQKAVLLDTARIVRKFLSLRP

SEQ ID NO: 13583 - protein, 1205 aa, Amphipyra berbera
MLTRSRAKALTETTRPRSSAPSLSSASQPPDSSIVSDVTPAAAVASSSSDEYFSPPTSPPPARRRGRGRPPDSLRPRGPLASDRVPAAGGSVQRMRWTPTMNENCMRAYFGATEGGTNLTAYRGRMLSLFQVLEPTVNVSAQRLSDQVRVIQRDHRLTDAALDRLRSEVQSNAIISLQSQTAAQPRTPTVVPPLPTHANEESDDRVTNVSTQCNEQLRSALELAIREYRFTPPNIRPRIPRLPMHRKNRALMCALDSLLSSYFDNSENLEDTHSILYCAAVAACRVAHAKFDNNDKATRPKPAVPAWQCRIERRINEARALIGKLICFREGNTRPRVMRFVRRAFSGTDINPRDYMSRVTERIDFLKQKVYAWANRIRRYKRRVERYTQNRMFHSDERWLYRTWERPDHDVNDAHPPDNDVMNTFWRNIWSMPVTHTEGDWMQEVQRACEPIKEMGDITIVPQDVTSAVRPMANWKSPGPDGLHNFWIKWLRSSHARLASQFQSSLESGSLPEFLTTGVTHLLHKSGSTAEPKNYRPITCLPTVYKLLTSILRAKINSHILYNSIMSVSQNGCKNGSRGTKELLLIDMAISQQVRRSRKDLSTCWIDYKKAYDSVPHTWLMRVLELYKVNTTLCAFLTSCMGQWRTVLHYPGCRQIQGRGEPIRIERGIFQGDSLSPLWFCLALNPLSTLLEGSGLGYRLRRGGQVISHLLYMDDLKLFAPNNLQLMKLLKVTETFSNSIRMEFGVDKCAVMHVKRGGIMESVGTQLSDSIHLRSLSSTETYKYLGMSEALGINETDMKQSLRERFYGRLKKVLKSLLSGGNKVRAFNGWVMPVLMYSFGILKWTQTELDALDRRVRTLLTAYRMHHPRSSVMRLYIPRKCGGRGFLNAKTLHNREVCSLREYFLQADVGMHRDVVAVDKGFTPLSLAKENWRKPVVLDTNGRREVWQSKELHGRFYRALHGPDVDFLASVAWLRFGDLFGETEGFVCAIMDEVMMTNNYRKYIVKDGTVDICRACHCPGESIRHIISGCSRLANGEYLHRHNLVARIIHQQLALKYNLVDAEVPYYKYVPDPVLENGHITLYWDRSIITDRTIVANKPDIVVIDRTERLTMIVDITVPHDENLVKAEKDKEIKYQDLAHEVVDMWEVDSAVIVPIVVTANGLIAKSLDHHLTRLSLGSWVKGLIQKAVLLDTARIVRKFLSLRP

SEQ ID NO: 13584 - protein, 1111 aa, Amphipyra berbera
MRWTQSMNENCMRAYFGATEGGTNLTAYRGRMLSLFQVLEPAVNVSAQRLSDQVRVIQRDHRLTDVALDRLRSEVQSNRIISPQSQTAAQPRAPTVVPPPPIHADEESNDRVTNVSTQCNEQLRSALELAIREYRFTPPNLRPRIPRLPMHRKNRALMCALDSLLSSYFDNSENLEDTHSILYCAAVAACRVAHAKFDNNDRATRPKPTVPAWQCRIERRINEARALIGKLICFREGNTRPRVMRFVRRAFSGTDINPRDYMSRVTERIDFLKQKVYAWANRIRRYKRRVERYTQNRMFHSDERWVYRTWERPDHDVSDTHLPDNDVMNTFWRNIWSMPVTHTEGDWMQEVQRPCEPIEEMGDITIVPQDVTSAVRPMANWKSPGPDGLHNFWLKWLRSSHARLASQFQSSLESGSLPQFLTTGVTHLLHKSGSTAEPKNYRPITCLPTVYKLLTSILRSKISKHIANNSIMSVSQNGCKNGSRGTKELLLIDMAISQQVRRSRKNLSTCWIDYKKAYDSVPHTWLMRVLELYKVNTTLCAFLTSCMGQWRTVLHYPGCRQIQGRGEPIRIERGIFQGDSLSPLWFCLALNPLSTLLEGSGLGYRLRRGGQVISHLLYMDDLKLFAPNNLQLMKLLKVTETFSNSIRMEFGVDKCAVMHVKRGGIMESVGTQLSDSIHLRSLSSTETYKYLGMSEALGINETDMKQSLRERFYGRLKKVLKSLLSGGNKVRAFNGWVMPVLMYSFGILKWTQTELDALDRRVRTLLTAYRMHHPRSSVMRLYIPRKCGGRGFLNAKTLHNREVCSLREYFLQADVGMHRDVVAVDKGFTPLSLAKENWRKPVVLDTNGRREVWQSKELHGRFYRALYGPDVDFLASVAWLRFGDLFGETEGFVCAIMDEVMMTNNYRKYIVKDGTVDICRACHCPGESIRHIISGCSRLANGEYLHRHNLVARIIHQQLALKYNLVDAEVPYYKYVPDPVLENGHITLYWDRSIITDRTIVANKPDIVVIDRSERLAMIVDITVPHDENLVKAEKDKEIKYQDLAHEVVDMWEVDSAVIVPIVVTANGLIAKSLDQHLMRLSLGSWVKGLIQKAVLLDTARIVRKFLSLRP

SEQ ID NO: 13585 - protein, 1110 aa, Amphipyra berbera
MRWTQSINENVMRAYYGATEGGINLTAYRERMLFLFQVLEPAINVSAQRLSDQVRVVQRNRRLDDTVLERLRSEARNSQTVTFPVQAAVQMQPIAVPPRPIHVDGEGDGEAINVSNQCSEELRSALDDAILEFRTTPPEIRPRLPRLPMHGKNRALMCALDSLLSNYFDGSEDLADTHSILYCAAIAACRVAHVKFTENERATRPKPAVPAWQSRIERRIGGARVLIGKLICFREGNNRPRVMRFVRRAFSGTDISPRDYMSRVTERIDFLKQKVYAWANRIRRYKRRVERYTQNRIFQSDQRRVYRAWERPDPGGGDVRLPDDDALSSFWRSIWSVPIAHTEDGWMRDIEQACEPIAEMEPITITPQDVADAARPLPNWKSPGPDGLHNFWLKWLRSSHARLASQLQSSLESGSLPQFLTTGVTHLLYKSGSTAEPKNYRPITCLPTVYKLLTSILRVKITTHIDNNCIMSASQNGCRKGSRGTKELLLIDMAISQQVRRSQKDLSTCWIDYKKAYDSVPHSWLMRVLELYKINTTLRTFLMSCMRHWRTVLRYPGCRRIRGSGEQIRIERGIFQGDSLSPLWFCLALNPLSTLLEGTGLGYQLRRGGQVISHLLYMDDLKLFAPTDLQLMELLKVTENFSNSIRMEFGVDKCAVMHVKRGRIAESEGIQLPNSVQLRSLSPTETYKYLGMSEALGISETDMRQSLRERFFGRLNKLLKSLLSGGNKVRAFNGWVMPVLMYSFGTLKWTQADLDALDRRVRALLTAHRMHHPRSSVMRLYIPRKCGGRGFLNVKTLHNREVYSLREYFLQAEGVMHRDVVAVDKGFTPLALARENWRKPAVLSTNDREVVWQSKELHGRYYRALHGPDVDFSASVSWLRSGNLFGETEGFVCAIMDEVMMTNNYRKYIVKDGTVDICRACHRPGESIRHIVSGCSRLANGEYLHRHNLVARIIHQQLALKYNLVESEVPYYRYVPDPVLENGHATLYWDRSIITDRTIVANKPDIVVIDRSERRTMIVDITVPHDENLVKAEKDKQIKYLDLAHEVVGMWDVDSAVIVPIVVTANGIIAKSLDIHLMRLSLGGWIKGLIQRAVLLDTARIVRRFLSLEP

SEQ ID NO: 13586 - protein, 1111 aa, Amphipyra berbera
MRWTQSMNENCMRAYFGATEGGTNLTAYRGRMLSLFQVLEPAVNVSAQRLSDQVRVIQRDHRLTDDALDRLRSEVQSNCIISLQSQTAAQPQVPPMVPPQPIRADEESDDRVTIVSAQCNEQLRSALELAIREYRFTPPNLRPRIPRLPMNRQNRALMCALDSLLSNYFDNSEGLEDTHSILYCAAVAACRVVHVKFDNNDRATRPKPAVPAWQCRIERRINEARALIGKLICFREGNTRPRVVRFVRRAFSGTDINPREYMSRVTERIDFLKQKVYAWANRIRRYKRRVERYTQNRMFHSDERWVYRTWERPEHDVSDTHLPDNDVMNTFWRNIWSMPVTHTEGDWMQEVQRACEPIEEMGDIIIVPQDVTSAVRPMANWKSPGPDGLHNFWLKWLRSSHTRLASQFQSSLESGSLPPFLTTGITHLLHKSGSTAEPKNYRPITCLPTIYKLLTSILRAKINTHIINNSIMSASQNGCKNGSRGTKELLLIDMAISQQVRRSRKDLSTCWIDYKKAYDSVPHTWLMRVLELYKVNTTLCAFLTSCMGQWRTVLHYPGCRQIQGRGEPIRIERGIFQGDSLSPLWFCLALNPLSTLLEGSGLGYRLRRGGQVISHLLYMDDLKLFAPNNLQLMKLLKVTETFSNSIRMEFGVDKCAVMHVKRGGIMESVGTQLSDSIHLRSLSSTETYKYLGMSEALGINETDMKQSLRERFYGRLKKVLKSLLSGGNKVRAFNGWVMPVLMYSFGILKWTQTELDALDRRVRTLLTAYRMHHPRSSVMRLYIPRKCGGRGFLNAKTLHNREVCSLREYFFQADVGMHRDVVAVDKGFTPLSLAKENWRKPVVLDTNGRREVWQSKELHGRFYRALHGPDVDFLASVAWLRFGDLFGETEGFVCAIMDEVMMTNNYRKYIVKDGTVDICRACHCPGESIRHIISGCSRLANGEYLHRHNLVARIIHQQLALKYNLVDAEVPYYKYVPDPVLENSHITLYWDRSIITDRTIVANKPDIVVIDRTERLTMIVDITVPHDENLVKAEKDKEIKYQDLAHEVVDMWEVDSAVIVPIVVTANGLIAKSLDHHLTRLSLGSWVKGLIQKAVLLDTARIVRKFLSLRP

SEQ ID NO: 13587 - protein, 868 aa, Amphipyra berbera
MRFVKRAFSGTGISPRKYTSRATERIDFLKQKVCAWASRIRRYKRRVVRYTQNRMFQCDQRWVYRSWERPDQSVSGGRLPDDDAMSSFWRSIWSVPVIHTEGDWMRDIERTCESIEEMREIVISPQDVADAVRPLPNWKSPGPDGLHNFWMKWLRSSHARLASQFQSSLESGSLPQFLTTGVTHLLHKSGSTAEPKNYRPITCLPTVYKLLTSILRSKINTHIGNNSVLSSSQNGCRNGSRGTKELLLIDTAITQQVRRSQKSLSTCWIDYKKAYDSVPHAWLMRVLELYKINTTLRTFLRSRMGQWRTVLRYPGCQPIRGSGEPIRIERGIFQGDSLSPLWFCLALNPLSTLLEGSGLGYPLRRGGQVVSHLLYMDVLKLFAPTKLQLVDLLKVTETYSNSIRMEFGVDKCVVMHVRRGRIMESEGLQLSDSIHLSPLSANDTYKYLGMSEGLGISEADMKQSLRERFFGRLKKVLKSLLSGGNKVRAFNGWVMPVLMYSFGILKWTQTELDALDRRVRTLLTANQMHHPRSSVMRLYIPRKCGGRSLLNAKTLHNREVCSLREFFLHADAGMHRDVVAVDKGLTPLSLARENWRKPVVLSTNDRREIWQSKELHGRFYRALHGPDVDFLASVSWLRFGDLFGETEGFVCAIMDEVIMTNNYRKYIVKDGTVDICRACHCPGESLRHIISGCSRLANGEYLHRHNQVARIIHQQLALKYNLVESEVPYYRYVPDPVLENGRITLYWDRSIITDRTIVANKPDIVVIDRSERRTMIVDVTIPHDGNLVKAEKDKQIKYLDLAHEVVNMWDVESATIVPIVVTANGLMAKSLDKHLMRLSLGRWIMGLIQKAVLLDTARIVRRFLSLEP

SEQ ID NO: 13588 - protein, 1197 aa, Noctua janthe
MLTRSAARRARLSPPDPSLSSASPPPESSPVVSAVTPAVAVASSSSDEYFSPPTTPPPVRRRGGRRPPDGLGPRGPPASDRVPAPGGSVPRMRWTQSINANVMRAYYGATEGGNNLTAYRVRMLSLFQVLEPAVNVSAQRLSDQVRVIQRNGMLDDTVLDRLRTEMQSSHVIATPPQTVVPPQSTIIPTHDNNVSNDMVTNVSTQCNEEMRCALEGAIREYRFMQPDLRPRVPRLPMHNKNRVLVAVLDSQLSNYFDNCEDLTDAHSVLYCAAVAACRVAHVKFSDDRATRPKPAVPSWQYRIERRIGEARALIGKLICFREGNTRPRVMRFVRRAFSGTDISARDYMSRVTERIDFLKQKVYAWANRIRRYKRRVDRYTQNRTFQRDERWVYRAWERPDQGVADTRLPDDDAMCSFWRSIWSVPVSHTEGEWTREVERACDLVPEMGAITISPQDVVRAVRPLPNWKSPGPDGLHNFWIKWFTRSHARLAILFQSALESGSLPEFLTTGITHLLHKSGSTAEPKNYRPITCLPTVYKVLTSILRAKINKHIDDNSVMSASQNGCRNGSRGTKELLLIDMAISQQVRRSRKDLSTCWIDYKKAYDSVPHTWLMRVLELYKIDATLRTFLMSCMGQWRTVLRYPGCRQIQRNSEPIRIERGIFQGDSLSPLWFCLALNPLSTLLEDSGLGYRLRRGGQVISHLLYMDDLKLFAPKDLQLMELLKVTETFSSAIRMEFGVDKCAVMHVKRGEIVESVGTQLSDSINLRSLSATETYKYLGMSEALGINVADMKQSLKERFFGRLKKVFNSLLSGGNKVRAFNGWVMPVLMYSFGILKWTQTELDALDRRVRTLLTAYRMHHPRSSVMRLYIPRRCGGRGFLNAKTLHNREICSLREYFLETDVGMHRDVVAVDKGLTPLSLAKENWRKPVVLDTNDRMEVWQSKELHGRFFRALHGPDVDLSASVAWLRSGDLFGETEGFVCAIMDEVMMTNNYRRFIVKDGTVDICRACHRPGESIRHIISGCSRLANGEYLHRHNLVARIIHQQLALKYNLVESEVPYYKYVPDPVLENGSITLYWDRSIITDRTIVANKPDIVVVDRSERRAMIVDITVPHDENLVKAEKDKQIKYLDLAREVVDMWDVDSAIIVPIVVSAHGLIAKSLNQYLRRLSLGSWIKGLIQKAVLLDTARIVRRFLSLEP

SEQ ID NO: 13589 - protein, 1197 aa, Noctua janthe
MLMRSATRRARLSPPDPSLSSASPPPESSPIVSAVTPAVAVASSSSDEYFSLPTTPPPVRRRGGRRPPDGLGPRGSPASDRVPAPGGSVPRMRWTQSINANVMRAYYGATEGGNNLTAYRVRMLSLFQVLEPAVNVSAQRLSDQVRVIQRNGMLDDTVLDRLRTEMQSSHVIATPPQTVVPPQSTIIPTHDNNVSNDMVTNVSTQCNEEMRCALEGAIREYRFMQPDLRPRVPRLSMHNKNKVLVAVLDSQLSNYFDNCENLTDAHSVLYCAAVATCRVAHVKFSDDRATRPKPAVPSWQYRIERRIGEARALIGKLICFREGNTRPRVMRFVRRAFSGTDISARDYMSRVTERIDFLKQKVYAWANRIRRYKRRVDRYTQNRTFQRDERWVYRAWERPDQGVADTHLPDDDAMCSFWRSIWSVPVSHTEGEWTREVERACDLVPEMGAITISPQDVVRAVRPLPNWKSPGPDGLHNFWIKWFTRSHARLAILFQSALESGSLPEFLTTGITHLLHKSGSTAEPKNYRPIACLPTVYKVLTSILRAKINKHIDDNSVMSASQNGCRNGSRGTKELLLIDMAISQQVRRSRRDLSTCWIDYKKAYDSVPHTWLMRVLELYKVDSTLRIFLMSCMGQWRTVLRYPGCRQIQRNSEPIRIERGIFQGDSLSPLWFCLALNPLSTLLEDSGLGYRLRRGGQVISHLLYMDDLKLFAPNDLQLMELLKVTETFSSAIRMEFGVDKCAVMHVKRGEIVESVGTQLSDSINLRSLSATETYKYLGMSEALGINVADMKQSLKERFFGRLKEVFNSLLSGGNKVRAFNGWVMPVLMYSFGILKWTQTELDALDRRVRTLLTTYRMHHPRSSVMRLYIPRRCGGRGFLNAKTLHNREICSLREYFLETDVGMHRDVVAVDKGLTPLSLAKENWRKPVVLDTNDRMEVWQSKELHGRFFRALHGPDVDLPASVAWLRSGDLFGETEGFVCAIMDEVMMTNNYRRFIVKDGTVDICRACHRPGESIRHIISGCSRLANGEYLHRHNLVARIIHQQLALKYNLVESEVPYYKYVPDPVLENGNITLYWDRSIVTDRTIVANKPDIVVVDRSERRAMIVDITVPHDGNLVKAEKDKQIKYLDLAHEVVDMWDVDSAIIVPIVVSAHGLIAKSLDQYLRRLSLGSWIKGLIQKAVLLDTARIVRRFLSLEP

SEQ ID NO: 13590 - protein, 1197 aa, Noctua janthe
MLTRSATRRARLSPPDPSLSSASPPPESSPIVSAVTPAVAVAPSSSDEYFSPPTTPPPVRRRGGRRPPDGLGPRGPPASDRVPAPGGSVPRMRWTQSINANVMRAYYGATEGGNNLTAYRVRMLSLFQVLEPAVNVSAQRLSDQVRVIQRNGMLDDTVLDRLRTEMQSSHVIATPPQTVVPPQSTIIPTHDNNVSNDMVTNVSTQCNEEMRCALEGAIREYRFMQPDLRPRVPRLPMHNKNKVLVAVLDSQLSNYFDNCENLTDAHSVLYCAAVAACRVAHVKFSDDRATRPKPAVPSWQYRIERRIGEARALIGKLICFREGNTRPRVMRFVRRAFSGTDISARDYMSRVTERIDFLKQKVYAWANRIRRYKRRVDRYTQNHTFQRDERWVYRAWERPDRGVADTHLPDDDAMCSFWRSIWSVPVSHTEGEWTREVERACDLVPEMGAITISPQDVVRAVRPLPNWKSPGPDGLHNFWIKWFTRSHARLAILFQSALESGSLPEFLTTGITHLLHKSGSTAEPKNYRPIACLPTVYKVLTSILRAKINKHIDDNSVMSASQNGCRNGSRGTKELLLIDMAISQQVRRSRRDLSTCWIDYKKAYDSVPHTWLMRVLELYKVDSTLRIFLMSCMGQWRTVLRYPGCRQIQRNSEPIRIERGIFQGDSLSPLWFCLALNPLSTLLEDSGLGYRLRRGGQVISHLLYMDDLKLFAPNDLQLMELLKVTETFSSAIRMEFSVDKCAVMHVKRGEIVESVGTQLSDSINLRSLSATETYKYLGMSEALGINVADMKQSLKERFFGRLKKVFNSLLSGGNKVRAFNGWVMPVLMYSFGILKWTQTELDALDRRVRTLLTTYRMHHPRSSVMRLYIPRRCGGRGFLNAKTLHNREICSLREYFLETDVGMHRDVVAVDKGLTPLSLAKENWRKPVVLDTNDRMEVWQSKELHGRFFRALHGPDVDLPASVAWLRSGDLFGETEGFVCAIMDEVMMTNNYRRFIVKDGTVDICRACHRPGESIRHIISGCSRLANGEYLHRHNLVARIIHQQLALKYNLVESEVPYYKYVPDPVLENGNITLYWDRSIVTDRTIVANKPDIVVVDRSERRAMIVDITVPHDGNLVKAEKDKQIKYLDLAHEVVDMWDVDSAIIVPIVVSAHGLIAKSLDQYLRRLSLGSWIKGLIQKAVLLDTARIVRRFLSLEP

SEQ ID NO: 13591 - protein, 974 aa, Noctua janthe
MQPDLRPRVPRLPMHNKNRVLVAVLDSQLSNYFDNCEDLTDAHSVLYCAAVAACRVAHVKFSDDRATRPKPAVPSWQYRIERRIGEARALIGKLICFREGNTRPRVMRFVRRAFSGTDISARDYMSRVTERIDFLKQKVYAWANRIRRYKRRVDRYTQNRTFQRDERWVYRVWERPDQGVADTRLPDDDAMCSFWRSIWSVPVSHTEGEWTREVERACDLVPEMGAITISPLDVVRAVRPLPNWKSPGPDGLHNFWIKWFTRSHARLAILFQSALESGSLPEFLTTGITHLLHKSGSTADPKNYRPITCLPTVYKVLTSILRAKINKHIDDNSVMSASQNGCRNGSRGTKELLLIDMAISQQVCRSRKDLSTCWIDYKKAYDSVPHTWLMRVLELYKIDATLRTFLMSCMGQWRTVLRYPGCRQIQRNSEPIRIERGIFQGDSLSPLWFCLALNPLSTLLEDSGLGYRLRRGGQVISHLLYMDDLKLFAPNDLQLMELLKVTETFSSAIRMEFGVDKCAVMHVKRGEIVESVGTQLSDSINLRSLSATETYKYLGMSEALGINVADMKQSLKERFFGRLKKVFNSLLSGGNKLRAFNGWVMPVLMYSFGILKWTQTELDALDRRVRTLLTAYRMHHPRSSVMRLYIPRRCGGRGFLNAKTLHNREICSLREYFLETDVGMHRDVVAVDKGLTPLSLAKENWRKPVVFDTNDRMEVWQSKELHGRFFRALHGPDVDLSASVAWLRSGDLFGETEGFVCAIMDEVMMTNNYRRFIVKDGTVDICRACHRPGESIRHIISGCSRLANGEYLHRHNLVARIIHQQLALKYNLVESEVPYYKYVPDPVLENGSITLYWDRSIITDRTIVANKPDIVVVDRSERRAMIVDITVPHDENLVKAEKDKQIKYLDLAREVVDMWDVDSAIIVPIVVSAHGLIAKSLDQYLRRLSLGSWIKGLIQKAVLLDTARIVRRFLSLEP

SEQ ID NO: 13592 - protein, 1199 aa, Noctua janthe
MLTRSAARRARLSPPDPSLSSASPPPESSPVVSAVTPAVAVASSSSDEYFSPPTTPPPVRRRGGRRPPDGLGPRGPPASDRVPAPGGSVPRMRWTQSINANVMRAYYGATEGGNNLTAYRVRMLSLFQVLEPAVNVSAQRLSDQVRVIQRNGMLDDTVLDRLRTEMQSSHVIATPPQTVVPPQSTIIPTHDNNVSNDMVTNVSTQCNEEMRCALEGAIREYRFMQPDLRPRVPRLPMHNKNRVLVAVLDSQLSNYFDNCEDLTDAHSVLYCAAVAACRVAHVKFSDDRATRPKPAVPSWQYRIERRIGEARALIGKLICFREGNTRPRVMRFVRRAFSGTDISARDYMSRVTERIDFLKQKVYAWANRIRRYKRRVDRYTQNRTFQRDERWVYRAWERPDQGVADTRLPDDDAMCSFWRSIWSVPVSHTEGEWTREVEPACDLVPEMGAITISPQDVVRAVRPLPNWKSPGPDGLHNFWIKWFTRSHARLAILFQSALESGSLPEFLTTGITHLLHKSGSTAEPKNYRPITCLPTVYKVLTSILRAKINKHIDDNSVMSASQNGCRNGSRGTKELLLIDMAISQQVRRSRKDLSTCWIDYKKAYDSVPHTWLMRVLELYKIDATLRTFLMSCMGQWRTVLRYPGCRQIQRNSEPIRIERGIFQGDSLSPLWFCLALNPLSTLLEDSGLGYRLRRGGQVISHLLYMDDLKLFAPNDLQLMELLKVTETFSSAIRMEFGVDKCAVMHVKRGEIVESVGTQLSDSINLRSLSATETYKYLGMSEALGINVADMKQSLKERFFGRLKKVFNSLLSGGNKVRAFNGWVMPVLMYSFGILKWTQTELDALDRRVRTLLTAYRMHHPRSSVMRLYIPRRCGGRGFLNAKTLHNREICSLREYFLETDVGMHRDVVAVDKGLTPLSLAKENWRKPVVLDTNDRMEVWQSKELHGRFFRALHGPDVDLSASVAWLRSGDLFGETEGFVCAIMDEVMMTNNYRRFIVKDGTVDICRACHRPGESIRHIISGCSRLANGEYLHRHNLVARIIHQQLALKYNLVESEVPYYKYEYVPDPVLENGSITLYWDRSVITDRAIVANKPDIVVVDRSERRAMIVDITVPHDENLVKAEKDKQIKYLDLAREVVDMWDVDSAIIVPIVVSAHGLIAKSLDQYLRRLSLGSWIKGLIQKAVLLDTARIVRRFLSLEP

SEQ ID NO: 13593 - protein, 1197 aa, Noctua janthe
MLTRSAARRARLSPPDPSLSSASPPPESSPVVSAVTPAVAVASSSSDEYFSPPTTPPPVRRRGGRRPPDGLGPRGPPASDRVPAPGGSVPRMRWTQSINANVMRAYYGATEGGNNLTAYRVRMLSLFQVLEPAVNVSAQRLSDQVRVIQRNGMLDDTVLDRLRTEMQSSHVIATPPQTVVPPQSTIIPTHDNNVSNDMVTNVSTQCNEEMRCALEGAIREYRFMQPDLRPRVPRLPMHNKNRVLVAVLDSQLSNYFDNCEDLTDAHSVLYCAAVAACRVAHVKFSDDRATRPKPAVPSWQYRIERRIGEARALIGKLICFREGNTRPRVMRFVRRAFSGTDISARDYMSRVTERIDFLKQKVYAWANRIRRYKRRVDRYTQNRTFQRDERWVYRAWERPDQGVADTRLPDDDAMCSFWRSIWSVPVSHTEGEWTGEVERACDLVPEMGAITISPKDVVRAVRPLPNWKSPGPDGLHNFWIKWFTRSHARLAILFQSALESGSLPEFLTTGITHLLHKSGSTAEPKNYRPITCLPTVYKVLTSILRAKINKHIDDNSVMSASQNGCRNGSRGTKELLLIDMAISQQVRRSRKDLSTCWIDYKKAYDSVPHTWLMRVLELYKIDATLRTFLMSCMGQWRTVLRYPGCRQIQRNSEPIRIERGIFQGDSLSPLWFCLALNPLSTLLDDSGLGYRLRRGGQVISHLLYMDDLKLFAPNDLQLMELLKVTETFSSAIRMEFGVDKCAVMHVKRGEIVESVGTQLSDSINLRSLSATETYKYLGMSEALGINVADMKQSLKERFFGRLKKVFNSLLSGGNKVRAFNGWVMPVLMYSFGILKWTQTELDALDRRVRTLLTAYRMHHPRSSVMRLYIPWRCGGRGFLNAKTLHNREICSLREYFLETNVGMHRDVVAVDKGLTPLSLAKENWRKPVVLDTNDRMEVWQSKELHGRFFRALHGPDVDLSASVAWLRSGDLFGETEGFVCAIMDEVMMTNNYRRFIVKDGTVDICRACHRPGESIRHIISGCSRLANGEYLHRHNLVARIIHQQLALKYNLVESEVPYYKYVPDPVLENGSITLYWDRSIITDRTIVANKPDIVVVDRSERRAMIVDITVPHDENLVKAEKDKQIKYLDLAREVVDMWDVDSAIIVPIVVSAHGLITKSLDQYLRRLSLGSWIKGLIQKAVLLDTARIVRRFLSLEP

SEQ ID NO: 13594 - protein, 1197 aa, Noctua janthe
MLTRSAARRARLSPPDPSLSSASPPPESRPVVSAVTPAVAVAWSSSDEYFSPPTTPPPVRRRGGRRPPDGLGPRGPPASDRVPAPGGSVPRMRWTQSINANVMRAYYGATEGGNNLTAYRVRMLSLFQVLEPAVNVSAQRLSDQVRVIQRNGMLDDTVLDRLRTEMQSSHVIATPAQTVVPPQSTIIPTHDNNVSNDMVTNVSTQCNEEMRCALEGAIREYRFMQPDLRPRVPRLPMHNKNRVLVAVLDSQLSNYFDNCEDLTDAHSVLYCAAVAACRVAHVKFSDDRATRLKPAVPSWQYRIERRIGEARALIGKLICFREGNTRPRVMRFVRRAFSGTDISARDYMSRVTERIDFLKQKVYAWANRIRRYKRRVDRYTQNRTFQRDERWVYRVWERPDQGVADTRLPDDDAMCSFWRSIWSVPVSHTEGEWTREVERACDLVPEMGAITISPQDVVRAVRPLPNWKSPGPDGLHNFWIKWFTRSHARLAILFQSALESGSLPEFLTTGITHLLHKSGSTAEPKNYRPIACLPTVYKVLTSILRAKINKHIDDNSVMSASQNGCRNGSRGTKELLLIDMAISQQARRSRRDLSTCWIDYKKAYDSVPHTWLMRVLELYKVDSTLRIFLMSCMGQWRTVLRYPGCRQIQRNSEPIRIERGIFQGDSLSPLWFCLALNPLSTLLEDSGLGYRLRRGGQVISHLLYMDDLKLFAPNDFQLMELLKVTETFSNAIRMEFGVDKCAVMHVKRGEIVESVGTQLSDSINLRSLSATETYKYLGMSEALGINVADMKQSLKERFFGRLKKVFNSLLSGGNKVRAFNGWVMPVLMYSFGILKWTQTELDALDRRVRTLLTAYRMHHPRSSVMRLYIPRRCGGRGFLNAKTLHNREICSLREYFLETDVGMHRDVVAVDKGLTPLSLAKENWRKPVVLDTNDRMEVWQSKELHGRFFRALHGPDVDLPASVAWLRSGDLFGETEGFVCAIMDEVMMTNNYRRFIVKDGTVDICRACHRTGESIRHIISGCSRLANGEYLHRHNLVARIIHQQLALKYNLVESEVPYYKYVPDPVLENGSITLYWDRSIVTDRTIVANKPDIVVVDRSERRAMIVDITVPHDGNLVKAEKDKQIKYLDLAHEVVDMWDVDSAIIVPIVVSAHGLIAKSLDQYLRRLSLGSWIKGLIQKAVLLDTARIVRRFLSLEP

SEQ ID NO: 13595 - protein, 1078 aa, Mythimna ferrago
MLSLFQVLEPAVNVSAQRLSDQVRVIQRNHMLDDTVLDRLRTEMSNRVITPPSQPVVPVVVPQSSHISLHTDEVSTDTVTNVSTQCNNELRSALECAIREYRNMPLEIRPRLPRLPMHNKNKALVAALDSLLSNYFDDCEDLTDTHSIMYCAAVAACRVAHVKFPNSDVATRPKPAVPAWQCRIERRIGGARALIGKLICFREGNTRPRVMRFVRRAFSGTDISPRDYMSRVTERIDFLKQKVYAWANRIRRYKRRVERYIQNSTFRSNERWVYRAWERPDQGVTDTRLPDDDAMCSFWRNIWSVPVSHTEGGWSREVERACESITEMGAITISPQDVARAVRPLPNWKSPGPDGLHNFWIKWLQRSHARLASQYQTALESGSLPEFLTTGVTHLLHKSGSTAEPKNYRPITCLPTVYKVLTSILRAKINHHVDNNAIMSASQNGCRNGSRGTKELLLIDMAISQQVRRSRKDLSTCWIDYKKAYDSVPHTWLMRVLELYKVDATLRTFLMSCMRQWRTVLRYPGCRNIQRNSEPVRVERGIFQGDSLSPLWFCLALNPLSTLLENSGLGYRLKRGGQVISHLLYMDDLKLFAPNNLQLMELLKVTETFSSAIRMEFGVDKCAVMHIKRGEIVESVGIQLSDSIHLRSLSPTETYKYLGMSEALGINATDMKQSLRERFFGRLKKVLNSLLSGGNKVRAFNGWVMPVLMYAFGVLKWTQTELDALDRRVRTLQTAYRMHHPRSSVMRLYIPRKCGGRGFLNAKSLHNREVCSLREYFLAADGGMHRDVVAVDKGLTPLSLANENWRKPVVLDTNVRKEVWQSKELHGRFFRALHGPDVDQLASVAWLRVGDLFGETEGFVCAIMDEVIMTNNYRRFIVKDGTVDICRACHRPGDSIRHIISGCSRLANGEYSHRHNLVARIIHQQLALKYSLVESEVPYYRYVPDPVLDNGDITLYWDRSIITDRTIVANKPDIVVVDRSERRAMIVDISVPHDENLAKAEKDKQIKYIDLAREVVDMWEVDSAIIVPIVVSANGLIAKSLDQHLRRLSLGDWIKGLIQKAVLLDTARIVRRFLSLEP

SEQ ID NO: 13596 - protein, 1200 aa, Mythimna ferrago
MLTRAAARRARPPPPASSLSSASPPPEPSPIVSAVTPAVAAASSSSDEYYSPPTTPPPTRRRGGRRPPDCLGPRGPPASDRVPAPGGSVQRMRWTQSINENVMRSYYGATEGGNNLTAYRVRMLSLFQVLEPAVNVSAQRLSDQVRVILRNHMLDDTVLDRLRTEMSDRVITPPSQPVVPAVVPPSNYISFHTDEGSSDTVTNVSNQCNSELRSALECAIREYRNIPPELRPRIPRLPMCNKNRALVAALDSQLSNYFDDCEDLTDTHSIMYCAAVAACRVAHVKFPNSDVATRPKPAVPAWQCRIERRIGGARALIGKLICFREGNTRPRVMRFVRRAFSGTDISPRDYMSRVTERIDFLKQKVYAWANRIRRYKRRVERYTQNRTFRSNERWVYRAWERPDQGVTDARLPDDDAMSSFWRNIWSVPVSHTEGDWTREVERACDPIPQMGAIDISPQDVARAVRPLPNWKSPGPDGLHNFWIKWFTRSHARLAYQFQSALESGSLPQFLTTGITHLLHKSGSTAEPKNYRPITCLPTVYKVLTSILRSKINSHIDENSIMSPSQNGCRNGSRGTKELLLIDMTISQQVRRSRKDLSTCWIDYRKAYDSVPHTWLTRVLELYKIDTTLRTFLMSCMRQWSTVLRYPGCRNIQRNSEPVRIERGIFQGDSLSPLWFCLALNPLSTLLENSGLGYRLKRGGQVISHLLYMDDLKLFAPNNLQLMELLKVTEIFSSAIRMEFGVDKCAVMHVKRGEVVESVSTQLTDSINLRSLSPTETYKYLGMSEALGISITGMKQSLRERFFGRLKKVFNSLLSGGNKVRAFNGWVMPVLMYSFGVLKWTQTELDALDRRVRTLLTAYRMHHPRSSVMRLYIPRKCGGRGFLNAKTLHNREVCSLREYFLAADVGMHRDVVAVDKGLTPLSLANENWRKPIVLDTNDRREVWQSKELHGRFFRALHGPDVDQLASVAWLRFGDLFGETEGFVCAIMDEVIMTNNYRRFIVKDGTVDICRACHRPGESIRHIISGCSRLANGEYLHRHNLVARIIHQQLALKYSLVESEVPYYRYEPDPVLDNGHITLYWDRPIITDRTIVANKPDIVVVDRSERRAMIVDISVPHDENLVKAEKDKQIKYIDLAREVVDMWEVDSAVIVPIVVSANGLIAKSLDQHLRRLSLGDWIKGLIQKAVLLDTARIVGRFLSLEP

SEQ ID NO: 13597 - protein, 870 aa, Mythimna ferrago
MYCAAVAACRVAHVKFPNSDVATRPKPAVPAWQCRIERRIGGARALIGKLICFREGNTRPRVMRFVRRAFSGTDINPRDYMSRVTERIDFLKQKVYAWANRIRRYKRRVERYTQNGTFRSNERWVYRAWERPDQGVTDTRLPDDDAMCLFWRNIWSVPVSHTEGGWTREVERACESITEMGAITISPQDVARAVRPLPNWKSPGPDGLHNFWIKWLQRSHARLASRYQAALESGSLPEFLTTGVTHLLHKSGSTAEPKNYRPITCLPTVYKVLTSILRAKINHHVDNNAIMSASQNGCRNGSRGTKELLLIDMAISQQVRRSRKDLSTCWIDYKKAYDSVPHTWLMRVLELYKVDATFRTFLMSCMRQWRTVLRYPGCRNIQRNSEPVRIERGIFQGDSLSPLWFCLALNPLSTLLENSGLGYRLKRGGQAISHLLYMDDLKLFAPNNLQLMELLKVTETFSSAIRMEFGVDKCVVMHIKRGEIVESVGIQLSDSIHLRSLSPTETYKYLGMSEALGINATDMKQSLKERFFGRLKKVLNSLLSGGNKVRAFNGWVMPVLMYAFGVLKWTQTELDALDRRVRTLLTAYRMHHPRSSVMRLYIPRKCGGRGFLNAKTLHNREVCSLREYFLAADGGMHRAVVAVDKGLTPLSLANENWRKPVVLDTNVRKEVWQSKELHGRFSRALHGPDVDQLASVAWLRVGDLFGETEGFVCAIMDEVIMTNNYRRFIVKDSTVDICRACHRPGESIHHIISGCSRLANGEYLHRHNLVARIIHQQLALKYSLVESEVPYYRYVPDPVLDSGDITLYWDRSIITDRTIVANKPDIVVVDRRERRAMIVDISVPHDENLVKAEKDKQIKYIDLARELVDM

SEQ ID NO: 13598 - protein, 1200 aa, Mythimna ferrago
MLTRAAARRARLSPPASSLSSASPPPEPSLTVSAVTPAVAAASSSSDEYYSPPTTPPPARRRGGRRPPDRLGPRGPPASDRVPASGGSVQRMRWTQSINENVMRSYYGATEGGNSLTAYRVRMLSLFQVLEPAVNVSAQRLSDQVRVILRNHMLDDTVLDRLRTEMSDRVITPPSQPVVPVVVPPSSYISFDTNEVNSDTVTNVSNQCNSELRSALECAIREYRNIPSELRPRIPRLPMCNKNRALVAALDSQLSSYFDDCEDLTDTHSIMYCAAVAACRVAHVKFPNSDVATRPKPAVPAWQCRIERRIGGARALIGKLICFREGNTRPRVMRFVRRAFLGTDISPRDYMSRVTERIDFLKQKVYAWANRIRRYKRRVERYTQNRTFRSNERWVYRAWERPDQGVTDARLPDDDAMSSFWRSIWSVPVSHTEGDWIRGVERACDPIPQMGAIDISPQDVARAVRPLPNWKSPGPDGLHNFWVKWFTRSHARLAYQFQSALESGSLPQFLTTGITHLLHKSGSTAEPKNYRPITCLPTVYKVLTSILRSKINSHIDENSIMSHSQNGCRNGSRGTKELLLVDMTISQQVRRSRKDLSTFWIDYKKAYDSVPHTWLMRVLELYKIDTTLRTFLMSCMRQWSTVLRYPGCRNIQRNSEPVRIERGIFQGDSLSPLWFCLALNPLSTLLENSGLGYRLKRGGQVISHLLYMDDLKLFAPNNLQLMELLKVTETFSSAIRMEFGVDKCAVMHVKRGEVVESVSTRLTDSINLRSLSPTETYKYLGMSEALGISITNMKQSLKERFFGRLKKVFNGLLSGGNKVRAFNGWVMPVLMYSFGVLKWTQTELNALDRRVRTLLTAYRMHHPRSSLMRLYIPRKCGGRGFLNAKTLHNREVCSLREYFLAADVGMHRDVVAVDKGLTPLSLANENWRKPIVLDTNDRREVWQSKELHGRFFRALHGPDVDQLASVAWLRFGDLFGETEGFVCAIMDEVIMTNNYRRFIVKDGSVDICRACHRPGESIRHIISGCSRLANGEYLHRHNLVARIIHQQLALKYSLVESEVPYYRYEPDPVLDNGHITLYWDRPIITDRTIVDNKPDIVVVDRSERRAMIVDISVPHDENLVKAEKDKQIKYIDLAREVVDMWEVDSAIIVPIIVSANGLIAKSLDQHLRRLSLGDWIKGLIQKAVLLDTARIVRRFLSLEP

SEQ ID NO: 13599 - protein, 1200 aa, Mythimna ferrago
MLTRAAARRARPPPPVSSLSSASLPPEPSLTVSAVTPAAAAASSSSDEYYSPPTTPPPARRRGGRRPPACLGPRGPPVSDRVPAAGGSVPRMRWTQSTNENVMRAYYGATEGGNNLTAYRVRMLSLFQVLEPAVNVSAQRLSDQVRVIQRNHMLDDTVLDRLRTEMSNRVITPPSQPVVPVVVPQSSHISLHTDEVSTDTVTNVSTQCNNELRSALECAIREYRNMPLELRPRLPRLPMHNKNKALVAALDSQLSNYFDDYEDLTDTHSIMYCAAVAACRVAHVKFPNSDVATRPKPAVPAWQCRIERRIGGARALIGKLICFREGNTRPRVMRFVRRAFSGTDISPRDYMSRVTERIDFLKQKVYAWANRIRRYKRQVERYIQNSTFRSNERWVYRAWERPDQGVTDTRPPDDDAMCSFWRNIWSVPVSHTEGGWTREVERACESIIEMGAITISPQDVARAVRPLPNWKSPGPDGLHNFWIKWLQRSHARLASQYQAALESGSLPEFLTTGVTHLLHKSGSTAEPKNYRPITCLPTVYKVLTSILRAKINHHVDNNAIMSASQNGCRNGSRGTKELLLIDMAISQQVRRSRKDLSTCWIDYKKAYDSVPHTWLMRVLELYKVDATLRTFLMSCMRQWRTVLRYPGCRNIQRNSEPVRIERGIFQGDSLSPLWFCLALNPLSTLLENSGLGYRLKRGDQVISHLLYMDDLKLFAPNNLQLMELLKVTETFSSAIRIEFGVDKCAVMHIKRGEIVESVGIQLSDSIHLRSLSPTETYKYLGMSEALGINATDMKQSLRERFFGRLKKVLNSLLSGGNKVRAFNGWVMPVLMYAFGVLKWTQTELDALDKRVRTLLTAYRMHHPRSSVMRLYIPQKCGGRGFLNAKSLHNREVCSLREYFLAADGGMHRDVVAVDKGLTPLSLANENWRKPVVLDTNVRREVWQSKELHGRFFRALHGPDVDQLASVAWLRVGDLFGETEGFVCAIMDEVIMTNNYRRFIVKDGTVDICRACHRPGESIRHIISGCSRLANGEYLHRHNLVARIIHQQLALKYSLVESEVPYYRYVPDPVLDSGDITLYWDRSIINDRTIVANKPDIVVVDRSERRAMIVDISVPHDENLAKAEKDKQIKYIDLAREVVDMWEVDSAIIVPIVVSANGLIAKSLDQHLRRLSLGDWIKGLIQKAVLLDTARIVRRFLSLEP

SEQ ID NO: 13600 - protein, 1200 aa, Mythimna ferrago
MLTRSRARQQQTHPTSSDSSFSSASQPPGPAPAVSPVIPVAAVASSSSDEYFSPPMTPPPARRRGRGRPPACLGPRGPPASGGVPAAGGSVQRMRWTQSINENVMRSYFGATEGGTNLTAYRGRMLSLFQVLEPAVNVSAQRLSDQVRVIQRNRMLDDAVLDRLRLESRNGRVSPVSPLAAVQLQPSVSPRPDHVGEDDDDGAISVSTQCNARLRSALEDAFREYRSIPPELRPRLPRLPMHRKNRALVCALDSQLSNCFDSSEDLTDTHSILYCAAAAACRVAHVKIPNSDRATRPAKPAWQCRIERRIGEARALIGKLICFREGNTRSRVMRFVRRAFSGTDVSPRDYLPRITERIDFLRQKVHAWANRIRRYKRRVERYTQNRAFQSNERWVYRAWERPDQSVIDTRLPDDDAMYSFWRSIWSVPVSHTEGDWTRGVERECELIPEMGAITISPQDVARAVRPLPNWKSPGPDGLHNFWLKWLKSSHARLASQFQSALESGSLPQFLTTGITHLLHKSGSTAEPKNYRPITCLPTVYKVLTSILRAKINSHIETNSIMSASQNGCRNGSCGTKELLLIDVAISQQVRRSRRDLSTCWIDYKKAYDSVPHTWLMRVLELYKIDVTLRTFLMSCMGQWRTVLHYPGCRWVSENSEPLRIERGIFQGDSLSPLWFCLALNPLSTLLEGSGLGYRLRREGQVISHLLYMDDLKLFASNNLQLMELLKVTETFSSAIRMEFGLDKCAVMHVKRGEIMESVGTQLSDSIHLRSLSSTETYKYLGMSEALGINAADVKQSLRERFFCRLNKVLKSLLSGGNKVRAFNGWVMPVLMYSFGILKWTQTELDALDRRVRTLLTANRMHHPRSSVMRLYIPRKCGGRGFLNAKTLHNREVCSLREYFLETDVGMHRDVVAVDKGLTPLSLASENWRKPIVMDTNERKEVWKGKELHGRFYRALHGPDVDLLASVSWLRFGNLFGETEGFVFAIMDEVMMTNNYRKYIVKDGTVDICRACHRPGESIRHIISGCSHLANGDYLHRHNLVARIIHQQLALKYNLVESEVPYYRYVPDPVLENGSVTLYWHRSIITDRTIVANKPDIVVIDRLERRTMIVDIAVPHDENLVKAEKDKQTKYLDLAREVVDMWEVDRAIIVPIVVTANGLIAKSLDQHLRRLSLGSWIKGLIQKAVLLDTARIVRRFLSQEP

SEQ ID NO: 13601 - protein, 920 aa, Eilema sororculum
MAGAKFPIKDPAIRPKFTIPAWQCRIERRVAEARVLIGKLICFRSGNTRPRVMRYVTRAFAGTDISPQDYTSRVTERIDFLKQKVCAWANRIRRYKKRVDRYTVNRMFQRDQRWVYRSWERTDESVDDVRRPDAEATNAFWRSIWSVPVSHTEGDWMREVERACETIPEMEEIYIDATDVDCAVRSLSNWKSPGPDGLHNFWLKWLRSSHVVLASQFQSAIESGTLPAFMTTGVTHLLHKTGSTLEPNNYRPITCLPTVYKLLTSILRAKINNHINNNSIMCASQNGCRNGARGTKELLLIDMAISQQARRNRKDLTACWIDYKKAFDSVPHTWLLRVLELYKVNTTLCTFLRSCMRQWRTVLFYPGCRQALGGGVPITIERGIFQGDSLSPLWFCLALNPLSALLVNSGLGYRLRREGQVVSHLFYMDDLKLFAHTNPQLIALLKVTETFSNSIKMAFGVDKCAVIHVKRGRVVESEGIQLSDSTNLRSLLVTETYKYLGMSQALCINEVDMKQLLQERFFGRLKKVLNSLLSGGNKVRACNSWVMPLLMYSFGILKWTQTELDTIDRKVRTQLTAFRMHHPRSSVMRLYIPRKCGGRGFLNAKTLHNREVCNLRDYFLKSNVDMHRDVVNVDTGLTPLGLAKENWRRPTIVSTDSRREVWQSKELHGRFYRALHRPEVDLLASVAWLRFSDLFEETEGFVCAIADEVIKTNNYRKYIMRDGTIDICRACHQPGESLRHITSGCSRLANGEYLHRHNQVARIIHQRLALKYNLVEVEVPYYRYVPEPVLENSHITLYWDRSIITDRTVIANKPDIVVIDRSERRALIVDVTIPHDENLVKAEKDKQVKYLDLAHEVVDMWNVDSAIIVPIVVSVNGLIAKSLDQHLKRLGLDGWVKGQMQKAVLLDTARIVRKFLSLEP

SEQ ID NO: 13602 - protein, 1192 aa, Eilema sororculum
MLTRAQANRNRSAPTTSPDSSLSSAAQPPAVEPAASSSSSSDEFFSPPTSPTPVRRPGRGRPPTCLGPRRPPASNRAPATGGDVHRMRWTTSINENVMRAYFAATEGGTNLSAYRTRMLPLFQALEPSINVSAQRLSDQVRVIQRNRMLNETVLETLRLECLRNICVTPAPAPAPASTVEINDDTCVAPDDTPIPVSIQYNEEIKEALECALREYRSMPVHVRPRLPRLPIHRRNIALVSALDSLLPRYLENSENLGDTHSILYCTAVAACRMAGAKFPNKDPAIRLKSAIPAWQCRIERRVAEARVLIGKLICFRSGNTRPRVMRYVTRAFAGTDISPQDYTSRVTERIDFLKQKVYAWANRIRRYKKRVDRYTVNRMFQRDQRWVYRSWERTEESVDDVRRPDAEATNAFWRSIWSVPVNHTEGDWMREVERACETIPEMEKINIDAIDVDCAVRSLSNWKSPGPDGLHNFWLKWLRSSHVVLASQFQSAVESGTLPAFMMTGVTHLLHKTGSTLEPNNYRPITCLPTVYKLLTSILRAKINNHINNNSIMCASQNGCRNGARGTKELLLIDMAISQQARRNRKDLTACWIDYKKAFDSVPHTWLLRVLELYKVNTTLCTFLRSCMGQWRTVLFYPGCRQALGSGEPITIERGIFQGDSLSPLWFCLALNPLSTLLVNSGLGYRLRREGQMVSHLFYMDDLKLFAHTNPQLIALLKVTETFSNSIKMAFGVDKCAVIHVKRGRVVESEGIQLSDSTNLRSLLVTETYKYLGMSQALCINEVDMKQMLQERFFGRLKKVLNSLLSGGNKVRACNSWVMPLLMYSFGILKWTQTELDTIDRKVRTQLTAFRMHHPRSSVMRLYIPRKCGGRGFLNAKTFHNREVCNLRDYFLTSNVDMHRDVVNVDTGLTPLGLAKENWRRPTIVSTDSRREVWQSKELHGRFYRALHRPEVDLLASVAWLRFSDLFGETEGFVCAIADEVIKTNNYRKYIMRDGTIDICRACHQPGESLRHITSGCSRLANGEYLHRHNQVARIIHQRLALKYNLVEVEVPYYKYVPEPVLENSHITLYWDRSIITDRTVVANKPDIVVIDRSERRALIVDVTIPHDENLVKAEKDKQVKYLDLAHEVVDMWNVGSAIIVPIVVSVNGLIAKSLDQHLKRLGLDGWVKGQMQKAVLLDTARIVRKFLSLEP

SEQ ID NO: 13603 - protein, 1193 aa, Eilema sororculum
MLTRAKARQFAHPTPSDSSCSSASQPPETTSSRPTTAEASSSDEYFSPPTSPTPVRRPGRGRPPSSLGSRGPPASNRAPAAGGDVHRMRWTTSINENVMRAYFAATEGGTNLSAYRSRMLPLFQALEPSVNTSAQRLSDQVRVIQRNHLLNETVLETLRQECLRNMCVTPAPAPAPASTTALNEDSHVTRDDTPIPVSIQYNEEIKEALEYALREYRSMPIHVRPRLPRLPIHRRNIALVSALDSLLPKYLENSENLGDTHSILYCTAVAACRMAGAKFPIKDPAIRPKPAIPAWQCRIERRVAEARVLIGKLICFRSGNTRPRVMRYVTRAFAGTNISPQDYTSRVTERIDFLKQKVCAWANRIRRYKKRVDRYTVNRMFQRDQRWVYRNWERTDESVDDVRRPDAEATNAFWRSIWSVPVSHTEGDWMREVERACEPIPEMEEIYIDATDVDCAVRSLSNWKSPGPDGLHNFWLKWLRSSHVVLASQFQSAVESGTLPVFMTTGVTHLLHKTGSTLEPNNYRPITCLPTVYKLLTSILRAKINNHINNNSIMCASQNGCRNGARGSKELLLIDMTISQQARRNRKDLAACWIDYKKAFDSVPHTWLLRVLELYKVNTTLCTFLRSCMGQWRTVLFYPGCRQALGSGEPITIERGIFQGDSLSPLWFCLALNPLSTLLVNSGLGYRLRREGQMVSHLFYMDDLKLFAHTNPQLIALLKVTETFSNSIKMAFGVDKCAVIHVKRGRVVESEGIQLSDSTNLRSLLVTETYKYLGMSQALCIKEVDMKQMLQERFFGRLKKVLNSLLSGGNKVRACNSWVMPLLMYSFGILKWTQTELDTIDRKVRTQLTAFRMHHPRSSVMRLYIPRKCGGRGFLNAKTLHNREVCNLRDYFLKSNVEMHRDVVNVDTGLTPLGLAKENWRRPTIVGTDSRREVWQSKELHGRFYRALHRPEVDLLASVSWLRFSDLFGETEGFVCAIADEVIKTNNYRKYIMRDGTIDICRACHQPGESLRHITSGCSRLANGEYLHRHNQVARIIHQRLALKYNLVEVEVPYYRYVPEPVLENSHITLYWDRSIITDRTVVANKPDIVVIDRSERRALIVDVTIPHDENLVKAEKDKQVKYLDLAHEVVDMWNVDSAIIVPIVVSVNGLIAKSLDQHLKRLGLDGWVKGQMQKAVLLDTARIVRKFLSLEP

SEQ ID NO: 13604 - protein, 1045 aa, Agrochola circellaris
MLDDTVLDRLRSEMRNSHATAPPSQTVMVAPQFTINQVDEGIDDMATNVSTQYNEELRSALERAIREYRSMSPELRPRLPRLPMHNKNRALVAALDSQLSNYFDDCEDLTDTHSILYCAAVAACRVAHVKFANDSRATRPKPAVPAWQCRIERRIGGARALIGKLICFREGNTRPRVMRFVRRAFSGTDISPEDYVSRATERIDFLKQKVYAWANRIRRYKRRVERYTQNRTFQSDERRVYRAWEQPDQGVADARLPDDDAMCSFWRSIWSAPVSHTEGDWTREVERACDPIPEMGAITICPQDVARAVRPLPNWKSPGPDGLHNFWIKWFKRSHARLAAQYQTALESGSLPEFLTTGVTHLLHKSGSTADPKNYRPITCLPTVYKVLTSILRAKINKHIDTNSIMSASQNGCRNGSRGTKELLLIDMTISQQVRRSRKDLSTCWIDYKKAYDSVPHTWLMRVLELYKVDATLRTFLLSCMGQWRTVLRYPGCRNIQRNSEPIRIERGIFQGDSLSPLWFCLALNPLSTLLEGSDLGYRLRRGGQVISHLLYMDDLKLFAPNNFQLMELLKVTETFSRAIRMEFGVDKCAVMHVKRGEIVESVGTQLTDSINFRALSASETYKYLGMSETLGINVTDMKQSLKERFFGRLKKVFNSFLSGGNKVRAFNGWVMPVLMYSFGVLKWTQTELDALDRRVRTLLTGYRMHHPRSSVMRLYIPRKCGGRGFLNAKTLHNREICSLREYFLEADVGMHRDVVAVDKGLTPLSLAKENWRKPAVLDTNDRKEVWQNKELHGRYFRALHGPDVDLLASVAWLRFGDLFGETEGFVCAIMDEVMMTNNYRRFIVKDGTVDICRACHRPGESIRHIISGCSRLANEEYLHRHNLVARIIHQQLALKYSLVESEVPYYRYVPDPVLESGHITLYWDRSIITDRSIVANKPDIVVVDRAERRTMIIDITVPHDGNLVKAEKDKQIKYLDLAREVVDMWDVDSAIIVPIVVSANGLIAKSLDQHLRRLSLGGWIKGLIQKAVLLDTARIVRRFLSLEP

SEQ ID NO: 13605 - protein, 1204 aa, Agrochola circellaris
MLTRSRARRLIDTHPTPSDSSLSSASQLPDPAPDVSPVIPAAAAASSSSDEYFSPPTSPPPARRGRGRPPASLGLRGPPASDRVPAPGGSVRRMRWTQTVNENVMRACFGATEGGSNLTAYRGRMLSLFQVLEPAVNVSAQRLSDQVRVIQRNHMLDDAVFDRLRLESRNNRVTPASPLVAVQLQNSLSATPRPDHVGEEVDDGVISVSSQCNARLRNALEDAFREYRSTPPGLRPRLPRLPMHKKNKALVCTLDSLLSNYFDGSKDLADTHSILYCAAVAACRVAHVKFPSSDRAPRPKPAVPAWQCRIERRIGEARVLIGKLICFREGNTRPRVMRFVKRAFSGTDTSSRDYLTRVTERIDFLKQKICAWANRIRRYRRRVERYTQNRTFQSDERWVYRAWERLDQGVIDTRLPDDDAMCSFWRSIWSAPVNHTEGDWTGKIERACERIPEMGAINISPQDVACAVRPLPNWKSPGPDGLHNFWIKWLQRSHARLASQFQSALESGSLPQFLTTGITHLLHKSGSTAEPKNYRPITCLPTVYKVFTSILRTKINKHIDTNSIMSASQNGCKNGSRGTKELLLIDMAINQQVRRSRRDLSTCWIDYKKAYDSVPHTWLMRVLELYKVDATLRTFLISCMGQWRTVLRYPGCRQIQRNSEPIRIERGIFQGDSLSPLWFCLALNPLSTLLEDSGLGYRLRRGGQVISHLLYMDDLKLFAPNNLQLVELLKVTETFSSAIRMEFGVDKCAVMHVKRGGIVESGGTQLPDSIHLRSLSSIETYKYLGMSEALGINTADMKQSLKERFFDRLNKVLNSLLSGGNKVRAFNGWVMPVLMYSFGILKWTQTELDALDRRVRTLLTVNRMHHPRSSVMRLYIPRKCGGRGFLNAKTLHNREVCSLREYFLEADVGMHRDVVSVDKGLTPLSLANENWRKPIVLDTNDRREVWQSKELHGRFYRALHGPDVDLLASVSWLRFGDLFGETEGFVFAIMDEVMMTNNYRKYIVKDGTVDICRACHRPGESIRHIISGCSRLANGDYLHRHNLVARIIHQQLALKYNLVESEVPYYKYVPDPVLENGNITLYWDRSIITDRTIVANKPDIVVIDRLERRTMIIDIAVPHDENLVKAEKDKQIKYLDLAREVVDMWDVDTAVIVPIVVTANGVIAKSLDQHLRRLSLGSWIKGLIQKAVLLDTARIVRRFLSQEP

SEQ ID NO: 13606 - protein, 1198 aa, Agrochola circellaris
MLTRSATRRARLLPPDSSLSSASLPPVPSPTVSAGTTPAVAVASSSSDEYFSPPTTPPPARRRGGHRPPVGLGPRGPPASDRVPAPGGSVQRMRWTQSINENVMRSYYGATEGGNNLTAYRVRMLSLFQVLEPAVNVSAQRLSDQVRVILRNHMLDDTVLDRLRSEMRNSHATAPPSQTVMVAPQFTINQVDEGIDDMATNVSTQYNEELRSALERAIREYRSMSPELRPRLPRLPMHNKNRALVAALDSQLSNYFDDCEDLTDTHSILYCAAVAACRVAHVKFANDSRATRPKTAVPAWQCRIERRIGGARALIGKLICFREGNTRPRVMRFVRRAFSGTDISPEDYVSRATERIDFLKQKVYAWANRIRRYKRRVERYTQNRTFQSDERRVYRAWEQPDQGVADARLPDDDAMCSFWRSIWSAPVSHTEGDWTREVERACDPIPEMGAITICPQDVARAVRPLPNWKSPGPDGLHNFWIKWFKRSHARLAAQYQTALESGSLPEFLTTGVTHLLHKSGSTADPKNYRPITCLPTVYKVLTSILRAKINKHIDTNSIMSASQNGCRNGSRGTKELLLIDMTISQQVRRSRKDLSTCWIDYKKAYDSVPHTWLMRVLELYKVDATLRTFLLSCMGQWRTVLRYPGCRNIQRNSEPIRIERGIFQGDSLSPLWFCLALNPLSTLLEGSDLGYRLRRGGQVISHLLYMDDLKLFAPNNFQLMELLKVTETFSRAIRMEFGVDKCAVMHVKRGEIVESVGTQLTDSINFRALSASETYKYLGMSETLGINVTDMKQSLKERFFGRLKKVFNSFLSGGNKVRAFNGWVMPVLMYSFGVLKWTQTELDALDRRVRTLLTGYRMHHPRSSVMRLYIPRKCGGRGFLNAKTLHNREICSLREYFLEADVGMHRDVVAVDKGLTPLSLAKENWRKPAVLDTNDRKEVWQNKELHGRFFRALHGPDVDLLASVAWLRFGDLFGETEGFVCAIMDEVMMTNNYRRFIVKDGTVDICRACHRPGESIRHIISGCSRLANEEYLHRHNLVARIIHQQLALKYSLVESEVPYYRYVPDPVLESGHITLYWDRSIITDRSIVANKPDIVVVDRAERRTMIIDITVPHDGNLVKAEKDKQIKYLDMAREVVDMWDVDSAIIVPIVVSANGLIAKSLDQHLRRLSLGGWIKGLIQKAVLLDTARIVRRFLSLEP

SEQ ID NO: 13607 - protein, 1015 aa, Agrochola circellaris
MVAPQFTINQVDEGIDDMATNVSTQYNEELRSALERAIREYRSMSPELRPRLPRLPMHNKNKALVAALDSQLSNYFDDCEDLTDTHSILYCAAVAACRVAHVKFANDSRATRPKPAVPAWQCRIERRIGGARALIGKLICFREGNTRPRVMRFVRRAFSGTDISPEDYVSRATERIDFLKQKVYAWANRIRRYKRRVERYTQNRTFQSDERRLYRAWEQPDQGVADARLPDDDAMCSFWRSIWSAPVSHTEGDWTREVERACDPIPEMGAITICPQDVARAVRPLPNWKSPGPDGLHNFWIKWFKRSHARLEAQYQTALESGSLPQFLTTGVTHLLHKSGSTADPKNYRPITCLPTVYKVLTSILRAKINKHIDTNSIMSASQNGCRNGSRGTKELLLIDMTISQQVRRSRKDLSTCWIDYKKAYDSVPHTWLMRVLELYKVDATPRTFLLSCMGQWRTVLRYPGCRNIQRNSEPIRIERGIFQGDSLSPLWFCLALNPLSTLLEGSDLGYRLRRGGQVISHLLYMDDLKLFAPNNFQLMELLKVTETFSRAIRMEFGVDKSAVMHVKRGEIVESVGTQLTDSINFRALSASETYKYLGMSETLGINVTDMKQSLKERFFGRLKKVFNSFLSGGNKVRAFNGWVMPVLMYSFGVLKWTQTELDALDRRVRTLLTGYRMHHPRSSVMRLYIPRKCGGRGFLNAKTLHNREICSLREYFLEADVGMHRDVVAVDKGLTPLSLAKENWRKPAVLDTNDRKEVWQNKDLHGRYFRALHGPDGDLLASVAWLRFGDLFGETEGFVCAIMDEVMMTNNYRRFIVKDGTVDICRACHRPGESIRHIISGCSRLANEEYLHRHNLVARIIHQQLALKYSLVESEVPYYRYVPDPVLESGHITLYWDRSIITDRSIVANKPDIVVVDRAERRTMIIDITVPHDGNLVKAEKDKQIKYLDLAREVVDMWDVDSAIIVVSANGLIAKSLDQHLRRLSLGGWIKGLIQKAVLLDTARIVRRFLSLEP

SEQ ID NO: 13608 - protein, 955 aa, Hydraecia micacea
MITNNFYYGTKPKIAKKKICCSLHFDELYEHKCREQQIFFRVGCTGVTQIRSETLWTTRSNNNNNNKARALIGKLICFREGNTRPRVMRFVRRAFSGTDISSRDYLSRVTERIDFLKQKICAWANRIRRYRRRVERYTQNRRFQSDERWVYRAWERPDQGVTDTRLPDDDAMCSFWRNIWSVPVSHTEGDWTGKIERACDLIPEMEALIISPQDVARAVRPLPNWKSPGPDGLHNFWIKWFKRSHDRLASQFQSALESGSLPQFLTTGITHLLYKSGSTADPKNYRPITCLPTVYKVLTSILRTKINKHIDTNSIMSVSQNGCKNGSRGTKELLLIDMTINQQVRRSRKDLSTCWIDYKKAYDSVPHTWLMRVLELYKVDTTLCTFLMSCMGQWRTVLRYPGCRNIQRNSEPIRIERGIFQGDSLSPLWFCLALNPLSTLLEDSGLGYRLRRGGQVISHLLYMDDLKLFAPNNLQLMELLKITETFSSAIRMEFGVDKCAVMHVKRGEIVESVGNQLSDSTNLRALSASDTYKYLGMSEALGINVTDMKQSLKERFFGRLKKVFNSLLSGGNKVRAFNDWVMPVLMYSFGILKWTQTELDALDRKVRTLLTANRMHHPRSSVMRLYIPRKCGGRGFLNAKTLHNREICSLREYFLETDVGMHRDVVVVDNGLTPLSLGKENWRKPVVLDTNDRMEVWQSKELHGRFFRALHGPDVDLLASVAWLRFGDLFGETEGFVCAIMDEVMMTNNYRRFIVKDGTVDICRACHRPGESIRHIISGCSRLANGEYLHRHNLVARIIHQQLALKYSLVESEVPYYRYVPDPVLENGNITLYWDRSIITDRTIVANKPDIVVMDRLERRAMIVDITIPHDENLVKAEKDKQIKYLDLAREVVDMWDVDSAIIVPIVVTANGLIAKSLDQHLRRLSLASWIKGLIQKAVLLDTARIVRRFLSLEP

SEQ ID NO: 13609 - protein, 1207 aa, Amphipyra tragopoginis
MLTRSRAKTLQRTHPTPSASSLSSASQPPEPASIVSDVTPAAAVASSSSDEYFSPATSPSPPPARRRGRGRPPTCLGPRGPPASDRVPAPGGSVQRMRWTQSMNENCMRAYFGATEGGTNLTAYRGRMLSLFQTLEPAVNVSAQRLSDQVRVIQRDHRLDDAALGRLRDEMQNSHATPPPSQIRTQPLVPPAVPLQPNHADEEEQDRAISAGTQYSEIMRSALEDALREFRSTPPELRPRLPRLPMHNKNRALVCALDSLLSNVLESSKDIGDTHSILYCAAVAACRVAHVKFPNDNRATRPKSTVPAWQCRIERRIDEARVLIGKLTCFREGNIRPRVMRFVRRAFSGTDVSPGEYVSRVTERIDFLKQKVYAWANRIRRYRRRVDRYTQNRIFQSDQRWVYRTWERPDQGVSDTHLPDNDVMNAFWRNIWSVPVTHTEGDWMQEVQRACEPIQEMGAVTIGPQDVTSAVRPMPNWKSPGPDGLHNFWIKWLRSSHARLASQFQSSLESGSLPSFLTTGVTHLLFKSGSTAEPKNYRPITCLPTVYKLLTSILRAKINNHIDNNAIMSDSQNGCRNGSRGTKELLLIDMAISQQVRRSRKDLSTCWIDYKKAYDSVPHTWLMRVLELYKINATLRTFLMSCMGQWRTVLHYPGCRQIQGNGELIRIERGIFQGDSLSPLWFCLALNPLSTLLEGSGLGYRLRRGGQVISHLLYMDDLKLFAPNNLQLLELLKVTETFSNSIRMEFGVDKCAVMHVKRGRIMESVGTQLSDAIHLRSLSSTETYKYLGMSEALGINEADMKQSLKERFFGRLIKVLKSLLSGGNKVRAFNGWVMPVLMYSFGILRWTQTELDALDRRVRTLLTAYRMHHPRSSVMRLYIPRKCGGRGFLNAKTLHNREVCSLREYFSQADVGMHRDVVAVDKGLTPLSLAKENWRKPVVLDTNGRREVWRSKELHGRFYRALHGPDVDFLASVAWLRFGDLFGETEGFVCAIMDEVMMTNNYRKYIVKDGTVDICRACHCPGESIRHIVSGCSRLANGEYLHRHNLVARIIHQQLALKYNLVDTEVPYYKYVPDPVLENGHVTLYWDRSIITDRTIVANKPDIVVIDRLERRTVIVDIAVPHDENLVKAENDKKIKYLDLAHEVVDMWDVDSAVIVPIVVTANGLVAKSLDQHLMRLSLGSWIKGLIQKAVLLDTARIVRKFLSLEP

SEQ ID NO: 13610 - protein, 1198 aa, Amphipyra tragopoginis
MLTRARSKAARPPPPDSPLSSASQPPELGPPVTPAAAAASSSSDEYFSPPTSPTPVRRQGRHRPPTSLGPRGPPAPSRVLATGGCVQRMKWTQSINENVMRAYYGSTEGGTNLTAYRVRMLTLFQELEPAINVSAQRLSDQVRVIQRNHRLDDAALDRLRLEVQNSRVTPFPSQTAVHEVNINIVPPRSDYVDGDMDDRAVTVSSQYNDQLRSALEDAIREYRANPELRPRLPRLPMHNKNRALVCALDSLLSSYFESSEDLGDTHSILYCAAVAACRVANVKFNNSERATRPKPAVPAWQCRIERRIDGARALIGKLICFSEGNTRPRVMRFVRRAFSGTGISPREYMSQVTERIDFLKQKVCAWASRIRRYKRRVERYTQNRMFQCDQRWVYRAWERPDQGVSDGRLPDDDAMNSFWRSIWSVPVIHTEGDWMRDIERACEPIEEMGEILISPQDVASAARPLPNWKSPGPDGLHNFWIKWLRSSHARLATQFQSSLESGSLPQFFTTGVTHLLHKSGSTAEPKNYRPITCLPTVYKLLTSILRSKINTHIENNSVMSSAQNGCRNGSRGTKELLLIDMAISQQVRRSRKNLSTCWIDYKKAYDSVPHAWLMRVLELYKINATLRTFLMSCMGQWRTVLRYPGCRPIRESGEPIRIERGIFQGDSLSPLWFCLALNPLSTLLEGSGLGYPLRRGGQVVSHLLYMDDLKLFAPTKLQLVELLKVTETFSNSIRMEFGVDKCAVMHVRRGGIMESEGLQLSDSINLRPLSANDTYKYLGMSEGLGISEADMKQSLRERFFGRLKKVLKSLLSGGNKVRAFNGWVMPVLMYSFGILKWTQTELDALDRRVRSLLTANRMHHPRSSVMRLYIPRKCGGRGLLNAKTLHNREVCSLREYFLHADAGMHRDVVAVDKGLTPLNLAKENWRKPVVLSTNDRREIWQSKELHGRFYRALHGPDVDFQASVSWLRFGDLFGETEGFVCAIMDEVIMTNNYRKYIVKDGTVDICRACHCPGESLRHIISGCSRLANGEYLHRHNQVARIIHQQLALKYNLVESEVPYYKYVPDPVLENGHITLYWDRSIITDRTIVANKPDIVVIDRSERRTMIVDVTIPHDENLVKAEKDKQIKYLDLAHEVVNMWDVDSATIVPIVVTANGLMAKSLDQHLKRLSLGGWIKGLIQKAVLLDTARIVRRFLSLEP

SEQ ID NO: 13611 - protein, 1180 aa, Amphipyra tragopoginis
MLTRSRAKAQNTRPPSSASSLSSASQPPEPASIVSDVTPAAAVASSSSDEYFSPATSPSPPPARRRGRGRPPTCLGPRGPPASDRVPAPGGSVQRMRWTQSMNENCMRAYFGATEGGTNLTAYRGRMLSLFQALEPAVNVSAQRLSDQVRVIQRDHRLDDAALDRLRSEMQNSHAAPLPSQIRTQTLVPPAVPLESNYADEEGEDRAISAGTQYSEIMRSVLEDALREFRSTPPELRPRLPRLPMHNKNRALVCALDSLLPNVFESSEDLGDTQSILYCAAVAACRVAHVKFPNDNRATRPKSAVPAWQCRIERRIDEARVLIGKLTCFREGNRRPRVMRFVRRAFSGTDIGPGEYASRVTERIDFLKQKVYAWANRIRRYRRRVDRYTQNRIFQSDQRWVYRTWERPDQGVSDTHLPDNDVMNAFWRNIWSVPVTHTEGDWMQEVQRACEPIQEMGAVTIGPQDVTSAVRPMPNWKSPGPDGLHNFWIKWLRSSHARLASQFQSSLESGSLPAFLTTGITHLLFKSGSTAEPKNYRPITCLPTVYKLLTSILRAKLNHHIDSNAIMCATQNGCKNGSRGTKELLLIDMAISQQVRRSRKDLSTCWIDYKKAYDSVPHTWLMRVMELYKVNATLRTFLMSCMGQWRTVLHYPGCRQIQGNGELIRIERGIFQGDSLSPLWFCLALNPLSTLLEGSGLGYRLRRGGQVISHLLYMDDLKLFAPNNLQLVELLKVTETFSNSIRMEFGVDKCAVMHVKRGRIMESVGTQLSDSIHLRSLSSTETYKYLGMSEALGINEADMKQSLRERFFGRLIKVLKSLLSGGNKVRAFNGWVMPVLMYSFGILRWTQTELDALDRRVRTLLTAYRMHHPRSSVMRLYIPRKCGGRGFLNAKTLHNREVCSLREYFSQADVGMHRDVVAVDKGLTPLSLAKENWRKPVVLDAKGRMEVWRSKELHGRFYRALHGPDVDFLASVAWLRFGDLFGETEGFVCAIMDEVMMTNNYRKYIVKDGTVDICRACHCPGESIRHIVSGCSRLANGEYLHRHNLVARIIHQQLALKYNLVDTEVPYYKYVPDPVLENGHVTLYWDRSIITDRTIVANKPDIVVIDRLERRTMIVDITVPHDENLLKAENDKKIKYLDLAHEVVDMWDVDSAVIVPIVVTANGLIAKSLDQHLMRLSLGS

SEQ ID NO: 13612 - protein, 1203 aa, Amphipyra tragopoginis
MLTRSRAKALITQPPPSASSLSSASQPPEPASIVSDVTPAAAVASSSSDEYFSPPTSPPPRRRGRGRPPASLGPRGPPASDRVPAAGGSVQRMRWTQSMNENCMRAYFGATEGGTNLTAYRGRMLSLFQALEPAVNVSAQRLSDQVRVIQRDHRLDDAALDRLRSEMQSGHVVPLQSQTAVQSQVTPVVAPRSIPADEESDDRATNVSTQSNEQLRSALELAIREYRSTLPDLRPRLPRLPMNNKNKALMCALDSLLSSYFDGSEDLADTHSILYCAAVAACRVAHVKVDNNDRATRPKPAVPAWQCRIERRIGEARALIGKLICFREGNTRPRVMRFVRRAFSGTDTCPRDYMSRVAERIDFLKQKVYAWANRIRRYRRRVERYTQNRMFQRDQRWVYRAWERPDQGVRDEHLPDDDAMNSFWRSIWSVPVSHTEGDWMRDVERVCEPILDMGAISISPHDVASAVRPLPNWKSPGPDGLHNFWLKWLRSSHARLAFQFQSSLETGTLPQFLTTGVTHLLHKSGSTAEPKNYRPITCLPTVYKLLTSILRCKISSHIENNSIMSASQNGCRNGSRGTKELLLIDMAISQQVRRSRKDLSTCWIDYKKAYDSVPHTWLMRVLELYKVNTTLCTFLTSCMGQWRTVLHYPGCRQIQGIGEPIRIERGIFQGDSLSPLWFCLALNPLSTLLEGSGLGYRLRRGGQVISHLLYMDDLKLFAPNNLQLVELLKVTETFSNSIRMEFGVDKCAVMHVKRGRIMESVGTQLSDSIQLRSLSSTETYKYLGMSEALGINEADMKQSLRERFYGRLKKVLKSLLSGGNKVRAFNGWVMPVLMYSFGILKWTQTELDALDRRARTLLTAYRMHHPRSSVMRLYIPRKCGGRGFLNAKTLCNREVCSLREYFSQADVGMHRDVVAVDKGLTPLSLAKENWRKPAVLDTNGRKDVWRSKELHGRFYRALHGPDVDFLASVAWLRFGDLFGETEGFVCAIMDEVMMTNNYRKYVVKDGTVDICRACHCPGESIRHIVSGCSRLANGEYLHRHNLVARIIHQQLALKYNLVDAEVPYYRYVPDPVLENGHITLYWDRSIITDRTIVANKPDIVVIDRSERRAMIVDITVPHDENLVKAENDKKIKYLDLAREVVDMWEIDSAVIVPIVVTANGLIAKSLDQHLMRLSLGSWIKGLIQKAVLLDTARIVRKFLSLEP

SEQ ID NO: 13613 - protein, 1204 aa, Amphipyra tragopoginis
MITRSRAKTQSTQPPPSASSLSSASQPPEPASIVSDVTPAAAVASSSSDEYYSPPTSPPPARRRGRGRPPACLGPRGPPASDRVPASGGSVQRMRWTQSMNENCMRAYFGATEGGTNLTAYRGRMLSLFQALEPAVNVSAQRLSDQVRVIQRDHRLDGAALDRLRSEMQSSHVVPLQSQTAVQSQVPSVVAPRSIPADEENDDRVTNVSTQSNEQLRSALELAFREYRSTLPDLRPRLPRLPMNNKNKALMCALDSLLSSYFDGSEDLADTHSILYCAAVAACRVAHVKVDNNDRATRPKPAVPAWQCRIERRIGEARALIGKLICFREGNTRPRVMRFVRRAFSGTDTSPRDYMSRVAERIDFLKQKVYAWANRIRRYRRRVERYTQNRMFQRDQRWVYRAWERPDQGVRDVHLPDDDAMNSFWRSIWSVPVSHAEGDWMRDVERVCEPILDMGAISIKPQDVASAVRPLPNWKSPGLDGLHNFWLKWLRSSHARLASQFQSSLETGTLPQFLTTGVTHLLHKSGSTAEPKNYRPITCLPTVYKLLTSILRCKISSHIENNSIMSASQNGCRNGSRGTKELLLIDMAISQQVRRSRKDLSTCWIDYKKAYDSVPHAWLLRVLELYKVNTTLCAFLTSCMGQWRTVLRYPGCRQIQGRGEPIRIERGIFQGDSLSPLWFCLALNPLSTLLEGSGLGYRLRRGGQVISHLLYMDDLKLFAPNNLQLMELLKVTETFSNSIRMEFGVDKCAVMHVKRGRIMESVGTQLSDSIQLRSLSSTETYKYLGMSEALGINEADMKQSLKERFYGRLKKVLKSLLSGGNKVRAFNGWVMPALMYSFGILKWTQTELDALDRRVRTLLTAYRMHHPRSSVMRLYISRKCGGRGFLNAKTLHNREVCSLREYFSQADVGMHRDVVAVDKGLTPLSLAKENWRMPVVLDTNGRKDVWRSKELHGRFYRALHGPDVDFQASVAWLRFGDLFGETEGFVCAIMDEVMMTNNYRKYVVKDGTVDICRACHCPGESIRHIVSGCSRLANGEYLHRHNLVARIIHQQLALRYNLVDAEVPYYRYVPDPVLENGHVTLYWDRSIITDRTIVANKPDIVVIDRSERRAMIVDVTVPHDENLVKAENDKKIKYLDLAHEVVDMWNVDSAVIVPIVVSANGLIAKSLNQHLMRLSLGSWIKGLIQKAVLLDTARIVRKFLSLEP

SEQ ID NO: 13614 - protein, 962 aa, Noctua pronuba
MHKKNKALVCALDSQLSTCFDSSKDLADTHSILYCGAVAACRVAHVKFPNNDRATRPKLAVPAWQSRIERRIGEARALIGKLICFREGNTRPRVMRFVRRAFSGTGIGFRDYLARVTERIDFLKQKICAWANRIRRYKRRVERYTQNRTFQSDERWVYRAWERPDQGVTDTRLPDDDAMCLFWRSIWSVPVSHTEGDWTREVEQACDPIPEMGAIIISPQDVACAVRPLPNWKSPGPDGLHNFWIKWFQRSHARLASQFQSALESGSLPQFLTTGITHLLHKSGSTAEPKNYRPITCLPTVYKVLTSILRAKINQHIESNSIMSTSQNGCRNGSRGTKELLLIDMAISQQVRRSRKDLSTCWIDYKKAYDSVPHTWLMRVLELYKVDATLRTFLRSCMGCWRTVLRYPGCRQIQRNSEPIRIERGIFQGDSLSPLWFCPALNPLSKLLEGSGLGYRLRRGGQVISHLLYMDDLKLFAPNNLQLMKLLKVTETFSSAIRMEFGVDKCAVMHVKRGEIMESVGTQLSDSIQLRSLSSTDTYKYLGMSEALGINTADMKQSLRERFFGRLNKVLSSLLSGGNKVRAFNGWVMPVLMYSFGILKWTQTELDALDRRVRALLTANRMHHPRSSVMRLYIPRKCGGRGFLNAKTLHNREVCSLREYFLEADVGMHRDVVSVDKGLTPLSLANENWRKPKVLVTNDRKEVWQSKELHGRFYRALHGPDVDFLASVSWLRFGDLFGETEGFVCAIMDEVMMTNNYRKYIVKDGTVDICRACHRPGESIRHIISGCSRLANGEYLHRHNLVARIIHQQLALKYNLVESEVPYYKYVPDPVLDNGNITLYWDRSIITDRTIVANKPDIVVIDRLERRAMIVDITVPHDENLVKAEKDKQFKYLDLAREVVDMWDVSTAVIVPIVVSANGLIAKSLDQHLRRLALGSWIKGLIQKAVLLDTARIVRRFLSQQP

SEQ ID NO: 13615 - protein, 1207 aa, Noctua pronuba
MSPMLTRRRAKLLETHPPSPGSSLSSASQPPGRATSVSAASPVAAVASSSSDEFFSPPSTPPSPRRRGRRPPAGLGPRGQQAPNRVPAAGGNVSRIRWTQSMNENVMRAYYGATEGGINLTAYRCRMLSLFRALEPAVNVSAQRLSDQVRVIQNNHRLDDATLDRLRSELRISPASNPLPSQNVTHVPAALPLRANQHTEEEDDRAVSADNLCNEELRSALEDAIREYRFTSPDLRPRLPRLPMNKKNRALVCALDALLPNFIASSANLCDTHSILYCTAVAACRVANVKFPNTDSATRPKSAVPVWQCRIERRINEARALIGKLICFREGNTRPRVMRFVRRAFSGTDISPREYMSRVTERIDFLKQKVYAWANRISRYRRRVDRYTQNRMFQSDERWVYRIWERPVTIQGVTDTHLPDNDAMSAFWRSIWSVPVSHTEGDWMRVVEQACDSIPEMEAISISPLDVARAVRPLPNWKSPGPDGLHNFWIKWLQRSHACLASQFQSSLETGSLPSFFTTGVTHLLHKSGSTAEPKNYRPITCLPTVYKVLTSILRAKIVRHIDNNSIMSVSQNGCRNGSRGTKELLLIDMAISQQVRRSRRDLSTCWIDYKKAYDSVPHTWLRRVLELYKIDATLRTFLVSCMGQWSTVLLYPGCRQVLGNDEPIRIERGIFQGDSLSPLWFCLALNPLSTLLEDSGLGYRLKRGGQVISHLLYMDDLKIFAPSNLQLMELLKVTETFSSAIRMEFGVDKCAVMHVKRGEIMESVGTQLSDSIYLRSLSSTETYKYLGMSEALGIIATDMKQSLKERFFGRLNKVLKSLLSGGNKVRAFNGWVMPVLMYSYGILKWTQTELDALDRKVRTLLTANRMHHPRSSVMRLYIPRKCGGRGFLNAKTLHNREVCSLREYFLETDVGMHRDVVSVDKGLTPLSLANENWRKPVVLDTNDRKEVWQSKELHGRFFRALHGPDVDLLASVSWLRFGDLFGETEGFVCAIMDEVIMTNNYRKYIVKDGTVDICRACHRPGESIRHIVSGCSRLANGEYLHRHNLVARIIHQQLALQYNLVGTEVPYYKYVPDPVLENGHATLYWDRSIITDRTILANKPDIVVIDRRERRAMIVDITVPHDENLVKAENDKKIKYLDLAHEVVDMWDVDSAIIVPIVVTVNGLIAKSLDQHLRRLSLRGWVKGLIQKAVLLDTARIVRRFLSLEP

SEQ ID NO: 13616 - protein, 1196 aa, Spilosoma lubricipeda
MLTRARARALLPSSDSSLRSALPSSDARTEVPTVAEASSSSSSDEFFSPPTSPTPVRRQGRDRPPTSLGSRGPLTSNRAPAAGGDVRRMKWTQSINENVMRAYFRATELGTNLTAYRVRLVSLFQELEPAVNVSAQRLSDQVRAIQRCHLLDDTVLERICSDIRNSLTVPSSPHVVDVVTNSTPQNEDVSELVDSEIISVSTLYSDKIRSTLEDVIREYRYVNFNNRPRLPRLPIHKRNLALVSALDSLLPDYFGNSEDLSDTHSILYCAAIAVCRVAGIKFAENITTTRPENTVPAWQCRIERRIAGARTLIGKLISFRSGNTRPKVMRFVKQAFLGTTISPQQYMSCVTERIDFLKQKVYAWANRIRRYRKRIDRYNQNRMFQRNEKWVYRKWENLSPCMSDGQVPDENATNSFWRSIWSVPVAHTEGDWYRDVERSCESLLPMELINIDKEDVSCAVRSLPNWKAPGPDGLHNFWLKWFRSSHACLASQFQTALDSGSLPQFLTTGITHLLYKSGSAMDPKNFRPITCLPTLYKLLTSILRLKITTHINQNSILSVSQNGCRSGTRGTKELLIIDMTISQQVRRNRKNLATCWIDYKKAYDSVPHTWLLKVLELYKIDTTLCTFLKSCMGQWRTVLRYPGCRQTAVNDVPIKIERGIFQGDSLSPLWFCLALNPLSTLLESSGLGYRLQKDAALISHLFYMDDLKLFAPTKLQLTALLRVTENFSNSIKMEFCVDKCAVMHVKKGVIVESEGIELSDSTKLRFLSATETYKYLGFSQSLGIPEPDMKQSLRERFFGRLKKVLKSLLSGGNKVRAYNGWVMPVLMYSFGILRWTQTELDAIDRRVRTLLTAFRMHHPRSSVMRLYIPRKLGGRGLLNAKTLHNREIYNLREYFLHTDVGVHRSVVTVDTGLTPLALAKENWRKPVVLSTNDRREVWKGKELHGRFYRALNGPDIDFKASASWLRYGDLFGETEGFVCAIMDEVIMTNNYRKYILKDGTVDICRACHRPGESIRHIISGCSRLANGEYLHRHNQVARIVHQQLALKYHLVSSEVPYYRYMPDPVLENGRATLYWDRSIITDRTIVANKPDIVVIDRLERRAMIVDIAVPHDENLVKVEKEKQIKYLDLSHEIVDMWNVDSAIIVPIVVSAHGLIAKSLDQHLKRLTLEGWIKGLMQKAVLLDTARIVRRFLSLEP

SEQ ID NO: 13617 - protein, 1196 aa, Spilosoma lubricipeda
MLTRARSRALLPSSDSSLRSALPSSDAGTEVPTVAEASSSSSSDEFFSPPTSPTPVRRQGRDRPPTSLGSRGPLTSNRAPATGGDVRRMKWTQSINENVMRAYFRATELGTNLTAYRVRLVSLFQELEPAVNVSAQRLSDQVRAIQRCHLLDDAVLERICSDIRNSLTVPSSPHVVDVVTNSTPQNEDVSELVDSEIISVSTLYNDKIRSTLEDVIREYRRVNFNNRPRLPRLPIHKRNLALVSALDSLLPDYFGNSEDLSDTHSILYCAAIAVCRVAGIKFAENITTTRPENTVPAWQCRIERRIAGARTLIGKLISFRSGNTRPKVMRFVKQAFLGTTISPQQYMSCVTERIDFLKQKVYAWANRIRRYRKRIDRYNQNRMFQRNEKWVYRKWENLSPCMSDGQVPDENATNSFWRSIWSVPVAHTEGDWYRDVERSCESLLPMELINIDKEDVSCAVRSLPNWKAPGPDGLHNFWLKWFRSSHACLASQFQTALDSGSLPQFLTTGITHLLYKSGSAMDPKNFRPITCLPTLYKLLTSILRLKITTHINQNSILSVSQNGCRSGTRGTKELLIIDMTISQQVRRNRKSLATCWIDYKKGFNSVPHTWLLKVLELYKIDTTLCTFLKSCMRQWRTVLRYPGCRQTAVNDVPIKIERGIFQGDSLSPLWFCLALNPLSTLLEGSGLGYRLQKEAPVISHLFYMDDLKLFAPTKLQLTALLRVTENFSNSIKMEFGIDKCAVMHVKKGVIVESEGIELSDSTRLRSLSATETYKYLGFSQSLGIPESDMKQSLRERFFGRLKKVLKSLLSGGNKVRAYNGWVMPVLMYSFGILRWTQTELDALDRRVRTLLTAFRMHHPRSSVMRLYIPRKFGGRGLLNVKTLHNREIYNLREYFLHTDVGVHRSVVAMDTGLTPLALAKENWRKPVVLGTNERREVWKGKELHGRFYRALNGPDIDFKASTSWLRYGDLFAETEGFVCAIMDEVIMTNNYRKYILKDGTVDICRACHRPGESIRHIISGCSRLANGEYLHRHNQVARIVHQQLALKYKLVNSEVPYYRYVPDPVLENGRATLYWDRSIITDRTIVANKPDIVVIDRSERRAMIVDIAVPHDENLVKVEKEKQIKYLDLSHEIVDMWDVDSVIIVPIVVSVHGLIAKSLDQHLKRLTLDGWIKGLMQKAVLLDTARIVRRFLSLEP

SEQ ID NO: 13618 - protein, 1198 aa, Ochropleura plecta
MITRLAARQHARLPPPDSPLSSASPPPEPSLIVSAVTPAVAVASSSSDEYFSPPTTPPPACRRGGRRPPDGLGLRGPPASDRVPAPGGSVQRMRWTSSINENVMRSYYGATEGGNNLTAYRVRMLSLFQVLEPAVNVSAQRLSDQVRVIQRNRMLDDTVLDRLRTEMQSSQVITSSSQAVVPPQSHQLVSHDDEVSNDMATNVSTQCNEEMRIALEGAIREYRYISPELRPRLPRLPMHNKNRALVAVLDSQLSNYFDNCENLTDAHSILYCAAVAACRVAHVKFPDDGATQPKPAVPFWQCRIERRIGVARALIGKLICFREGNTRPRVMRFVRRAFAGTDISPPDYMSHITERIDFLKQKVYAWANRIRRYKRRVERYTLNRTFQSDERWVYRAWERPDQGVSDMHLPDDDAMCLFWRNIWSVPVSHTEGEWTREVERACDPIPEMGALTISPQDVACAVRPLPNWKSPGPDGLHNFWLKWIQRSHARLATLFQTALESGSLPKFLTTGITHLLHKSGSTTEPKNYRPITCLPTIYKVLTSILRAKITKHIDDNSIMSASQNGCRNGSRGTKELLLIDMAISQQVRRSRRHLSTCWIDYKKAYDSVPHTWLMRVLELYKVDATLRTFLSSCMRQWNTVLRYPGCRQIQRNSEPIRIERGIFQGDSLSPLWFCLALNPLSTLLEDSGLGYRLRRGGRVISHLLYMDDLKLFAPNDSQLMELLKVTETFSSAISMEFGVDKCAVMHVKRGEIVESVGTQLSDSIHLRSLSANETYKYLGMSEALGINVADMKQSLKERFFGRLRKVFNSLLSGGNKVRAFNGWVMPVLMYSFGILKWTQTELDALDRKVRTLLTAYRMHHPRSSVMRLYIPRSCGGRGFLNAKALHNREICSLREYFLEADVGMHRDVVTVDKGFTPLSLAKENWRKPVVLDTNDRREVWQSKELHGRFFRALHGPDVDQPASVAWLRSGDLFGETEGFVCAIMDEVMMTNNYRRFIVKDGTVDICRACHRPGESIRHIISGCSRLANGEYLHRHNLVARIIHQQLALKYSLVESEVPYYRYEPDPVLEHGNITLYWDRSIITDRTIVANKPDIVVVDRSERRAMIVDITVPHDENLVKAEKDKQIKYIDLAREVVDMWDVDSAIIVPIVVSANGLIAKSLDQHLRRLSLGSWIKGLIQKAVLLDTARIVRRFLSLEP

SEQ ID NO: 13619 - protein, 1200 aa, Ochropleura plecta
MKMITRSAARRDARLPPPGPSLSSASPPPEPSLVVSAVTSAVAVASSSSDEYFSPPTTPPPARRRGGRRPPDGLGLRGPPASDRVPAPGGSVQRMRWTSSINENVMRSYYGATEGGNNLTAYRVRMLSLFQVLEPAVNVSAQRLSDQVRVIQRNRMLDDTVLDRLRTEMQSSQVITSSSQAVVPPQSHQLVSRADEVSNDMATNVSTQCSEEMRSALEGAIREYRYMSPELRPRLPRLPMHNKNRALVAVLDSQLSNYFDNCENLTDAHSILYCAAVAACRVAHVKFPDDGATRPKPAVPFWQCRIERRIGVARALIGKLICFKEGNTRPRVMRFVRRAFAGTDISPPDYMSRITERIDFLKQKVYAWANRIRRYKRRVERYTLNRTFQSDERWVYRAWERPDQGVSDTHLPDDDAMCLFWRSIWSVPVSHTEGEWTREVERACDPIPEMGALTISPQDVACAVRLLPNWKSPGPDGLHNFWIKWIQRSHVRLAALFQSALESGSLPKFLTTGITHLLHKSGSTAEPKNYRPITCLPTLYKVLTSILRAKITKHIDDNSIMSASQNGCRNGSRGTKELLLIDMAISQQVRRSRRHLSTCWIDYKKAYDSVPHTWLMRVLDLYKIDATLRTFLISCMRQWSTVLRYPGCRQIQRNSEPIRIERGIFQGDSLSPLWFCLALNPLSTLLENSGLGYRLKRGGQVISHLLYMDDLKLFAPNDLQLMELLKVTETFSSAIRMEFGVDKCAVMHVKRGEIVESVGTQLSDSINLRSLSATETYKYLGMSEALGINVADMKQLLKERFFGRLRKVFNSLLSGGNKVRAFNGWVMPVLMYSFGILKWTQTELDALDRKVRTLLTAFRMHHPRSSVMRLYIPRSCGGRGFLNAKTLHNREICSLREYFLETDVGMHRDVVAVDKGLTPLSLAKENWRKPVVLDTNDRREVWQSKELHGRFFRALHGPDVDQSASVAWLRSGDLFGETEGFVCAIMDEVMMTNNYRRFIVKDGTVDICRACHRPGESIRHIISGCSRLANGEYLHRHNLVARIIHQQLALKYNLVEAEVPYYRYEPDPVLEHGYITLYWDRSIITDRTVVANKPDIVVVDRSERRAMIVDITVPHDENLVKAEKDKQIKYIDLAREVVDMWDVDSAIIVPIVVSANGLIAKSLDQYLRRLSLGSWIKGLIQKAVLLDTARIVRRFLSLEP

SEQ ID NO: 13620 - protein, 1200 aa, Ochropleura plecta
MKMITRSAARRDARLPPPGPSLSSASPPPEPSLVVSAVTPAVAVASSSSDEYFSPPTTPPPARRRGGRRLPDGLGLRGPPASDRVPAPGGNVQRMRWTSSINENVMRSYYGATEGGNNLTAYRVRMISLFQVLEPAVNVSAQRLSDQVRVIQRNRMLDDTVLDRLLTEMQSSQVITSSSQAVVPPQSHQLVSRADEVSNDMATNVSTQCSEEMRSALEGAIREYRYISPELRPRLPRLPMHNKNRMLVAVLDSQLSNYFDNCENLTDAHSLLYCAAVAACRVAHVKFPDDRATRSKPAVPVWQYRIERRIGVARALIGKLICFREGNTRPRVMRFVRRAFAETDISPSDYMSRITERIDFLKQKVYAWANRIRRYKRRVERYTLNRTFQSDERWVYRAWERPDQDVSDMRLPDDDAMCSFWRSIWSVPVSHTEGEWTREVERACDPIPEMGAITISPQDVACAVRPLPNWKSPGPDGLHNFWLKWIQRSHARLATLFQTALESGSLPKFLTTGITHLLHKSGSTAEPKNYRPITCLPTIYKVLTSILRAKITKHIDDNSIMSASQNGCRNGSRGTKELLLIDMAISQQVRRSRRHLSTCWIDYKKAYDSVPHTWLMRVLELYKIDATLRTFLISCMRQWSTVLRYPGCRQIQRNSEPIRIERGIFQGDSLSPLWFCLALNPLSTLLENSGLGYRLRRGGQVISHLLYMDDLKLFAPNDLQLMELLKVTETFSSSIRMEFGVDKCAVMHVKRGEIVESVATQLSDSINLRSLSATETYKYLGMSEALGINVADMKQSLKERFFGRLRKVFNSLLLGGNKVRAFNGWVMPVLMYSFGILKWTQTELDALDRKVRTLLTAFRMHHPRSSVMRLYIPRSCGGRGFLNAKTLHNREICSLREYFLETDVGMHRDVVAVDKGLTPLSLAKENWRKPVVLDTNDRREVWQSKELHGRFFRALHGPDVDQPASVAWLRAGDLFGETEGFVCAIMDEVMMTNNYRRFIVKDGTVDICRACHRPGESIRHIISGCSRLANGEYLHRHNLVARIIHQQLALKYSLVESEVPYYRYEPDPVLEHGNITLYWDRSIITDRTIVANKPDIVVVDRSERRAMIVDITVPHDENLLKAEKDKQIKYIDLAREVVDMWDVDSAIIVPIVVSANGLIAKSLDQHLRRLSLGSWIKGLIQKAVLLDTARIVRRFLSLEP

SEQ ID NO: 13621 - protein, 1200 aa, Ochropleura plecta
MKMITRSAARRDARLPPPGPSLSSASPPPEPSLVVSAVTSAVAVASSSSDEYFSPPTTPPPARRRGGRRPPDGLGLRGPPASDRVPAPGGSVQRMRWTSSINENVMRSYYGATEGGNNLTAYRVRMLSLFQVLEPAVNVSAQRLSDQVRVIQRNRMLDDTVLDRLRTEMQSSQVITSSSQAVVPPQSHQLVSHADEVSNDMATNVSTQCSEEMRSALEGAIREYRYMSPELRPRLPRLPMHNKNRALVAVLDSQLSNYFDNCENLTDAHSILYCAAVAACRVAHVKFPDDGATRPKPAVPFWQCRIERRIGVARALIGKLICFKEGNTRPRVMRFVRRAFAGTDISPPDYMSRITERIDFLKQKVYAWANRIRRYKRRVERYTLNRTFQSDERWVYRAWERPDQGVSDTHLPDDDAMCLFWRSIWSVPVSHTEGEWTREVERACDPIPEMGALTISPQDVACAIRPLPNWKSPGPDGLHNFWIKSIQRSHTCLATLFQTALESGSLPKFLTTGITHLLHKSGSTAEPKNYRPITCLPTLYKVLTSILRAKITKHIDDNSIMSASQNGCRNGSRGTKELLLIDMAISQQVRRSRRHLSTCWIDYKKAYDSVPHTWLMRVLEMYKVDATLRTFLISCMRQWSTVLRYPGCRQIQRNSEPIRIERGIFQGDSLSPLWFCLALNPLSTLLENSGLGYRLRRGGQVISHLLYMDDLKLFAPNDLQLMELLKVTETFSSAIRMEFGVDKCAVMHVKRGEIMESVGTQLSDSTNLRSLSATETYKYLGMSEALGINVADMKQSLKERFFGRLRKVFNSLLSGGNKVRAFNGWVMPVLMYSFGILKWTQTELDALDRKVRTLLTAFRMHHPRSSVMRLYIPRSCGGRGFLNAKTLHNREICSLREYFLETDVGMHRDVVAVDKGLTPLSLAKENWHKPVVLDTNDRKEVWQSKELHGRFFRALHGPDVDQSASVAWLRSGDLFGETEGFVCAIMDEVMMTNNYRRFIVKDGTVDICRACHRPGESIRHIISGCSRLANGEYLHRHNLVARIIHQQLALKYNLVESEVPYYRYEPDPVLEHGNITLYWDRSIITDRTIVANKPDIVVVDRSERRAMIVDITVPHDENLVKAEKDKQIKYIDLAREVVDMWDVDSAIIVPIVVSANGLIAKSLDQHLRRLSLGSWIKGLIQKAVLLDTARIVRRFLSLEP

SEQ ID NO: 13622 - protein, 1107 aa, Hecatera dysodea
MRWTHSINENVMRSYFGATEGGTNLTAYRGRMLSLFQVLEPAVNVSAQRLSDQVRVIQRNRMLDDAVLDRLRLESRSSRVSPASPPAAVQIQPSISPQPDHVSEDVDDGTISVSTQCNERLRSALEDAFREYRSTPPELRPRLPRLPMHNKNRALVCALDSQLSIYFDSSENLTDTHSILYCGAAAACRVAHVKLPNSDRVARPAVPAWQCRIERRIAEARALIGKLICFREGNTRRRVMRFVRRAFSGTDISPRDYLTRVTERIDFLKQKVYAWANRIRRYKRRVERYTQNRIFQNNERWVYRAWERPDQGVTDTRLPDDEAMLSFWRNIWSVPISHTEGDWTREVERACDSIPEMGAINISPQDVARAVRPLPNWKSPGPDGLHNFWIKWLTRSHARLASQFQSALESRSLPQFFTTGITHLLHKSGSTADPKNYRPISCLPTVYKVLTSILRAKINDHIESNSIISTSQNGCRSGARGTKELLLIDVAISQQVRRSRKDLSTCWIDYKKAYDSVPHTWLMRVLELYKVDAVLRAFLMSCMGQWRTVLHYPGCRQTQANSEPIRIERGIFQGDSLSPLWFCLALNPLSTLLEGSGQGYRLRRGGQVISHLLYMDDLKLFAPNNLQLMKLLKVTETFSSDISMEFGVDKCAVMHVKRGEIMESVGTQLSDSIHLRSLCSTETYKYLGMSEALGINATSVKQSLKERFFGRLNKVLNSLLSGGNKVRAFNGWVMPVLMYSFGILKWTQTELDALDRRVRSLLTANRMHHPRSSVMRLYIPRKCGGRGFLNAKTLHNREVCSLREYFLEADVGMHRDVVAVDKGFTPLSLANENWRKPVVLDTNDRREVWQSKELHGRFYRVLHGPDVDFLASVAWLRFGDLFGETEGFICAITDEVMMTNNYRKYIVKDGTVDICRACHRPGESIRHIISGCSSLANGDYLHRHNLVARIIHQQLALKYNLVESEVPYYRYAPDPVLENGNCTLYWDRSIITDRTIVANKPDIVVIDRLERRAMIVDIAVPHDENFVKAEKDKQSKYLDLAREVVDMWDVNTAVIVPIVVTANGIIAKSLDQHLKRLSLGSWIKGLIQKAVLLDTARIVRRFLSREP

SEQ ID NO: 13623 - protein, 1200 aa, Mythimna impura
MLTRAAARRARLPPPASSLSSASPPPESSPTVSAVTPAVAVASSSSDEYFSPPTSPPPARRRRGRRPPSGLGPRGPPASDRVPAPGGSVQRMRWTQSINENVMRAYYGATEGGNNLTAYRVRMLSLFQVLEPAVNVSAQRLSDQVRVIQRNHMLDDTVLDRLRTEMSNHAIAPSSQPVVPVMVPPSYHLSDHADEEITDMVTNVSTQCNNELRSALECAIREYRNMPLELRPRLPRLPMHNKNKALVAALDLQLSNYFDDCEDLTDTHSIMYCAAVAACRVAHVKFPSCDVSTRPKPAVPAWQCRIERRIGGARALIGKLICFREGNTRPRVMRFVRRAFSGTDISPRDYMSRVTERIDFLKQKVYAWANRIRRYKRRVERYTQNRTFRSNERWVYRAWERPDQGVTDTRLPDDDAMSSFWRSIWSVPVSHTEGDWTREVERACDPIPQMGAIDISPQDVARAVRPLPNWKSPGPDGLHNFWIKWFTRSHARLAYQFQSALESGSLPQFLTTGITHLLHKSGSTAEPKNYRPITCLPTVYKVLTSILRSKINSHIDKNLIMSPSQNGCRNGSRGTKELLLIDMTISQQVRRFRKDLSTCWIDYKKAYDSVPHTWLMRVLELYKIDTTLRTFLMSCMRQWSTVLRYPGCRHIQRNSEPVRIERGIFQGDSLSPLWFCLALNPLSTLLENSGLGYRLKRGGQVISHLLYMDDLKLFAPNNLQLMELLKVTETFSSAIRMEFGVDKCAVMHVKRGEVVESVGTQLTDSINLRSLSPTETYKYLGMSEALGINITDMKQSLKERFFGRLKKVFNSLLSGGNKVRAFNGWVMPVLMYSFGVLKWTQTELDALDRRVRTLLTAYRMHHPRSSVMRLYIPRKCGGRGFLNAKTLHNREVCSLREYFLATDVGMHRDVVAVDKGLTPLSLANENWRKPVVLDTNDRREVWQSKELHGRFFRAFHGPDVDQLASVAWLRFGDLFGETEGFVCAIMDEVIMTNNYRRFIVKDGTVDICRACHRPGESIRHIISGCSRLANGEYLHRHNLVARIIHQQLALKYSLVESEVPYYRYEPDPVLDNGHITLYWDRSIITDRTIVANKPDIVVVDRSERRAMIVDISVPHDENLVKAEKDKQIKYIDLAREVVDMWDVDSAIIVPIVVSANGLIAKSLDQHLRRLALGGWIKALIQKAVLLDTARIVRRFLSLEP

SEQ ID NO: 13624 - protein, 1109 aa, Mythimna impura
MRWTQSINENVMRAYYGATEGGNNLTAYRVRMLSLFQVLEPAVNVSAQRLSDQVRVIQRNHMLDDTVLDRLRTEMSNHAIAPSSQPVVPVMVPPSYHLSDHADEEITDMVTHVSTQCNNELRSALECAIREYRNMPFELRPRLPRLPMHNKNKALVAALDLQLSNYFDDCEDLTDTHSIMYCAAVAACRVAHVKFPSCDVSTRPKPAVPAWQCRIERRIGGARALIGKLICFREGNTRPRVMRFVRRAFSGTDISPRDYMSRVTERIDFLKQKVYAWANRIRRYKRRVERYTQNRTFRSNERWVYRAWERPDQGVTDTRLPDDDAMSSFWRSIWSVPVSHTEGDWTREVERACDPISQMGAIDISPQDVARAVRPLPNWKAPGPDGLHNFWIKWFTRSHARLAYQFQSALESGSLPQFLTTGITHLLHKSGSTAEPKNYRPITCLPTVYKVLTSILRSKINSHIDKNLIMSPSQNGCRNGSRGTKELLLIDMTISQQVRRFRKDLSTCWIDYKKAYDSVPHTWLMRVLELYKIDTTLRTFLMSCMRQWSTVLRYPGCRHIQRNSEPVRIERGIFQGDSLSPLWFCLALNPLSTLLENSGLGYRLKRGGQVISHLLYMDDLKLFAPNNLQLMELLKVTETFSSAIRMEFGVDKCAVMHVKRGEVVESVGTQLTDSINLRSLSPTETYKYLGMSEALGINITDMKQSLKERFFGRLKKVFNSLLSGGNKVRAFNGWVMPVLMYSFGVLKWTQTELDALDRRVRTLLTAYRMHHPRSSVMRLYIPRKCGGRGFLNAKTLHNREVCSLREYFLATDVGMHRDVVAVDKGLTPLSLANENWRKPVVLDTNDRREVWQSKELHGRFFRAFHGPDVDQLASVAWLRFGDLFGETEGFVCAIMDEVIMTNNYRRFIVKDGTVDICRACHRPGESIRHIISGCSRLANGEYLHRHNLVARIIHQQLALKYSLVESEVPYYRYEPDPVLDNGHITLYWDRSIITDRTIVANKPDIVVVDRSERRAMIVDISVPHDENLVKAEKDKQIKYIDLAREVVDMWDVDSAIIVPIVVSANGLIAKSLDQHLRRLALGGWIKALIQKAVLLDTARIVRRFLSLEP

SEQ ID NO: 13625 - protein, 1200 aa, Mythimna impura
MLTRAAARRARLPPPASSLSSASPPPESSPTVSAVTPAVAVASSSSDEYFSPPTSPPPARRRRGRRPPSGLGPRGPPASDRVPAPGGSVQRMRWTQSINENVMRAYYGATEGGNNLTAYRVRMLSLFQVLEPAVNVSAQRLSDQVRVIQRNHMLDDTVLDRLRTEMSNHAIAPSSQPVVPVMVPPSYHLSDHADEEITDMVTHVSTQCNNELRSALECAIREYRNMPLELRPRLPRLPMHNKNKALVAALDLQLSNYFDDCEDLTDTHSIMYCAAVAACRVAHVKFPSCDVSTRPKPAVPAWQCRIERRIGGARALIGKLICFREGNTRPRVMRFVRRAFSGTDISPRDYMSRVTERIDFLKQKVYAWANRIRRYKRRVERYTQNRTFRSNERWVYRAWERPDQGVTDTRLPDDDAMSSFWRSIWSVPVSHTEGDWTREVERACDPIPQMGAIDISPQDVARAVRPLPNWKSPGPDGLHNFWIKWFTRSHARLAYQFQSALESGSLPQFLTTGITHLLHKSGSTAEPKNYRPITCLPTVYKVLTSILRSKINSHIDKNLIMSPSQNGCRNGSRGTKELLLIDMTISQQVRRFRKDLSTCWIDYKKAYDSVPHTWLMRVLELYKIDTTLRTFLMSCMRQWSTVLRYPGCRHIQRNSEPVRIERGIFQGDSLSPLWFCLALNPLSTLLENSGLGYRLKRGGQVISHLLYMDDLKLFAPNNLQLMELLKVTETFSSAIRMEFGVDKCAVMHVKRGEVVESVGTQLTDSINLRSLSPTETYKYLGMSEALGINITDMKQSLKERFFGRLKKVFNSLLSGGNKVRAFNGWVMPVLMYSFGVLKWTQTELDALDRRVRTLLTAYRMHHPRSSVMRLYIPRKCGGRGFLNAKTLHNREVCSLREYFLATDVGMHRDVVAVDKGLTPLSLANENWRKPVVLDTNDRREVWQSKELHGRFFRAFHGPDVDQLASVAWLRFGDLFGETEGFVCAIMDEVIMTNNYRRFIVKDGTVDICRTCHRPGESIRHIISGCSRLANGEYLHRHNLVARIIHQQLALKYSLVESEVPYYRYEPDPVLDNGHITLYWDRSIITDRTIVANKPDIVVVDRSERRAMIVDISVPHDENLVKAEKDKQIKYIDLAREVVDMWDVDSAIIVPIVVSANGLIAKSLDQHLRRLALGGWIKALIQKAVLLDTARIVRRFLSLEP

SEQ ID NO: 13626 - protein, 868 aa, Mythimna impura
MRFVRRAFSGTDISPRDYMSCVTERIDFLKQKVYAWANRIRRYKRRVERYTQNRTFRSNERWVYRAWEQPDQGVADMRLPDDDAMSSFWRNIWSVPVSHTEGGWTREVERACEPIPEMGAITISPQDVARAVRPLPNWKSPGPDGLHNFWIKWLQRSHARLASQYQTALESGSLPEFLTTGVTHLLHKSGSTAEPKNYRPITCLPTVYKVLTSILRAKINHHVDNNAIMSASQNGCRNGSRGTKELLLIDMAISQQVRRSRKDLSTCWIDYKKAYDSVPHTWLMRVLELYKIDATLRTFLMSCMRQWRTVLRYPGCRHIQRNSEPVRIERGIFQGDSLSPLWFCLALNPLSTLLENSGLGYRLKRDGQVISHLLYMDDLKLFAPNNLQLMELLKVTETFSSAIRMEFGVDKCAVMHVKRGEIVESVGTQLSDSINLRSLSPTETYKYLGMSEALGINATDMKQTLRERFFGRLKKVFNSLLSGGNKVRAFNGWVMPVLMYSFGVLKWTQTELDALDRRVRTLLTTYRMHHPRSSVMRLYIPRKCGGRGFLNAKTLHNREVCSLREYFLTADVGMHRDVVAVDKGLTPLSLANESWRKPVVLDTNDRREVWQSKELHGRFFRALHGPDVDQLASVAWLRVGDLFGETEGFVCAIMDEVIMTNNYRRFIVKDGTVDICRACHRPGESIRHIISGCSRLANGEYLHRHNLVARIIHQQLALNYSLVESEVPYYRYVPDPVLDNGDITLYWDRSIITDRTIVANKPDIVVVDRRERRTMIVDISVPHDENLVKAEKDKQIKYIDLAREVVDMWDVDSAIIVPIVVSANGLIAKSLDQHLRRLALGGWIKGLIQKAVLLDTARIVRRFLSLEP

SEQ ID NO: 13627 - protein, 1200 aa, Mythimna impura
MLTRSRAQKLHTHPTSSGSSLSSASQPPGPAPTVSPEIPVAAVASSSSDEYFSPPTTPPPTRRRGRGRPPASLGPRGPPASDRVPAAGGSVQRMRWTSSINENVMRSYFGATEGGINLTAYRGRMLSLFQVLEPAVNVSVQRLSDQVRVIQRNRMLDDAVLDRLRLESQSSRVSPATTPVAVQRLPTASPRPVQVGDADDDAAISVSTQCNDRLRGALEDAFREYRSIPPGLRPRLPRLPMHKRNRALVCALDSQLSNCFDSSKDLTDTHSILYCAAVAACRVAHVKFPNCDRATRPAVPAWQCRIEHRIGEARALIGKLICFREGNTRPRVMRFVRRAFSGTDISPRDYLPCVTERIDFLKQKIYAWANRIRRYKRRVERYTRNRTFQSNERWVYRDWERSDQGVTDTRLPDDDAMCSFWRSIWSAPVSHTEGDWIREVERACDLLPEMGAITISPQDVARAVRPLPNWKSPGPDGLHNFWVKWFQRSHARLASQFQSALESGSLPQFLTTGITHLLHKSGSTAEPKNYRPITCLPTVYKVLTSILRAKINSHIETNSIMSASQNGCRNGSRGTKELLLIDIAINQQVRRSRKNLSACWIDYKKAYDSVPHTWLMRVLELYKVDATLRTFLMSCMGQWRTVLHYPGCRQIQENNEPIRIERGIFQGDSLSPLWFCLALNPLSTLLEGSGLGYRLKRGGQVISHLLYMDDLKLFAPNNLQLEELLKVTETFSSAIRMEFGVDKCAVIHVKRGEIMESVGIQLSDSIHLRSLCSTETYKYLGMSESLGINTDDVKQSLKERFFGRLNKVLNSLLSGGNKVRAFNGWVMPVLMYSFGILKWTQTELDALDRRVRTLLTANRMHHPRSSVMRLYIPRKCGGRGFLNAKTLHNREVCSLREYFLKTDVGMHRDVVAVDKGLTPLSLANENWRKPIVLDTNDRREVWQSKELHGRFYRALHGPDVDLLASVSWLRFGDLFGETEGFVFAIMDEVMMTNNYRKYIVKDGTVDICRACHRPGESIRHIISGCSHLANGDYLHRHNLVARIIHQQLALKYNLVESEVPYYRYVPDPVLDNGNITLYWDRSIITDRTIVANKPDIVVIDRLERRTMIVDIAVPHDENLVKAEKDKQTKYLDLAREVVDMWEVDRAIIVPIVVTANGLIAKSLEQHLRRLSLGSWIKGLIQKAVLLDTARIVRRFLSQEP

SEQ ID NO: 13628 - protein, 1200 aa, Mythimna impura
MLTRSRAQKLHTHPTSSGSSFSSASQPPGPAPTVSPEIPVAAVASSSSDEYFSPPTTPPPARRRGRGRPPASLGPRGPPASDRVPAAGGSVQRMRWTSSINENVMRSYFGATEGGINLTAYRSRMLSLFQVLEPAVNVSVQRLSDQVRVIQRNRMLDDAVLDRLRLESQSSRVSPATTPAAVQRLPTASPRPVQVGDADDDAAISVSTQCNDRLRGALEDAFREYRSTPPGLRPRLPRLPMHKRNRALVCALDSQLSNCFDSSKDLTDTHSILYCAAVAACRVAHVKFPNCDRATRPAVPAWQCRIEHRIGEARALIGKLICFREGNTRPRVMRFVRRAFSGTDISPRDYLPCVTERIDFLKQKIYAWANRIRRYKRRVERYTRNRTFQSNERWVYRDWERSDQGVTDTRLPDDDAMCSFWRSIWSAPVSHTEGDWIREVERACDLLPEMGAITISPQDVARAVRPLPNWKSPGPDGLHNFWVKWFQRSHARLASQFQSALESGSLPQFLTTGITHLLHKSGSTAEPKNYRPITCLPTVYKVLTSILRAKINSHIETNSIMSASQNGCRNGSRGTKELLLIDIAISQQVRRSRKNLSACWIDYKKAYDSVPHTWLMRVLELYKVDATLRTFLMSCMGQWRTVLHYPGCRQIQENNEPIRIERGIFQGDSLSPLWFCLALNPLSTLLEGSGLGYRLKRGGQVISHLLYMDDLKLFAPNNLQLVELLKVTETFSSAIRMEFGVDKCAVIHVKRGEIMESVGIQLSDSIHLRSLCSTETYKYLGMSESLGINTDDVKQSLKERFFGRLNKVLNSLLSGGNKVRAFNGWVMPVLMYSFGILKWTQTELDALDRRVRTLLTANRMHHPRSSVMRLYIPRKCGGRGFLNAKTLHNREVCSLREYFLQTDVGMHRDVVAVDKGLTPLSLANENWRKPIVLDTNDRREVWQSKELHGRFYRALHGPDVDLLASVSWLRFGDLFGETEGFVFAIMDEVMMTNNYRKYIVKDGTVDICRACHRPGESIRHIISGCSHLANGDYLHRHNLVARIIHQQLALKYNLVESEVPYYRYVPDPVLDNGNITLYWDRSIITDRTIVANKPDIVVIDRLERRTMIVDIAVPHDENLVKAEKDKQTKYLDLAREVVDMWEVDNAIIVPIVVTANGLIAKSLEQHLRRLSLGSWIKGLIQKAVLLDTARIVRRFLSQEP

SEQ ID NO: 13629 - protein, 1200 aa, Mythimna impura
MLTRSRAREQATHPTSSGSSLSSASQPPGPAPAVSPVIPAAAVASSSSDEYFSPPTTPPPARRRGRGRPPASLRPRGPPASDRVPAAGGSVQRMRWTQSINENVMRSYFGATEGGSNLTAYRGRMLSLFQVLEPTVNVSAQRLSDQVRVIQRNRMLDDAVLDRLRLESQRSRASSATPPAAVQLQPSALPRPDHVGDADDDAAISVSTQCNERLRSALEDAFREYRSTPPGLRPRLPRLPMHKRNRALVCALDSQLSNCFDSSKDLADTHSILYCAAAAACRVAHVKFPNCDRATRPAVPAWQRRIESRIGEARALIGKLICFREGNTRPRVMRFVRRAFLGTDISPQNYLPCITERIDFLKQKVYAWASRIRRYKRRVERYTQNRTFQSNERWVYRTWERPDQDVTDTRLPDDDAMCSFWRRIWSVPVSHIEGDWIREVERTCDLLPEMGAITISPQDVARAVRPLPNWKSPGPDGLHNFWIKWFQGSHARLASQFQSALESGSLPEFLTTGITHLLHKSGSTVDPKNYRPITCLPTVYKVLTSILRAKINTHIETNSIMSASQNGCRNGSRGTKELLLIDMAISQQVRRSRKDLSTCWIDYKKAYDSVPHTWLMRVLELYKVDTTLRTFLMSCMRQWRTVLHYPGCRQIRENSEPIRIERGIFQGDSLSPLWFCLALNPLSTLLEGSGLGYRLKRGGQVISHLLYMDDLKLFAPNNLHLMELLKVTETFSNAIRMEFGVDKCAVMHVKRGEIMESVGTQLSDSIYLRSLCSTETYKYLGMSEALGINAADVKQSLKERFFGRLNRVLKSLLSGGNKVRAFNGWVMPVLMYSFGILKWTQTELDALDRRVRTLLTANRMHHPRSSVMRLYIPRKCGGRGFLNAKTLHNREVCSLREYFLETDVGMHRDVVAVDKGLTPLSLANGNWRKPIILDTNDRREVWQSKELHGRFYRALHGPDVDLLASVSWLRFGDLFGETEGFVCAIMDEVVMTNNYRKYIVKDGTADICRACHRPGESIRHIISGCSHLANGDYLHRHNLVAKIIHQQLALKYNLVESEVPYYKYVPDPVLDNGSITLYWDRSIITDRTIVANKPDIVVIDRLERRTVIVDIAVPHDDNLVKAEKDKQTKYLDLAREVVDMWEVDTAVIVPIVVTANGLISKSLDQHLRRLSLGSWIKGLIQKAVLLDTARIVRRFLSQEP

SEQ ID NO: 13630 - protein, 930 aa, Mythimna impura
MYCAAVAACRLAHVKFPNCDVATRPKPAVPAWQCRIERRIGGARALIGKLICFREGNTRPRVMRFVRRAFLGTDISPRDYMSRVTERIDFLKQKVYAWANRIRRYKRRVDRYTQNRTFRSNERWVYRAWERPDQGVTDACLPDDDAMSSFWRSIWSVPVSHTEGDWTREVERACDPIPQMGAIDISPQDVARAVRPLPNWKSPGPDGLHNFWIKWFTRSHARLAYQFQSALESGSLPQFLTTGITHLLHKSGSTAEPKNYRPITCLPTVYKVLTSILRSKINSHIDKNLIMSPSQNGCRNGSRGTKELLLIDMTISQQVRRSRKDLSTCWIDYKKAYDSVPHTWLMRVLELYKIDTKLRTFLMSCMRQWSTVLRYPGCRHTQRNSEPVRIERGIFQGDSLSPLWFCLALNPLSTLLENSGLGYRLKRGGQVISHLLYMDDLKLFAPNNLQLMELLKVTETFSSAIRMEFGVDKCAVMHVKRGEVVESVGIQLSDSIHLRSLCSTETYKYLGMSEALGINITDMKQSLKERFFGRLKKVFNSLLSGGNKVRAFNGWVMPVLMYSFGVLKWTQTELEALDRKVRTLLTAYRMHHPRSSVMRLYIPRKCGGRGFLNAKTLHNREVCSLREYFLAAHVGMHRDVVTVDKGLTPLSLANENWRKPVVLDTNDRREVWQSKELHGRFFRALHGPDVDQLASVAWLRSGDLFGETEGFVCAIMDEVIMTNNYRRFIVKDGTVDICRACHRPGESIRHIISGCSRLANGEYLHRHNLVARIIHQQLALKYSLVESEVPYYRYEPDPVLDNGHITLYWDRSIITDRTIVANKPDIVVVDRSERRAMIVDISVPHDENLVKAEKDKQIKYIDLAREVVDMWDVDSAIIVPIVVSGNGLIAKSLDQHLRRLALGDWIKGLIQKAVLLDTARIVRRFLSLEP

SEQ ID NO: 13631 - protein, 1200 aa, Mythimna impura
MLTRAAARRARLPPPASSLSSASPPPESSPTVSAVTPAVAVASSSSDEYFSPPTSPPPARRRRGRRPPSGLGPRGPPASDRVPAPGGSVQRMRWTQSINENVMRAYYGATEGGNNLTAYRVRMLSLFQVLEPAVNVSAQRLSDQVRVIQRNHMLDDTVLDRLRTEMSNHAIAPSSQPVVPVMVPPSYHLSDHADEEITDMVTHVSTQCNNELRSALECAIREYRNMPLELRPRLPRLPMHNKNKALVAALDLQLSNYFDDCEDLTDTHSIMYCAAVAACRVAHVKFPSCDVSTRPKPAVPAWQCRIERRIGGARALIGKLICFREGNTRPRVMRFVRRAFSGTDISPRDYMSRVTERIDFLKQKVYAWANRIRRYKRRVERYTQNRTFRSNERWVYRAWERPDQDVTDTRLPDDDAMSSFWRSIWSVPVSHTEGDWTREVERACDPIPQMGAIDISPQDVARAVRPLPNWKSPGPDGLHNFWIKWFTRSHARLAYQFQSALESGSLPQFLTTGITHLLHKSGSTAEPKNYRPITCLPTVYKVLTSILRSKINSHIDKNLIMSPSQNGCRNGSRGTKELLLIDMTISQQVRRFRKDLSTCWIDYKKAYDSVPHTWLMRVLELYKIDTTLRTFLMSCMRQWSTVLRYPGCRHIQRNSEPVRIERGIFQGDSLSPLWFCLALNPLSTLLENSGLGYRLKRGGQVISHLLYMDDLKLFAPNNLQLMELLKVTETFSSAIRMEFGVEKCAVMHVKRGEVVESVGTQLTDSINLRSLSPTETYKYLGMSEALGINITDMKQSLKERFFGRLKKVFNSLLSGGNKVRAFNGWVMPVLMYSFGVLKWTQTELDALDRRVRTLLTAYRMHHPRSSVMRLYIPRKCGGRGFLNAKTLHNREVCSLREYFLATDVGMHRDVVAVDKGLTPLSLANENWRKPVVLDTNDRREVWQSKELHGRFFRAFHGPDVDQLASVAWLRFGDLFGETEGFVCAIMDEVIMTNNYRRFIVKDGTVDICRACHRPGESIRHIISGCSRLANGEYLHRHNLVARIIHQQLALKYSLVESEVPYYRYEPDPVLDNGHITLYWDRSIITDRTIVANKPDIVVVDRSERRAMIVDISVPHDENLVKAEKDKQIKYIDLAREVVDMWDVDSAIIVPIVVSANGLIAKSLDQHLRRLALGGWIKALIQKAVLLDTARIVRRFLSLEP

SEQ ID NO: 13632 - protein, 960 aa, Mythimna impura
MHKRNRALVCALDSQLSNCFDSSKDLTDTHSILYCAAVAACRVAHVKFPNCDRATRPAVPAWQCRIEHRIGEARALIGKLICFREGNTRPRVMRFVRRAFSGTDISPRDYLPCVTERIDFLKQKIYAWANRIRRYKRRVERYTRNRTFQSNERWVYRDWERSDQGVTDTRLPDDDAMCSFWRSIWSAPVSHTEGDWIREVERACDLLPEMGAITISPQDVARAVRPLPNWKSPGPDGLHNFWVKWFQRSHARLASQFQSALESGSLPQFLTTGITHLLHKSGSTAEPKNYRPITCLPTVYKVLTSILRAKINSHIETNSIMSASQNGCRNGSRGTKELLLIDIAISQQVRRSRKNLSACWIDYKKAYDSVPHTWLMRVLELYKVDATLRTFLMSCMGQWRTVLHYPGCRQIQENNEPIRIERGIFQGDSLSPLWFCLALNPLSTLLEGSGLGYRLKRGGQVISHLLYMDDLKLFAPNNLQLVELLKVTETFSSAIRMEFGVDKCAVIHVKRGEIMESVGIQLSDSIHLRSLCSTETYKYLGMSESLGINTDDVKQSLKERFFGRLNKVLNSLLSGGNKVRAFNGWVMPVLMYSFGILKWTQTELDALDRRVRTLLTANRMHHPRSSVMRLYIPRKCGGRGFLNAKTLHNREVCSLREYFLKTDVGMHRDVVAVDKGLTPLSLANENWRKPIVLDTNDRREVWQSKELHGRFYRALHGPDVDLLASVSWLRFGDLFGETEGFVFAIMDEVMMTNNYRKYIVKDGTVDICRACHRPGESIRHIISGCSHLANGDYLHRHNLVARIIHQQLALKYNLVESEVPYYRYVPDPVLDNGNITLYWDRSIITDRTIVANKPDIVVIDRLERRTMIVDIAVPHDENLVKAEKDKQTKYLDLAREVVDMWEVDKAIIVPIVVTANGLIAKSLEQHLRRLSLGSWIKGLIQKAVLLDTARIVRRFLSQEP

SEQ ID NO: 13633 - protein, 1200 aa, Mythimna impura
MLTRAAARRARHPPPDSPLSSASPPPDLGSPVSPVAAVASSSSDEYFSPPTSPTPVRRPGRGRPPKSLGPGGQPAPSRVPAAGGCVQRMRWTQSMNENVMRAYYGSTEGGTSLTAYRDRMLSLFQDLEPTVNVSAQRLSDQVRFIQRNHRLDDAALDRLRSEVLSNQIVSTSIQTQTAATPTTNAISPRSILNNDDADERVVTVSSQCNDELRSALEDALREYRLTPTELRPRLPRLPMHKKNRALVCTLDSLLKNIFESSENLVDTHSILYCGAVAACRLANIKFPNTDGTIRPKPAVPAWQYRIERRIDGARVLIGKLHSFREGNTRPRVMRFVRRAFLGTSISPQEYMSRVTERIDFLKQKVCAWASRIRRYKRRVDRYSQNRIFQSDERWVYRAWERPEQNVIDGLRPDDFATITFWRNIWSVPVSHTEGGWIREVERVCEAIPEMEKITISPADVAKAVRPLPNWKSPGPDGLQNFWLKWYRNSHAPLASQFQSTLESGSLPEYLTTGVTHLLHKTGNPAEPKNYRPITCLSTVYKLLTSILREKINRHIENNSIMSASQNGCRNGSRGTKELLLIDMAVSQQARRSRKDLSTCWIDYKKAYDSVPHTWLMRVLELYKIDTTLRTFLESCMRQWKTVLRYPGCRPIQGDDEPIRIKRGIFQGDSLSPLWFCLALNPLSTLLEDSGLGYRLRRGGQAISHLLYMDDLKLFAPSNLQLMELLKVTETFSSAIRMEFGVDKCAAMHVKQGEIMESEGIQLPDSIHLKSLSSTETYRYLGMSEALGINNADMKQSLKERFFGRLKKVLNSLLSGGNKVRAFNGWVMPVLMYSFGILKWTQTELDALDRRVRTLLTANRMHHPRSSVMRLYISRKCGGRGFLNAKTLHNREVCSLREYFLKTDVGMHRDVVAVDKGLTPLSMAKEDWRKPVVLTTDDRKEVWKGKELHGRFYRALHEPDVDFLASVAWLRFSDLFGETEGFVCAIMDEVILTNNYRKYIMKDGTVDVCRACHRPGESIRHIISGCSRLANGEYLHRHNQVARIIHQQLALKYNLVDSEVPYYKYVPDPVLENDHVTLYWDRSIITDRTIVANKPDIVVIDRLARRAIIVDVTIPHDENLVKAEKEKQIKYLDLAHEVVGMWNMDSAVIVPIVVTANGLIAKSFDDHLSKLSLRGWIKGLIQKAVLLDTARIVRRFLSLEP

SEQ ID NO: 13634 - protein, 868 aa, Phlogophora meticulosa
MRFVRRAFSGTDISSRDYLSRVTERIDFLKQKICAWANRIRRYKRRVERYTQNRTFRSDERWVYRAWERPDQGVIDTCLPDDKAMYSFWRSIWSVPVRHTEGDWTREVERACEPLPVMGTINISPQDVACAVRPLPNWKSPGPDGLHNFWIKWLKSSHARLATQFQSALESGSLPQFLTTGITHLLHKSGSTAEPKNYRPITCLPTVYKLLTSILRSKINNHIETSSIMSVSQNGCKNGSRGTKELLLIDMTISQQVRRSRKDLSTCWIDYKKAYDSVPHTWLMRVLELYKIDATLRTFLTSCMRQWRTVLHYPGCRQFRENSEPIRIERGIFQGDSFSPLWFCLALNPLSTLLEGSGLGYRLRRGTQVISHLLYMDDLKLFAPNNLQLMELLKVTETFSSAIRMDFGVDKCAVMHVKRGGIVESAGTQLSDSIYLRSLSSTETYKYLGMSEALGINAADMKQSLKERFFGRLNKVLNSLLSGGNKVRAFNGWVMPVLMYSFGILKWTQTELDALDRRVRTLLTANRMHHPRSSVMRLYISRKCGGRGFLNAKTLHNREVCSLREYFLEADVGMHRDVVAVDKGLTPLSLANENWRKPIVLDTTDRMEIWKSKELHGRFYRVLHGSDVDLLASISWLRFGDLFGETEGFVCAIMDEVIMTNNYRKYIVKDGTVDICRACHRPGESIRHIISGCSRLANGEYLHRHNLVARIIHQQLALKYNLVELEVPYYKYVPDPVLENGNITLYWDRSIITDRTIVANKPDIVVIDRSERRTMIVDITVPHDEDLVKAEKEKQMKYLDLAREVVDMWDVNTAVIVLIVVTANGIIAKSLDQHLRRLSLGSWIKGLIQKAVLLETARIVRRFLSQEP

SEQ ID NO: 13635 - protein, 1202 aa, Phlogophora meticulosa
MLTRSRARVLNAPTTSSGSSLSSASQLPGPAPDVSPVTPAAAVASSSSDEYYSPPTSPPPVRRCGRGRPPASLGLRGPPASARVPASGGSVQRMRWTQSINENVMRSYYGATEGGINLTAYRGRMLSLFQVLEPAVNVSAQRLSDQVRVIQRNHMLDDAVLDRLRLNSRSNRVTPASPPVAVQLQNLPSVSPRPDYVGEEDDDADISVSSQCNVRLRSALEDAFREYRSTPPGLRQRLPRLPMHKKNKALMCTLDSLLSNSFDSSRDLADTHSILYCAAVAACRVANVKFPNSVRSTRPAIPAWQYRIERRIGEARILIGKLICFREGNTRPRVMRFVRRAFSGTDISSRDYLTRVTERIDFLKQKICAWANRIRRYKRRVERYTQNRTFRSDERWVYRTWERPDQGVTDTFLPDDEAMCLFWRSIWSVPVSHTEGDWTREVERTCEPLPEMGAINISPQDVACAVRPLPNWKSPGPDGLHNFWIKWLKSSHARLASQFQSALESGSLPQFLTTGITHLLHKSGSTAEPKNYRPITCLPTVYKVLTSILRSKINNHIDSTSIMSVSQNGCKNGSRGTKELLLIDMAISQQVRRSRKDLSTCWIDYKKAYDSVPHTWLMRVLELYKIDATLRTFLKSCMGQWRTVLHYPGCRQFQENSEPIRIERGIFQGDSLSPLWFCLALNPLSTLLEGSGLGYRLRRGGQVISHLLYMDDLKLFAHNNLQLMKLLKVTETFSSAIRMDFGVDKCAVMHVKRGGIVESAGTQLSDSIYLRSLSSTETYKYLGMSEALGINTADMKQSLKERFFGRLNKVLNSLLSGGNKVRAFNSWVMPVLMYSFGILKWTQTELDALDRRVRTLLTANRMHHPRSSVMRLYISRKCGGRGFLNAKTLHNREVCSLREYFLETDVGMHRDVVAMDKALTPLSLANENWRKPIVLDTTDRMEIWKSKELHGRFYRVLHGPDVDLSASVSWLRFGDLFGETEGFVCAIMDEVIMTNNYRKYIVKDGTVDICRACHRSGESIRHIISGCSRLANGDYLHRHNLVAKIIHQQLALKYNLVESEVPYYKYVPDPVLENGNITLYWDRSIITDRTIVANKPDIVVIDRLERRTMIVDITVPHDENLVKAEKEKQIKYLDLAREVVDMWDVNTAVIVPIVVTANGIIAKSLDQHLRRLSLGSWIKGLIQKAVLLDTARIVRRFLSQEP

SEQ ID NO: 13636 - protein, 1198 aa, Phlogophora meticulosa
MLTRSAARRARPPPPASSLSSASSPPKPSTIVSTVKPAVPVASSSSDEYFSPPTSPPPARRRRGRRPPDGLGPRGPPASDRVPAPGGSVQRMRWTQSINENVMRSYYGATEGGSNLTAYRVRMLSLFQVLEPAVNVSAQRLSDQVRVIQRNHMLDDVVLDRLRTEMQSSRVITSPSHTVVPPQYNIVLSSFADGEGSDKVTNVSTQYNEELRSALEGAIREYRFMLPALRPRLPRLPMHNKNRALVAALDSQLSNYFDNCDDLTDAHSILYCAAVAACRVAHVKFPYDIATRPKPAVPAWQCRIERRIAGARALIGKLVCYREGNTRPRVMRYVRRAFLGTDISPRDYMSRVTERIDFLKQKVYAWASRIRRYKRRVERYTQNRTFQSNERWVYRAWERPVQGVTDTHLPDDDVMCSFWRNIWSVPVSHTEGDWTREVERACDPIPQMGAITISPQDVARAVRPLPNWKSPGPDGLHNFWIKWLQKSHARLASQFQSALETGSLPQFLTTGITHLLHKSGSTTEPKNYRPITCLPTVYKVLTSILRVKINNHIDSNSIMSASQNGCRNGSRGTKELLLIDTAISQQVRRSRKDLSTCWIDYKKAYDSVPHTWLKRVLELYKVDATLRTFLTSCMGQWRTVLRYPGCRQIQRNSEPIRIERGIFQGDSLSPLWFCLALNPLSTLLEDSGLGYRLKRGGQVVSHLLYMDDLKLFAPSDLQLMELLTVTKTFSSAIRMEFGVDKCAVMHVKRGKIVESVGTQLPDFINFRALSPIETYKYLGMSEALGINAADMKQSLKERFFGRLKKVCNSLLSGGNKVRAFNGWVMPVLMYSFGILKWTQTELDALDRRVRTFLTASRMHHPRSSVMRLYIPRKCGGRGFLNAKTLHNREICSLRDYFLETDVGMHRDVVAVDQGLTPLSLAKENWRKPVVLDTNDRKEVWQSKELHGRFFQALHGPDVDQLASVSWLRFGDLFGETEGFVCAIMDEVIMTNNYRRFIVKDGTVDICRACHRPGESIRHIISGCSRLANEEYLHRHNLVARIIHQQLALKYSLVESEVPYYKYVPDPVLENGSVTLYWDRSIITDRTIVANKPDIVVMDRIERRATIIDVTVPHDGNLVKAEKDKQIKYLDLAREVVDMWDVDSAIVVPIVVSANGLIAKSLDQHLRRLALGSWIKGLIQKAVLLDTARIVRRFLSLEP

SEQ ID NO: 13637 - protein, 1199 aa, Laspeyria flexula
MLTRARKREALIPPPDSSLSVASQPPDPVPTTPLTAEAGSSSSSDEYFSPPSSPTPVPRRGRGRPPASLGPRGPPAVNRAPAAGGNVQRMRWSSSVNENVMRAYFAATEGGINLTAYRSRMLALFQDLEPTTKVTAQRLSDQVRAIQRCRMLDDTVLDRLRLECLQNNPTVPLQVNNLNNIISNAITIQADHNLEEVDGISSVDTQCNEEVRVALERALREYRFTSLQFRPRLPRLPMHKKNLALVITLDSLLSDYFDNSENLGDTHSILYCAAVAACRLAGVKFLGIEPPSHERPSTPAWQCRIERRIAGARILIGKLISFRAGNTRPRVMRFVNQAFSGTDVSPNEYLSRVTERIDFLKQKVYAWANRIRRFKKRVDRYTVNRLFQRDQRRVYRNWERPTQEVSDERLPNATATNEFWSSIWSEPVLHSEGEWIWDVERACERIPLMESVVISAEDIASAVRPMANWKSPGPDGLHNFWLRWLRSSHGRLASQFQSALESGSLPEFLTTGCTHLLHKSGSVTEPGNYRPITCLPSVYKLLTSVLRAKITKHIDDTRTMSISQNGCRRGSRGTKELLLVDMTISQQVRRSRKDLATCWIDYRKAFDSVPHSWLLRVLELYKVDITLRTFLESCMRQWRTVLTYPGCRLICGNGEPVRIKRGIFQGDSLSPLWFCLALNPLSTLLESSGLGYRLRRGGHVISHLLYMDDLKLIAPTDLQLKGLLKATEDFSKSIKMDFGVDKCAIMHVKRGEIVESDGIQLSDSINFRSLLVTDTYKYLGMSQALGIKETDMKQSLQERFFGRLKKVLNSLLSGGNKVRACNGWVMPLLMYSFGILKWTQTELDTLDRRVRTMLTAYRMHHPRSSVMRLYIPRKCGGRGFLNAKTLHNREVYNLREYFMGKDEGMHRDVVAVDSGLTPLSLAKDNWRRPIVLSTDDRRQVWQSKELHGRFYKALHGPDVDRVASVAWLRFGDLFGETEGFACAIADEVIKTNNYRKYILRDGTVDICRACHRPGESLRHIVSGCSRLANGEYLHRHNQVARIIHQQLALRYKLVDVEVPYYRYAPEPVLENSHTTLYWDRSIITDRTVIANKPDIVVLDRSKRLAVIVDITVPHDENLVKAEKDKQTKYLDLAHEIVDMWDVDSAIIVPIVVTVNGLVAKSLDQHLKRLGLGSWLKGLIQKAVLLGTARIVRRFLSLEP

SEQ ID NO: 13638 - protein, 1197 aa, Xestia xanthographa
MLTRSAAARRARLPPPDSSLSSASPPPEPSPIVSAVTPAVAVASSSSDEYFSPPTTPPPARRRGGHRPPDGLGPRGPPASDRVPAPGGSVQRMRWTQSINENVMRAYYGATEGGNNLTAYRVRMLSLFQVLEPAVNVSAQRLSDQVRVIQRNRMLDDTVLDRLRTEIQSNHVIVTPSQAVVPPQSSIIPCDNDVSNDMVTNVSTQCNVEMRSALEGAIREYRFMQPDLRPRIPRLPMHNRNRALVAVLDSQLSNYFDNCEDLTDVHSILYCAAVAACRVAHVKFPSDRATRLKPAVPAWQYRIERRIGGARALIGKLVCFREGNTRPRVMRFVRQAFSGTDISPRDYMSRVTERIDFLKQKVYAWANRIRRYKRRVDRYTQNRTFQKDERWVYRAWERPDQGVADTHLPDDDAMCSFWRSIWSVPVSHAEGEWTRVIERACDPISEMGAINISPQDVARAVRPLPNWKSPGPDGLHNFWIKWFTRSHARLATLFQSALESGSLPEFLTTGITHLLHKSGSTAEPKNYRPITCLPTVYKVLTSILRTKISKHIDDNSVMSASQNGCRNGSRGTKELLLIDMAISHQVRRSRKDLSTCWIDYKKAYDLVPHTWLMRVLELYKVDATLRTFLMSCMGQWRTVLRYPGCRQIQRNSEPIRIERGIFQGDSFSPLWFCLALNPLSTLLEDSGLGYRLRKDGQVISHLLYMDDLKLFAPNDLRLMELLKVTETFSNAIRMEFGVDKCAVMHVKRGEIVESVGTQLSDSITLRSLSATETYKYLGMSEALGVNVADMKQSLKERFFGRLKKVLNSLLSGGNKVRAFNGWVMPVLMYSFGILKWTQTELDALDTKVRKLLTAYRMHHPRSSVMRLYIPRKCGGRGFLNAKTLHNREICSLREYFLGTDVGMHRDVVTMDKGFTPLSLAKENWRKPPVLDTNDRREVWQSKELHGRFFRALHGPDVDLSASVGWLRSGDLFGETEGFVCAIMDEVMMTNNYRRFIVKDGTVDICRACHRPGESIRHIISGCSRLANGEYLHRHNLVARIIHQQLALKYNLVESEVPYYRYVPDPVLDNGCITLYWDQSIITDRTIVANKPDIVVVDRSERRAMIVDITVPHDENLVKAEKDKQIKYLDLAREVVDMWEVDSAIIVPIVVSAHGLIAKSLDQYLRRLSLGSWIKGLIQKAVLLDTARIVRRFLSLEP

SEQ ID NO: 13639 - protein, 1198 aa, Xestia xanthographa
MLTRSAAARRARLPPPDSSLSSASPPPEPSPIVSAVTPAVAVASSSSDEYFSPPTTPPPARRRGGRRPPDGLGPRGPPASDRVPAPGGSVQRMRWTQSINENVMRAYYGATEGGNNLTAYRVRMLSLFQVLEPAVNVSAQRLSDQVRVIQRNRMLDDTVLDRLRTEIQSSHVIATPSQAVVPPQSSIIPNCDNDVGNDMVTNVSTQCNVEMRSALEGAIREYRFMQPDLRPRIPRLPMHNKNRALVAVLDSQLSNYFDNCEDLTDVHSILYCAAVAACRVAHVKFSSDRATRPKPAVPAWQYRIERRIGGARALIGKLVCFREGNTRPRVMRFVRQAFSGTDISPRDYMSRVTERIDFLKQKVYAWANRIRRYKRRVDRYTQNRTFQKDERWVYRAWERPDQGVADTHLPDDDAMCSFWRSIWSVPVSHAEGEWTRVIERACDPVSEMGAITISPQDVARAVRPLPNWKSPGPDGLHNFWIKWFTRSHARLATLFQSALESGSLPEFLTTGITHLLHKSGSTAEPKNYRPITCLPTVYKVLTSILRTKISKHIDDNSVMSASQNGCRNGSRGTKELLLIDMAISHQVRRSRKDLSTCWIDYKKAYDSVPHTWLMRVLELYKVDATLRTFLMSCMGQWRTVLRYPGCRQIQRNSEPIRIERGIFQGDSLSPLWFCLALNPLSTLLADSGLGYRLRKDGQVISHLLYMDDLKLFAPNDLQLMELLKVTDTFSSAIRMEFGVDKCAVMHVKRGEIVESVGTQLSDSITLRSLSATETYKYLGMSEALGVNVADMKQSLKERFFGRLKKVFNSLLSGGNKVRAFNGWVMPVLMYSFGILKWTQTELDALDTKVRKLLTAYRMHHPRSSVMRLYIPRKCGGRGFLNAKTLHNREICSLREYFLGTDVGMHRDVVTVDKGLTPLSLAKENWRKPPVLDTNDRREVWQSKELHGRFFRALHGPDVDLPASVAWLRSGDLFGETEGFVCAIMDEVMMTNNYRRFIVKDGTVDICRACHRPGETIRHIISGCSRLANGEYLHRHNLVARIIHQQLALKYNLVESEVPYYRYVPDPVLDNGCITLYWDQSIITDRTIVANKPDIVVVDRSERRAMIVDITVPHDENLVKAEKDKQIKYLDLAREVVDMWEVDSAIIVPIVVSAHGLIAKSLDQYLRRLSLGSWIKGLIQKAVLLDTARIVRRFLSLEP

SEQ ID NO: 13640 - protein, 925 aa, Xestia xanthographa
MAACRVARVKFPNNDRATRPKLTAPAWQCRIERRIGEARALIGKLICFREGNTRPRVMRFVRRAFSGTDISFRDYLARVAERIDSLKQKICAWASRIRRYKRRVERYTQNRTFQSDERWVYRAWERPDQGVTDMRLPDDSAMCSFWRSIWSVPVSHTEGDWTREVEQACDPIPEMGAIVISPQDVARAVRPLPNWKSPGPDGLHNFWIKWFQRSHACLASQFQSALESGSLPQFLTTGITHLLHKSGSAAEPKNYRPITCLPTVYKVLTSILRAKINQHIESNSIMSASQNGCRNGSRGTKELLLIDMAISQQVRRSRKNLSTCWIDYKKAYDSVPHTWLMRVLELYKVDATLRTFLMSCMGQWRTVLRYPGCRQIQGNSEPIRIERGIFQGDSLSPLWFCLALNPLSTLLERSGLGYLLRRDGQVISHLLYMDDLKLFAPNNLQLMKLLKVTETFSSAIRMEFGVDKCAVMHVKRGDIMESVGTQLSDSIHLRPLSSTETYKYLGMSEALGINTADMKQSLRERFFGRLNKVLGSLLSGGNKVRAFNGWVMPVLMYSFGILKWTQTELDALDRRVRTLLTANRMHHPRSSVMRLYIPRKCGGRGFLNAKTLHNREVCSLREYFLEADGEMHRDVVSVDKGLTPLSLANENWRKPKVLDTNDRKVEWQGKELHGRFYRALHGPDVDFLASVSWLRFGDLFGEIEGFVCAIMDEVMMTNNYRKYIVKDGTVDICQACHRPGESIRHIISGCSSLANGEYLHRHNLVARIIHQQLALKYNLVESEVPYYKYAPDPVLDNGHITLYWDRPITTDRTVVANRPDIVVIDRLERRTMIVDITIPHDENLVKAEKDKQFKYLDLAREVVDMWDVDTAVIVPIVVSANGLIAKSLDQHLRRLSLGSWIKGLIQKAVLLDTARIVRRFLSQEP

SEQ ID NO: 13641 - protein, 1200 aa, Cosmia trapezina
MLTRSATRKARLPPPDSSLSSASPPPVPSLTVSAVSTPAAVVASSSSDEYFSPPTTPPPARRRGGRRPPDGLGPRGPPASDRVPAPGGSVQRMRWTRAINENVMRSYYGATEGGNNLTAYRVRMHSLFQVLEPALNVSAQRLSDQVRVIQRNHMLDDTVLDRLRNEMQSSRVIAPLSQTIVAPPPPQCNTTQADEGSDGTAAHVSTQCNEELRSALEGAIQEYRFVSPELRPRLPRLPMHNKNRALVAALDSQLSNYFDDCEDLTDTHSILYCAAVAACRVAHVKFANDSRATRPKPAVPAWQCRIERRIGGARALIGKLICFREGNTRPRVMRFVKRAFSGTDVSPQDYMSRVTERIDFLRQKVYAWANRIRRYKRRVDRYTQNRTFQSDERWVYRGWERPDQGVTDTRLPDDDAMCSFWRSIWSVPVSHTEGDWAREVRRACDPIPEMGAITICPQDVARAVRPLPNWKSPGPDGLHNFWIKWFLGSHARLAAQYQSALQSGSLPQFLTTGITHLLHKSGSTTEPKNYRPITCLPTVYKVLTSILRAKINEHIDTNSIMSASQNGSRNGSRGTKELLLIDMAISQQVRRSRRDLSTCWIDYKKAYDSVPHTWLMRVLELYKVDATLRTFLMSCMGQWRTVLRYPGCRNIQRNSEPIRIERGIFQGDSLSPLWFCLALNPLSTLLENSGLGYRLRRGGQVISHLLYMDDLKLFAPSNLQLMELLKVTETFSSAIRMEFGVDKCAVMHVKRGEIVESVGTQLPDSINLRTLSAAETYKYLGMSEALGINVADMKQSLKERFFGRLKKVFNSLLSGGNKVRAFNGWVMPVLMYSFGILKWTQTELDALDRRVRTLLTAYRMHHPRSSVMRLYIPRKCGGRGFLNAKTLHNREICSLREYFLETDVGMHRDVVAVDKGLTPLSLAKENWRKPVVLDANDRMEVWQSKELHGRFFRALHGPDVNLLASVAWLRSGDLFGETEGFVCAIMDEVIMTNNYRRFIVKDGTVDICRACHRPGESIRHIISGCSRLANEEYLHRHNLVARIIHQQLALKYSLVESEVPYYRYVPDPVLENGHITLYWDRSIITDRTIVANKPDIVVVDRTERRAMIVDITVPHDGNLVKAEKDKQIKYIDLAREVVDMWDVDSAVIVPIVVSANGLIAKSLDQHLRRLSLGSWIKGLIQKAVLLDTARIVRRFLSLEP

SEQ ID NO: 13642 - protein, 1200 aa, Cosmia trapezina
MLTRSATRKARLPPPDSSLSSASPPPVPSLTVSAVSTPAAVVASSSSDEYFSPPTTPPPARRRGGRRPPDGLGPRGPPASDRVPAPGGSVQRMRWTRAINENVMRSYYGATEGGNNLTAYRVRMHSLFQVLEPALNVSAQRLSDQVRVIQRNHMLDDTVLDRLRNEMQSSRVIAPLSQTIVAPPPPQCNTTQADEGSDGTAANVSTQCNEELRSALEGAIQEYRFVSPELRPRLPRLPMHNKNRALVAALDSQLSNYFDDCEDLTDTHSILYCAAVAACRVAHVKFANDSRATRPKPAVPAWQCRIERRIGGARALIGKLICFREGNTRPRVMRFVKRAFSGTDVSPQDYMSRVTERIDFLRQKVYAWANRIRRYKRRVDRYTQNRTFQSDERWVYRGWERPDQGVTDTRLPDDDAMCSFWRSIWSVPVSHTEGDWAREVRRACDPIPEMGAITICPQDVARAVRPLPNWKSPGPDGLHNFWIKWFLGSHARLAAQYQSALQSGSLPQFLTTGITHLLHKSGSTTEPKNYRPITCLPTVYKVLTSILRAKINEHIDTNSIMSASQNGSRNGSRGTKELLLIDMAISQQVRRSRRDLSTCWIDYKKAYDSVPHTWLMRVLELYKVDATLRTFLMSCMGQWRTVLRYPGCRNIQRNSEPIRIERGIFQGDSLSPLWFCLALNPLSTLLENSGLGYRLRRGGQVISHLLYMDDLKLFAPSNLQLMELLKVTETFSSAIRMEFGVDKCAVMHVKRGEIVESVGTQLPDSINLRTLSAAETYKYLGMSEALGINVADMKQSLKERFFGRLKKVFNSLLSGGNKVRAFNGWVMPVLMYSFGILKWTQTELDALDRRVRTLLTAYRMHHPRSSVMRLYIPRKCGGRGFLNAKTLHNREICSLREYFLETDVGMHRDVVAVDKGLTPLSLAKENWRKPVVLDANDRMEVWQSKELHGRFFRALHGPDVNLLASVAWLRSGDLFGETEGFVCAIMDEVIMTNNYRRFIVKDGTVDICRACHRPGESIRHIISGCSRLANEEYLHRHNLVARIIHQQLALKYSLVESEVPYYRYVPDPVLENGHITLYWDRSIITDRTIVANKPDMVVVDRTERRAMIVDITVPHDGNLVKAEKDKQIKYIDLAREVVDMWDVDSAVIVPIVVSANGLIAKSLDQHLRRLSLGSWIKGLIQKAVLLDTARIVRRFLSLGP

SEQ ID NO: 13643 - protein, 961 aa, Mamestra brassicae
MHNKNRALVAALDSQLSNYFDDCEDLTDTHSIMYCAAVAACRVAHVKMSNDRVTRPKPAVPAWQCRIERRIGGARALIGKLICFREGNTRPRVMRFVRRAFSGTDISPRNYMSRVTERIDFLKQKVYAWANRIRRYRRRVERYTQNRTFRSNERWVYRVWEQPDQGVTDTRLPDDDTMCSFWRNIWSVPVSHTEGDWIREVERACDPLQEMGAITISPQDVARAVRPLPNWKSPGPDGLHNFWIKWLQRSHARLASQYQTVLESGSLPEFLTTGVTHLLHKSGSTAEPKNYRPITCLPTVYKVLTSILRAKINNHINSNNIMSVSQNGCRNGSRGTKELLLIDMAISQQVRRSRKDLSTCWIDYKKAYDSVPHTWLMRVLELYKIDTMLHTFLMSCMGQWRTVLRYPGCRNIQRNSEPVKIERGIFQGDSLSPLWFCLALNPLSTLLENSGLGYRLKRGGQILSHLLYMDDLKLFAPSNLQLMELLKVTETFSSAIRMEFGVDKCAVMHVKRGEIMESVGTQLSDSINLRSLSSTETYKYLGTSEALGINVTDMKQSLKERFFGRLKKVFNSLLSGGNKVRAFNGWVMPVLMHSFGVLKWTQTELDALDRRVRTLLTAYRMHHLRSSVMRLYIPRKCGGRGFLNAKTLHNREICSLREYFLAVDVGMHRDVVAVDKGLTPLSLANENWCKPAVLDTNDRRAVWQSKELHGRYFRALHGPDVDQLASVAWLRFGDLFGETEGFVCAIMDEVIMTNNYRRFIVKDGTVDICRACHRPGESIRHIVSGCSRLANGEYLHRHNLVARIIHQQLALKYSLVESEVPYYRYAPDPVLDNGNITLYWDRSIITDRTIVANKPDIVVVDRIERRAMIVDITVPHDENLVKAEKDKQIKYIDLAREVVDMWDVDSAIIVPIVVSANGLIATSLDQHLRRLSLGSWIKGLIQKAVLLDTARIVRRFLSLEP

SEQ ID NO: 13644 - protein, 1198 aa, Noctua fimbriata
MLTRAAAKRARLSPPDPSLSSASPPPESSPVMSAVTPAVAVASSSSDEYFSPPTTPPPVRRRGGRRPPDGLGPRGPPASDRVPAPGGSVQRMRWTQSINENVMRSYYGATEGGNNLTAYRVRMLSLFQLLEPAVNVSAQRLSDQERVIQRNRMLDDTVLDRLRTEMQSSHVIATPPPQAVVPPQSTIIPNRDNDVSNDIVTNVSTQCNEEMRSALEGAIREYRFMQPDLRPRIPRLPMHNKNRALVAVLDSQLSNYFDNCEDLTDAHSILYCAAVAACRVAHVKFSNDRATRPKPAVPPWQYRIERRIGGARALIGKLICFREGNTRPKVMRFVRRAFSGTDISPRDYMSRITERIDFLKQKVYAWANRIRRYKRRVDRYTQNRTFQRDERWVYRAWERPDQGVADTRLPDDDAMCSFWRSIWSVPVSHTEGEWTQGVERACDLVPEMGAITISPQDVVRAVRPLPNWKSPGPDGLHNFWIKWFTRSHARLAILFQSALESGSLPEFLTTGITHLLHKSGSTAEPKNYRPITCLPTVYKVLTSILRAKINKHIDDNSIMSASQNGCRNGSRGTKELLLIDMAISQQVRRSRRDLSTCWIDYKKAYDSVPHTWLMRVLELYKVDATLRTFLMSCMGQWRTVLRYPGCRQIQRNSEPIRIERGIFQGDSLSPLWFCLALNPLSTLLEDSGLGYRLRRGGQVISHLLYMDDLKLFAPNDLQLMELLKVTETFSSAIRMEFGVDKCAVMHVKRGEIVESVGTQLSDSINLRSLSATETYKYLGMSEALGINVADMKQSLKERFFGRLKKVFNSLLSGGNKVRAFNGWVMPVLMYSFGILKWTQTELDALDRRVRTLLTASRMHHPRSSIMRLYIPRKCGGRGFLNAKTLHNREICSLREYFLETDVGMHRDVVAVDKGLTPLSLAKENWRKPLVLDTNDRMEVWQSKELHGRFFRALHGPDVDLSASVAWLRSGDLFGETEGFVCAIMDEVMMTNNYRRFIVKDGTVDICRACHRPGESIRHIISGCSRLANGEYLHRHNLVARIIHQQLALKYNLVESEVPYYKYVPDPVLENGSITLYWDQSIITDRTIVANKPDIVVVDRSERRTMIVDITVPHDENLVKAEKDKKIKYLDLAREVVDMWDVDSAIIVPIVVSAHGLIAKSLDQYLRRLSLGSWIKGLIQKAVLLDTARIVRRFLSLEP

SEQ ID NO: 13645 - protein, 1151 aa, Noctua fimbriata
MCKKINKGHNNNNNKIRRRPPDGLGPRGPPASDRVPAPGGSVQRMRWTQSINANVMRAYYGATEGGNNLTAYRVRMLSLFQVLEPAVNVSAQRLSDQVRVIQRNRMLDDTVLDRLRTEMQSSHVIATPPPQAVVPPQSTIIPNRDNDVSNDIVTNVSTQCNEEMRSALEGAIREYRFMQPDLRPRIPRLPMHNKNRALVAVLDSQLSNYFDNCEDLTDAHSILYCAAVAACRVAHVKFSDDRATRPKPAVPPWQYRIERRIGGARALIGKLICFREGNTRPRVMRFVRRAFSGTDISPRDYMSRITERIDFLKQKVYAWANRIRRYKRRVDRYTQNRTFQRDERWVYRAWERPDQGVADTRLPDDDAMCSFWRSIWSVPVSHTEGEWTQGVERACDLVPEMGAITISPQDVVRAVRPLPNWKSPGPDGLHNFWIKWFTRSHARLAILFQSALESGSLPEFLTTGITHLLHKSGSTAEPKNYRPITCLPTVYKVLTSILRAKINKHIDDNSIMSASQNGCRNGSRGTKELLLIDMAISQQVRRSRSDLSTCWIDYKKAYDSVPHTWLMRVLELYKVDATLRTFLMSCMGQWRTVLRYPGCRQIQRNSEPIRIERGIFQGDSLSPLWFCLALNPLSTLLEDSGLGYRLRRGGQVISHLLYMDDLKLFAPNDLQLMELLKVTETFSSAIRMEFGVDKCAVMHVKRGEIVESVGTQLSDSINLRSLSATETYKYLGMSEALGINVADMKQSLKERFFGRLKKVFNSLLSGGNKVRAFNGWVMPVLMYSFGILKWTQTELDALDRRVRTLLTAYRMHHPRSSVMRLYIPRKCGGRGFLNAKTLHNREICSLREYFLETDVGMHRDVVAVDKGLTPLSLAKENWRKPVVFDTNYRMEVWQSKELHGRFFRALHGPDVDLSASVAWLRSGDLFGETEGFVCAIMDEVMMTNNYRRFIVKDGTVDICRACHRPGESIRHIISGCSRLANGEYLHRHNLVARIIHQQLALKYNLVELEVPYYKYVPDPVLENGSITLYWDQSIITDRTIVANKPDIVVVDRSERRTMIIDITVPHDENLVKAEKDKKIKYLDLAREVVDMWDVDSAIIVPIVVSAHGLIAKSLDQYLRRLSLGSWIKGLIQKAVLLDTARIVRRFLSLEP

SEQ ID NO: 13646 - protein, 1167 aa, Noctua fimbriata
MSAVTPAVAVASSSSDEYFSPPTTPPPVRRRGGRRPPDGLGPRGPPASDRVPAPGGSVQRMRWTQSINENVMRSYYGATEGGNNLTAYRVRMLSLFQVLEPAVNVSAQRLSDQVRVIQRNRMLDDTVLDRLRTEMQSSHVIATPPPQAVVPPQSTIIPNRDNDVSNDIVTNVSTQCNEEMRSALEGAIREYRFMQPDLRPRIPRLPMHNKNRALVAVLDSQLSNYFDNCEDLTDAHSILYCAAVAACRVAHVKFSNDRATRPKPAVPPWQYRIERRIGGARALIGKLICFREGNTRPRVMRFVRRAFSGTDISPRDYMSRITERIDFLKQKVYAWANRIRRYKRRVDRYTQNRTFQRDERWVYRAWERSDQGVADTRLPDDDAMCSFWRSIWSVPVSHTEGEWTQGVERACDLVPEMGAITISPQDVVRAVRPLPNWKSPGPDGLHNFWIKWFTRSHARLAILFQSALESGSLPEFLTTGITHLLHKSGSTAEPKNYRPITCLPTVYKVLTSILRAKINKHIDDNSIMSASQNGCRNGSRGTKELLLIDMAISQQVRRSRRDLSTCWIDYKKAYDSVPHTWLMRVLELYKVDATLRTFLMSCMGQWRTVLRYPGCRQIQRNSEPIRIERGIFQGDSLSPLWFCLALNPLSTLLEDSGLGYRLRRGGQVISHLLYMDDLKLFAPNDLQLMELLKVTETFSSAIRMEFGVDKCAVMHVKRGEIVESVGTQLSDSINLRSLSATETYKYLGMSEALGINVADMKQSLKERFFGRLKKVFNSLLSGGNKVRAFNGWVMPVLMYSFGILKWTQTELDALDRRVRTLLTAYRMHHPRSSIMRLYIPRKCGGRGFLNAKTLHNREICSLREYFLETDVGMHRDVVAVDKGLTPLSLAKENWRKPLVLDTNDRMEVWQSKELHGRFFRALHGPDVDLSASVAWLRSGDLFGETEGFVCAIMDEVMMTNNYRRFIVKDGTVDICRACHRPGESIRHIISGCSRLANGEYLHRHNLVARIIHQQLALKYNLVESEVPYYKYVPDPVLENGSITLYWDQSIITDRTIVANKPDIVVVDRSERRTMIVDITVPHDENLVKAEKDKKIKYLDLAREVVDMWDVDSAIIVPIVVSAHGLIAKSLDQYLRRLSLGSWIKGLIQKAVLLDTARIVRRFLSLEP

SEQ ID NO: 13647 - protein, 1106 aa, Noctua fimbriata
MRWTQSINENVMRSYYGATEGGNNLTAYRVRMLSLFQVLEPAVNVSAQRLSDQVRVIQRNRMLDDTVLDRLRTETQSSHVITPSAQAVVLPQSSTIPNRDNDVSNDMVTNVSTQCNEEMRSALEGAIREYRFMQPDLRPRIPRLPMHNKNRALVAVLDSQLSNYFDNCEDLTDAHSILYCAAVAACRIAHVKFSDDRATRPKPAVPPWQYRIERRIGGARALIGKLICFREGNTRPRVMRFVRRAFSGTDISPRDYMSRITERIDFLKQKVYAWASRIRRYKRRVDRYTQNRTFQRDERWVYRTWERPDQGVADARIPDDDAMCSFWRSIWSVPVSHTEGEWTREVERACDLVPEMGAITISPQDVVRAVRPLPNWKSPGPDGLHNFWIKWFTRSHARLAILFQSALESGSLPEFLTTGITHLLHKSGSTAEPKNYRPITCLPTVYKVLTSILRAEINKHIDDNSIMSASQNGCRNGSRGTKELLLIDMAISQQVRRSRRDLSTCWIDYKKAYDSVPHTWLMRVLELYKVDATLRTFLMSCMGQWRTVLRYPRCWQIQRNSEPIRIERGIFQGDSLSPLWFCLALNPLSTLLEDSGLGYQLRRGGQVISHLLYMDDLKLFAPNDLQLMELLKVTETFSSAIRMEFGVDKCAVMHVKRGEIVESVGTQLSDSINLRSLSATETYKYLGMSEALGINVADMKQSLKERFFGRLKKVFNSLLSGGNKVHAFNGWVMPVLMYSFGILKWTQTELDALDRRVRTLLTAYRMHHPRSSVMRLYIPRKCGGRGFLNAKTLHNREICSLREYFLETDVGMHRDVVAMDKGLTPLSLAKENWRKPLVLDTNDRMEVWQSKELHGRFFRALHGPDVDLSASVAWLRSGDLFGETEGFICAIMDEVMMTNNYRRFIVKDGTVDICRACHRPGESIRHIISGCSRLANGEYLHRHNLVARIIHQQLALKYNLVESEVPYYKYVPDPVLENGSITLYWDQSIITDRTIVANKPDIVVVDRSERRTMIVDITVPHDENLVKAEKDKKIKYLDLAREVVDMWDVDSAIIVPIVVSAHGLIAKSLDQYLRRLSLGSWIKGLIQKAVLLDTARIVRRFLSLEP

SEQ ID NO: 13648 - protein, 1198 aa, Noctua fimbriata
MLTRAAAKRARLSPPDPSLSSASPPPESSPVMSAVTPAVAVASSSSDEYFSPPTTPPPVRRRGGRRPPDGLGPRGPPASDRVPAPGGSVQRMRWTQSINENVMRSYYGATEGGNNLTAYRVRMLSLFQVLEPAVNVSAQRLSDQVRVIQRNRMLDDTVLDRLRTEMQSSHVIATPPPQAVVSPQSTIIPNRDNDVSNDIVTNVSTQCNEEMRSALEGAIREYRFMQPDLRPRIPRLPMHNKNRALVAVLDSQLSNYFDNCEDLTDAHSILYCAAVAACRVAHVKFSNDRATRPKPAVPPWQYRIERRIGGARALIGKLICFREGNTRPRVMRFVRRAFSGTDISPRDYMSRITERIDFLKQKVYAWANRIRRYKRRVDRYTQNRTFQRDERWVYRAWERPDQGVADTRLPDDDAMCSFWRSIWSVPVSHTEGEWTQGVERACDLVPELGAITISPQDVVRAVRPLPNWKSPGPDGLHNFWIKWFTRSHARLAILFQSALESGSLPEFLTTGITHLLHKSGSTAEPKNYRPITCLPTVYEVLTSILRAKINKHIDDNSIMSASQNGCRNGSRGTKELLLIDMAISQQVRRSRRDLSTCWIDYKKAYDSVPHTWLMRVLELYKVDATLRTFLMSCMGQWRTVLRYPGCRQIQRNSEPIRIERGIFQGDSLSPLWFCLALNPLSTLLEDSGLGYRLRRGGQVISHLLYMDDLKLFAPNDLQLMELLKVTETFSSAIRMEFGVDKCAVMHVKRGEIVESVGTQLSDSINLRSLSATETYKYLGMSEALGINVADMKQSLKERFFGRLKKVFNSLLSGGNKVRAFNGWVMPVLMYSFGILKWTQTELDALDRRVRTLLTAYRMHHPRSSIMRLYIPRKCGGRGFLNAKTLHNREICSLREYFLETDVGMHRDVVAVDKGLTPLSLAKENWRKPLVLDTNDRMEVWQSKELHGRFFRALHGPDVDLSASVAWLRSGDLFGETEGFVCAIMDEVMMTNNYRRFIVKDGTVDICRACHRPGESIRHIISGCSRLANGEYLHRHNLVARIIHQQLALKYNLVESEVPYYKYVPDPVLENGSITLYWDQSIITDRTIVANKPDIVVVDRSERRTMIVDITVPHDENLVKAEKDKKIKYLDLAREVVDMWDVDSAIIVPIVVSAHGLIAKSLDQYLRRLSLGSWIKGLIQKAVLLDTARIVRRFLSLEP

SEQ ID NO: 13649 - protein, 947 aa, Atethmia centrago
MTDNNDDCEDLTDTHSILYCAAVAVCRVAHVIFPNDSRATRPKPTVPIWQCRIERRIGGARALIGKLICFREGNTRPRVMRFVRRAFSGTDISPQDYMSRVTERIDFLKQKVYAWANRIRRYKRRVDRYTQNRTFQSDERWVYRGWEQRDQGVTDTRLPDDDVMCSFWRSIWSVPVSHTEGDWARKVERACDPLPEMGAITICPQDVARAIRPLPNWKSPGPDGLHNFWLKWFLGSHARLAAQYQTALESGSLPQFLTIGVTHLLHKSGSTAEPKNYRPITCLPTVYKVLTSILRAKINKHIDTNSIMSASQNGCRNGSRGTKELLLIDMTISQQVRRFRKDLSTCWIDYKKAYDSVPHTWLMRVLELYKVDATLRTFLMSCMGQWRTVLRYPGCRNIQRNSEPIRIERGIFQGDSLSPLWFCLALNPLSTLLEDSGLGYRLRRGGQVISHLLYMDDLKLFASNNLQLMELLKITETFSSAIRMEFGVDKCAVMHVKRGEIVESVGTLLSDSINLRTLSASETYKYLGMSEALGINVTDMKQSLKQRFFDRLKKVFNSLLSGGNKVRAFNGWVMPVLMYSFGILKWTQTELDALDRRVRTLLTAYRMHHPRSSVMRLYIPRKCGGRGFLNAKTLHNREVCSLREYFLEADVGMHRDVVAVDKGLTPLSLAKENWRKLVVLDTNDRREVWQSKELHGRFFRALHEPDVDFQASVAWLRFGDLFGETEGFVCAIMDEVIMTKNYRRFIVKDGTVDMCRACHRPGESIRHIISGCSRLANEEYLHRHNLVARIIHQQLALKYSLVESEVPYYRHVPDPVLDNGNITLYWDRSIITDRTIVANKPDIVVVDRTERRAMIVDITVPHDGNLVKAEKDKQIKYLDLAREVVDMWDVDSAIIVPIVVSANGLIAKSLDQHLRRLTLDGWIKGLIQKAVLLDTARIVRRFLSLEP

SEQ ID NO: 13650 - protein, 868 aa, Atethmia centrago
MRFVRRAFSGTDIGPHDYMTRVTERIDFLKQKVYAWANRIRRYKRRVERYTQNRTFQSDERWVYRGWERPDQDVTDTRLPDDDVMCSFWRSIWSVPVSHTEGDWARKVERACDPIPEMGAITICPQDVARAVRPLPNWKSPGPDGLHNFWLKWFLRSHARLAAQYQTALESGSLPQFLTTGVTHLLHKSGSTAEPKNYRPITCLPTVYKLLTSILRAKINKHIDTNSIMSASQNGCRNGSRGTKELLLIDMTISQQVRRSRKDLSTCWIDYKKAYDSVPHTWLMRVLELYKVDATLRTFLISCMGQWRTVLRYPGCRNIQRNSEPIRIERGIFQGDSLSPLWFCLALNPLSTLLEDSGLGYRMRRGGQVISHLLYMDDLKLFASNNLQLMELLKITESFSSAIRMEFGVDKCAVMHVKRGNIVESVGTQLSDSINLRTLSASETYKYLGMSEALGINVTDMKQSLKERFFGRLKKVFNSLLSGGNKVRAFNGWVMPVLMYSFGILKWTQTELDALDRRVRTLLTAYRMHHPRSSVMRLYIPRKCGGRGFLNAKILHNREVCSLKEYFLEADVGMHRDVVAVDKGLTPLSLAKENWRKLVVLDTNDRREVWQSKELHGRFFRALHEPDVDFQASVAWLRFGDLFGETEGFVCAIMDEVIMTKNYRRFIVKDGTVDVCRACHRPGESIRHIISGCSRLANEEYLHRHNLVARIIHQQLALKYSLVESEVPYYRYVPDPVLDNGNITLYWDRSIITDRTIVANKPDIVVVDRTERRAMIVDITVPHDGNLVKAEKDKQIKYLDLAREVVDMWDVDSAIIVPIVVSANGLIAKSLDQHLKRLTLDGWIKGLIQKAVLLDTARIVRRFLSLEP

SEQ ID NO: 13651 - protein, 1198 aa, Atethmia centrago
MLTRSAAVRARLPPPDSSLSSTSPPPVPSPTVCAVTTPTAAVASSSSDEYFSPPTTPPPVRRRGGRRPPDGLGSRGPPASDRVPAPGGSVKRMRWTQSVNENVMRSYYGATEGGNNLTAYRVRMLSLFQVLEPAVNVSAQRLSDQVRVIQRNHMLDDTVLDRLRSEMQRSHVIVPPSQTVVHSPQLSTNQADEGSDDRATNVSTQCNVELRSALEDAIREYRLMSPELRPRLPRLPMHKKNRALVAALDSQLSNYFDDCEDLTDTHSILYCAAVAVCRVAHVKFAKDSRTTRPKPTVPAWQCRIESRIGGARALIGKLICFREGNTRPRVMRFVRRAFSGTDIGPHDYMTRVTERIDFLKQKVYAWANRIRRYKRRVERYTQNRTFQSDERWVYRGWERPDQDVTDTRLPDDDVMCSFWRSIWSVPVSHTEGDWARKVERACDPIPEMGAITICPQDVARAVRPLPNWKSPGPDGLHNFWLKWFLRSHARLAAQYQTALESGSLPQFLTTGVTHLLHKSGSTAEPKNYRPITCLPTVYKLLTSILRAKINKHIDTNSIMSASQNGCRNGSRGTKELLLIDMTISQQVRRSRKDLSTCWIDYKKAYDSVPHTWLMRVLELYKVDATLRTFLISCMGQWRTVLRYPGCRNIQRNSEPIRIERGIFQGDSLSPLWFCLALNPLSTLLEDSGLGYRMRRGGQVISHLLYMDDLKLFASNNLQLMELLKITESFSSAIRMEFGVDKCAVMHVKRGNIVESVGTQLSDSINLRTLSASETYKYLGMSEALGINVTDMKQSLKERFFGRLKKVFNSLLSGGNKVRAFNGWVMPVLMYSFGILKWTQTELDALDRRVRTLLTAYRMHHPRSSVMRLYIPRKCGGRGFLNAKILHNREVCSLREYFLEADVGMHRDVVAVDKGLTPLSLAKENWRKLVVLDTNDRREVWQSKELHGRFFRALHEPDVDFQASVAWLRFGDLFGETEGFVCAIMDEVIMTKNYRRFIVKDGTVDVCRACHRPGESIRHIISGCSRLANEEYLHRHNLVARIIHQQLALKYSLVESEVPYYRYVPDPVLDNGNITLYWDRSIITDRTIVANKPDIVVVDRTERRAMIVDITVPHDGNLVKAEKDKQIKYLDLAREVVDMWDVDSAIIVPIVVSANGLIAKSLDQHLKRLTLDGWIKGLIQKAVLLDTARIVRRFLSLEP

SEQ ID NO: 13652 - protein, 1194 aa, Atethmia centrago
MLTRSAARARLPPPDFSLSSASPPPVPNPTVTSPAAVVASSSSDEYFSPPTTPPPVRRRGGHRPPDGLGSRGPPASDRVPAPGGSVQRMRWTRSINENVMRSYYGATEGGNNLTAYRVRMLSLFQVLEPAVNVSAQRLSDQVRVIQRNHMLDDTVLDRLRSETQSGHAIAPPSQTVVVSTQLRTNQADEGSDDRATNVSTQYNVELRSALEDAIREYRFMSPELRPRLPRLPMHKKNRALVAALDSQLSNYFDDCEDLTDTHSILYCAAVAVCRVAHVKFAKDSRATRPKPTVPAWQRRIERRIGGARALIGKLICFREGNTRPRVMRFVRRAFSGTDIGPQDYMSRVTERIDFLKQKVYAWANRIRRYKRRVERYTQNRTFQSDERWVYRGWERPDQGVTGTRLPDDDVMCSFWRSIWSVPVSHTEGDWVREVERACDPIPEMGAITISPQDVARAVRPLPNWKSPGPDGLHNFWLKWFLRSHARLAAQYQTALESGSLPQFLTTGVTHLLHKSGSTAEPKNYRPITCLPTVYKVLTSILRAKINEHIDTNSIMSASQNGCRNGSRGTKELFLIDITITQQVRHSRKDLSTCWIDYKKAYDSVPHTWLMRVLELYKVDATLRTFLMSCMGQWRTVLRYPGCRNIQRNSEPIRIERGIFQGDSLSPLWFCLALNPLSTLLEDSGLGYRLRRGSQAISHLLYIDDLKLFASNNLQLMELLKITETFSSAIRMEFGVDKCAVMHVKRGKIMESVGTQLSDSINLRALSASETYKYLGMSEALGINVTDMKQSLKERFFGRLKKVFNSLLSGGNKVRAFNGWVMPVLMYSFGILKWTQTELDALDRRVRTLLTAYRMHHPRSSVMRLYIPRKCGGRGFLNAKTLHNREVCSLREYFLKADVGMHRDVVAVDKGLTPLSLAKENWRKLVVLDTNDRREVWQSKELHGRFFRALHEPDVDFQASVAWLRFGDLFGETEGFVCAIMDEVIMTKNYRRFIVKDGTVDVCRACQRPGESIRHIISGCSRLANEEYLHRHNLVARIIHQQLALKYNLVESEVPYYRYVPDPVLENGNITLYWDRSIITDRTIIANKPDIVVVDRTERRAMIVDITVPHDGNLVKAEKDKQIKYLDLAREVVDMWDVNSAIIVPIVISANGLIAKSLDQHLRRLSLDSWIKGLIQRAVLLDTARIVRRFLSLEP

SEQ ID NO: 13653 - protein, 1042 aa, Atethmia centrago
MYAEIVLIIVLSTYNYLLTDIIIIIIIRQLDTHQADEGSDDRATNVSTQCNVELRSALEDAIREYRFMSPEVRPRLPRLPMHKKNRALVAVLDSQLSNYFDDCEDLTDTHSILYCAAVAVCRVAHVIFPNDSRATRPKPTVPIWQCRIERRIGGARALIGKLICFREGNTRPRVMRFVRRTFSGTDISPQDYMSRVTERIDFLKQKVYAWANRIRRYKRRVDRYTQNRTFQSDERWVYRGWEQRGQGVTDTRLPDDDVMCSFWRSIWSVPVSHTEGDWARKVERACDPLPEMGAITICPQDVARAVRPLPNWKSPGPDGLHNFWLKWFLGSHARLAAQYQTALESGSLPQFLTMGVTHLLHKSGSTAEPKNYRPITCLPTVYKVLTSILRAKINKHIDTNSIMSASQNGCRNGSRGTKELLLIDMTISQQVRRFRKDLSTCWIDYKKAYDSVPHTWLMRVLELYKVDATLRTFLMSCMGQWRTVLRYPGCRNIQRNSEPIRIERGIFQGDSLSPLWFCLALNPLSTLLEDSGLGYRLRRGGQVISHLLYMDDLKLFDSNNLQLMELLKITETFSSAIRMEFGVDKCAVMHVKRGETVESVGTQLSDSINLRALSASETYKYLGMSEALGINVTDMKQSLKQRFFDRLKKVFNSLLSGGNKVRAFNGWVMPVLMYSFGILKWTQTELDALDRRVRTLLTAYRMHHPRSSVMRLYIPRKCGGRGFLNAKTLHNREVCSLREYFLEADVGMHRDVVAVDKGLTPLSLAKENWRKLVVLDTNDRREVWQSKELHGRFFRALHEPDVDFQASVAWLRFGDLFGETEGFVCAIMDEVIMTKNYRRFIVKDGTVDMCRACHRPGESIRHIISGCSRLANEEYLHRHNLVARIIHQQLALKYSLVESEVPYYRYVPDPVLDNGNITLYWDRSIITDRTIVANKPDIVVVDRTERRAMIVDITVPHDGNLVKAEKDKQIKYLDLAREVVDMWDVDSAIIVPIVVSANGLIAKSLDQHLRRLMLDGWIKGLIQKAVLLDTARIVRRFLSLEP

SEQ ID NO: 13654 - protein, 1175 aa, Atethmia centrago
MLTRSAAVRARLPPPDSSLSSASPPPVPSPTVCAVTTPTTAVASSSSDEYFSPPTTPPPVRRRGGRRPPDGLGSRGPPASDRVPAPGGSVKRMRWTQSVNENVMRSYYGATEGGNNLTAYRVRMLSLFQVLEPAVNVSAQRLSDQVRVIQRNLMLDDTVLDRLRSEMQRSHVIVPPSQTVVHSPQLSTNQADEGSDDRATNVSTQCNVELRSALEDAIREYRLMSPELRPRLPRLPMHKKNRALVAALDSQLSNYFDDCEDLTDTHSILYCAAVAVCRVAHVKFAKDSRTTRPKPTVPAWQCRIESRIGGARALIGKLICFREGNTRPRVMRFVRRAFSGTDIGPQDYMTRVTERIDFLKQKVYAWANRIRRYKRRVERYTQNRTFQSDERWVYRGWERPDQDVTDTRLPDDDVMCSFWRSIWSVPVSHTEGDWARKVERACDPIPEMGAITICPQDVARAVRPLPNWKSPGPDGLHNFWLKWFLRSHARLAAQYQTALESGSLPQFLTTGVTHLLHKSGSTAEPKNYRPITCLPTVYKLLTSILRAKINKHIDTNSIMSASQNGCRNGSRGTKELLLIDMTISQQVRRSRKDLSTCWIDYKKAYDSVPHTWLMRVLELYKVDATLRTFLISCMGQWRTVLRYPGCRNIQRNSEPIRIERGIFQGDSLSPLWFCLALNPLSTLLEDSGLGYRMRRGGQVISHLLYMDDLKLFASNNLQLMELLKITESFSSAIRMEFGVDKCAVMHVKRGKIVESVGTQLSDSINLRTLSASETYKYLGMSEALGINVTDMKQSLKERFFGRLKKIFNSLLSGGNKVRAFNGWVMPVLMYSFGILKWTQTELDALDRRVRTLLTAYRMHHPRSSVMRLYIPRKCGGRGFLNAKTLHNREVCSLREYFLEADVGMHRDVVAVDKGLTPLSLAKENWRKLVVLDTNDRREVWQSKELHGRFFRALHEPDVDFQASVAWLRFGDLFGETEGFVCAIMDEVIMTKNYRRFIVKDGTVDVCRACHRPGESIRHIISGCSRLANEEYLHRHNLVARIIHQQLALKYSLVESEVPYYRYVPDPVLDNGNITLYWDRSIITDRTIVANKPDIVVVDRTERRAMIDDITVPHDGNLVKAEKDKQIKYLDLAREVVDMWDVDSAIIVPIVVSANGLIAKSLDQHLKRLTLDGWAA

SEQ ID NO: 13655 - protein, 1045 aa, Mesoligia furuncula
MLDDTVLDRLRNEMQSSHVIAPQPQTAVLLAQCNTNHADEGSNDRATNVSTQCNEELRSALEDAIREYRFMSPEHRPRLPRLPMHNKNRALVAALDSQLSNYFDDCEDLTDTHSILYCAAVAVCRVAHVKFANDSRATRPKPAIPAWQCRIERRIGGARALIGKLICFREGNTRPRVMRFVRRAFLGTDISPQDYMSCVTERIDFLKQKVYAWANRIRRYKRRVERYTQNRTFQSDERWVYRSWERPDQSVADTCLPDDEAMCSFWRNIWSVPVSHTEGDWAREVERACDPIPEMGAITICPQDVARAVRPLPNWKSPGPDGLHNFWIKWFLRSHARLASQFQTVLESGSLPQFLTTGITHLLHKSGSTTEPKNYRPITCLPTVYKVLTSILRAKIDKHINTNSIMSVSQNGCKNGSRGTKELLLIDMAISQQVRRSRKDLSTCWIDYKKAYDSVSHTWLMRVLELYKIDATLRTFLMSCMGQWRTVLRYPGCRNIQRNSEPIRIERGIFQGDSLSPLLFCLALNPLSTLLEDSGLGYRLRRGGQVISHLLYMDDLKLFAPNNLQLMELLKVTQTFSSAIRMEFGVDKCAVMHVKRGEIVESVGTQLSDSTNLRALSASETYKYLGMSEALGINVTDMKQSLKERFFDRLNKVLNSLLSGGNKVRAFNGWVMPVLMYSFGILKWTQTELDALNRRVRTLLTANRMHHPRSSVMRLYIPRKCGGRGFLNAKTLHNREICSLREYFLETDVGMHRDVVAVDKGLTPLSLAKENWRKPVVLDTNDRMEVWQSKELHGRFLRALHGPDVDLLASVAWLRFGDLFGETEGFVCAIMDEVMMTNNYRRFIVKDGTVDICRACHRPGESIRHIISGCSRLANGEYLHRHNLVARIIHQQLALKYSLMESEVPYYRYVPDPVLENGNISLYWDRSIITDRTIVANKPDIVVVDRSERRAMIVDITVPHDENLVKAEKDKQIKYLDLAREVVDMWDVDSAIIVPIVVTANGLIAKSLDQHLRRLSLGSWIKGLIQKAVLLDTARIVRRFLSLEP

SEQ ID NO: 13656 - protein, 1206 aa, Mesoligia furuncula
MLTRSRARYLLENTHPTSSGSPLSSASQLPDPAPDVSSVRPAAAVASSSSDEYFSPPTTPPPVCRRGRGRPPASLGLRGPPASDRVPAPGGSVQRMRWTQTVNENVMRAYFGATEGGSNLTAYRGRMLSLFQVLEPAVNVSAQRLSDQVRVIQRNHMLDNVVLDRLRLESRNSHVTPASSSVAVHLQNVPSVSPRPDHVHVEDDDEAIFVSSQCNARLRSALEDAFREYRSIPPGLRPRLPRLPMHKKNKALVCALDSQLSNCFNNSKDLTDTHSILYCAAVAACRVAHVKFPNSDRAPRPKPAVPAWQCRIECRIGEARALIGKLICFREGNTRPRVMRFVRRAFSGTDISSRDYLSRVTERIDFLKQKIYAWANRIRRYRRRVERYTQNRTFQSDERWVYRAWERPDHGVTDTRLPDDGAMCSFWRNIWSVPVSHTEGDWTAKIERACDLIPEMGVLTISPQDVARAVRPLPNWKSPGPDGLHNFWIKWFQGSHARLASQFQSALESGSLPQFLTTGITHLLHKSGSTADPKNYRPITCLPTVYKVLTSILKAKINKHIDTNSIMSVSQNGCKNGSRGTKELLLIDMTISQQVRRFRKDLSTCWIDYKKAYDSVPHTWLMRVLELYKVDTTLRTFLMSCMRQWRTVLRYPGCRNIQRNSEPIRIERGIFQGDSLSPLWFCLALNPLSTLLEDSGLGYRMRRGGQAISHLLYMDDLKLFAPNNLQLMELLKITETFSSAIRMEFGVDKCAVMHVKRGVIVESVGIQLSDSTNLRALSASETYKYLGMSEALAINVTDMKQSLKERFFGRLKKVFNSLLSGGNKVRAFNGWVMPVLMYSFGILKWTQTDIDALDRKVRTLLTANRMHHPRSSVMRLYIPRKCGGRGFLNVKTLHNREICSLREYFLETDVGMHRDVVAVDKGLTPLSLGKENWRKPVVLDTNDRMEVWQSKELHGRFFRALHGPDVDLIASVAWLRFGDLFGETEGFVCAIMDEVMMTNNYRRFIVKDGTVDICRACHRPGESIRHIISGCSRLANGEYLHRHNLVARIIHQQLALKYSLVESEVPYYRYVPDPVLENGNITLYWDRAIITDRTIVANKPDIVVVDRSERRAMIVDITVPHDENLVKAEKDKQVKYLDLAREVVDMWDVDSAIIVPIVVTANGLIAKSLDQHLKRLSLGSWIKGLIQKAVLLDTARIVRRFLSLEP

SEQ ID NO: 13657 - protein, 974 aa, Mesoligia furuncula
MLSVSTALFRLDLDHVYLVCPCALDSQLANYFNDSKDLTDTHSILYCAAVAACRVAHVKFPNSDRAPRPKPAVPAWQCRIECRIGEARALIGKLICFREGNTRPRVMRFVRRAFSGTDISSRDNLSRVTERIDFLKQKICAWANRIRRYRRRVERYTQNRTFQSDERWVYRTWERPDHGVTDTRLPDDDAMCSFWRNIWSVPVSHTEGDSTRKIERTCDLLPEMGVLTISPQDVARAVRPLPNWKSPGPDGLHNFWIKWFQGSHARLASQFQSALESGSLPKFLTTGITHLLHKSGSTADPKNYRPITCLPTVYKVLTSILRAKINKHIDTNSIMSVSQNGCGNGSRGTKELLLIDMTISQQVRRFRKDLSTCWIDYKKAYDSVPHTWLMRVLELYKVDTTLRTFLISCMGQWRTVLRYPGCRNIQRNSEPIRIERGIFQGDSLSPLWFCLALNPLSTLLEDSGLGYRLRRGGQVISHLLYMDDLKLFAPNNLQLMELLKITETFSSAIRMEFGVDKCAVMHVKRGEIVESVGTQLSDSTNLRALSASETYKYLGMSEALGINVTDMKQSLKERFFGRLKKVFNSLLSGGNKVRAFNGWVMPVLMYSFGILKWTQTELDALDRKVRTLLTANRMHHPRSSVMRLYIPRKCGGRGFLNAKTLHNREICSLREYFLETDVGMHRDVVAVDKGLTPLSLGKENWRKPVVLDTNDRMEVWQSKELHGRFFRALHGPDVDLIASVAWLRFGDLFGETEGFVCAIMDEVMMTNNYRRFIVKDGTVDICRACHRPGESIRHIISGCSRLANGEYLHRHNLVARIIHQQLALKYSLVESEVPYYRYVPDPVLENGNITLYWDRSIITDRTIVANKPDIVVVDRSERRAMIVDITVPHDENLVKAEKDKQVKYLDLAREVVDMWDVDSAIIVPIVVTANGLIAKSLDQHLKRLSLGSWIKGLIQKAVLLDTARIVRRFLSLEP

SEQ ID NO: 13658 - protein, 1208 aa, Mesoligia furuncula
MLTRSALRKARLPPPDSSLSSASPPPVPSLTVSAVTTPAVAVASSSSDEYFSPPTTPPPARRRGGRRPPDGLGPRGPPASDRVPAPGGSVQRMRWTRSINENVMRSYYGATEAGNNLTAYRVRMLSLFQVLEPAVNVSAQRLSDQVRVIQRNHMLDDTVLDRLRNEMQSSHVIAPQPQTAVLLPQCNTNHADEGSNDRATNVSTQCNEELRSTLEDAIREYRFMSPEHRPCLPRLPMHNKNRALVAALDSQLSNYFDDCEDLTDTHSILYCAAVAVCRVAHVKFANDSWYGWFRSCSSRATRPKPAIPAWQCRIERRIGGARALIGKLICFREGNTRPRVMRFVRRAFLGTDISPQDYMSCVTERIDFLKQKVYAWANRIRRYKRRVERYTQNRTFQSDERWVYRSWERPDQSVADTYLPDDEAMCSFWRSIWSVPVSHTEGDWAREVERACDPIPEMGAITICPQDVARAVRPLPNWKSPGPDGLHNFWIKWFLRSHARLASQFQTALESGSLPQFLTTGITHLLHKSGSTTEPKNYRPITCLPTVYKVLTSILRAKIDKHINTNSIMSVSQNGCKNGSRGTKELLLIDMAISQQVRRSRKDLSTCWIDYKKAYDSVPHTWLMRVLELYKIDATLRTFLMSCMGQWRTVLRYPGCRNIQRNSEPIRIERGIFQGDSLSPLWFCLALNPLSTLLEDSGLGYRLRRGGQVISHLLYMDDLKLFAPNNLQLMELLKVTQTFSSAIRMEFGVNKCAVMHVKRGEIVESVGTQLSDSTNLRALSASETYKYLGMSEALGINVTDMKQSLKERFFGRLKKVLNSLLSGGNKVRAFNGWVMPVLMYSFGILKWTQTELDSLDRRVRTLLTANRMHHPRSSVMRLYIPRKCGGRGFLNAKTLHNREICSLREYFLETDVGMHRDVVAVDKGLTPLSLAKENWRKPVVLDTNDRMEVWQSKELHGRFFRALHGPDVDLLASVAWLRFGDLFGETEGFVCAIMDEVMMTNNYRRFIVKDGTVDICRACHRPGESIRHIISGCSRLANGEYLHRHNLVARIIHQQLALKYSLVESEVPYYRYVPDPVLENGNISLYWDRSIITDRTIVANKPDIVVVDRSGRRAMIVDITVPHDENLVKAEKYKQIKYLDLAREVVDMWDVDSAIIVPIVVTANGLIAKSLDQHLRRLSLGSWTKGLIQKAVLLDTARIVRRFLSLEP

SEQ ID NO: 13659 - protein, 1075 aa, Mesoligia furuncula
MLSLFQVLEPAVNVSAQRLSDQVRVIQRNHMLDDTVLDRLRNEMQSSHVIAPQPQTAVLLPQCNTNHADEGSNDRATNVSTQCNEELRSALEDAIREYRFMSPEHRPRLPRLPMHNKNRALVAALDSQLSNYFDDCEDLTDAHSILYCAAVAVCRVAHVKFANDSRATRPKPAIPAWQCRIERRIGGARALIGKLICFREGNTRPRVMRFVRRAFLGTDISPQDYMSCVTERIDFLKQKVYAWANRIRRYKRRVERYTQNRTFQSDERWVYRSWERPDQSVADTCLPDDEAMCSFWRNIWSVPVSHTEGDWAREVERACDPIPEMGAITICPQDVARAVRPLPNWKSPGPDGLHNFWIKWFLRSHARLASQFQTALESGSLPQFLTTGITHLLHKSGSTTEPKNYRPITCLPTVYKVLTSILRAKIDKHINTNSIMSVSQNGCKNGSRGTKELLLIDMAISQQVRRSRKDLSTCWIDYKKAYDSVPHTWLMRVLELYKIDATLRTFLMSCMGQWRTVLRYPGCRNIQRNSEPIRIERGIFQGDSLSPLWFCLALNPLSTLLEDSGLGYRLRRGGQVISHLLYMDDLKLFAPNNLQLMELLKVTQTFSSAIRMEFGVDKCAVMHVKRGEIVESVGTQLSDTTNLRALSASETYKYLGMSEALGINVTDMKESLKERFFGRLKKVLNSLLSGGNKVRAFNGWVMPVLMYSFGILKWTQTELDALDRRVRTLLTANRMHHPRSSVMRLYIPRKCGGRGFLNAKTLHNREICSLREYFLETDVGMHRDVVAVDKGLTPLSLAKENWRKPVVLDTNDRMEVWQSKELHGRFFRALHGPDVDLLASVAWLRFGDLFGETEGFVCAIMDEVMMTNNYRRFIVKDGTVDICRACHRPGESIRHIISGCSRLANGEYLHRHNLVARIIHQQLALKYSLVESEVPYYRYVPDPVLENGNISLYWDRSIITDRTIVANKPDIVVVDRSERRAMIVDITVPHDENLVKAEKDKQIKYLDLAREVVDMWDVDSAIIVPIVVTANGLIAKSLDQHLRRLSLGSWIKGLIQKAVLLDTARIVRRFLSLEP

SEQ ID NO: 13660 - protein, 1197 aa, Spilarctia lutea
MLTRARRRALITSPDSSLRSALPSPEEAIEVPAGAEASSSSSSDEFFSPPTSPIPVRRQGRDRPPTSLGSRGPLTSNRAPATGGDVRRMKWTHSINENVMRAYFRATELGTNLTAYRVRLVSLFQELEPAVNVSAQRLSDQVRAIQRCHLLDDAVLERIRSDVRNTLTIPSSSHTVDVVVNTPQLPDNHDVDEQRESEIISVSTQCNDRIRSALEDAIQEYRYVNYNNRPRLPRLPIHKRNLALVGALNSLLPDYFGNSEDLSDTHSILYCAAIAVCRVVGVKFIERITTRTKNTVPAWQYRIERRIAETRTLIGKLISFKSGNTRPRVMRFVKQAFLGTTISPQQYMSSVTERIDFLKQKVCAWANRIRRYKKRGDRFNQNRMFQTNEKWVYRKWEAPNPCDRDGHLPDENATNTFWRNIWSVPVTHTDGDWMRDVKRSCESITNMEPVRINKEDVSCAVRSLPNWKAPGPDGLHNFWLKWFRSSHACLASQFQAALDSGSLPQFLTTGITHLLYKSGGTMDPKNFRPITCLPTLYKLLSSILRIKITTHINHNSILSISQNGCRSGTRGTKELLIIDMTISQQVRRNRRNLATCWIDYKKAYDSVPHTWLLKVLELYKIDKTLCTFLKSCMGQWRTVLRYPGCRQSPMTDVLIKIERGIFQGDSLSPLWFCLALNPLSTLLEGSELGYGLRKDDRVISHLLYMDDLKLLAPTKLQLTALLKITENFSNSIKMEFGVDKCAVMYVKKGLIVESEGVELSDSTKLRSLSVTEGYKYLGFTQSLGIPESDMKQALRERFFGRLKKVLKSLLSGGNKVRACNGWVMPVLMYSFGILRWTQTELDALDRGVRTLLTAFRMHHPRSSVMRLYIPRKLGGRGLLNIKTLHNREIYNLREYFLHTDVGMHRSVVAVDTGLTPLALAKENWRKPVVLSTDDRREVWKGKELHGRFYRALHGPDIDFKTSTSWLRYGDLFGETEGFVCAIMDEVIMTNNYRRYILKDGTVDICRACHRPGESIRHIISGCSRLANGEYLHRHNQVARIVHQQLALKYNLVISEVPYYRYVPDPVLENGRATLYWNRSIITDRTIVANKPDIVVIDRLERRAIIIDIAVPHDDNLVKVEKEKQIKYLDLSHEIVDMWNVDSVIIVPIVVSVHGLIARSLDQHLKRLTLDGWIKGLIQKAVLLDTARIVRRFLSLEP

SEQ ID NO: 13661 - protein, 1199 aa, Spilarctia lutea
MLTRARRRAQLSPPDSSLRSALPSPEEAIEVPAGAEASSSSSSDEFFSPPTSPIPVRRQGRGRPPTSLGSRGPLTSNRAPAAGGDVRRMKWTHSINENVMRAYFRATELGTNLTAYRVRLVSLFQELEPAVNVSAQRLSDQVRAIQRCHLLDDAALERIRSDIRNSLTVPSSSHVLNVVTNSTPQVPQNDDISELVDSEIISVSTQYNDRIRSTLEDAIREYRYVNLNNRPRLSRLPIHKRNLALVSALDSLLPKYFSNSEDLSDTHSILYCAAIAVCRVAGVKFAEYTTTTRQENTLPAWQYRIERRIAEARTLIGKLMSFRSGNTRPRVMRFVKRAFLGTTISPQEYMSCVTERIDFLKQKVYAWANRIRRYRKRVDRYNQNRMFQRNEKWVYQKWENLSPCMSDGQVPDENATNSFWRNMWSVPVTHTEGDWYRDVERSCESLLPMEPISIDEEDVSCAVRSLPNWKAPGPDGLHNFWLKWFRNSHACLASQFQTALDSGSLPQFLTTGITHLLYKSGDAMDPKNFRPITCLPTLYKLLTSILRLKITTHINHNSILSISQNGCRSGTRGTKELLIIDMTISQQVRRNRKSLATCWIDYKKAFDSVPHTWLLKVLELYKIDTTLCTFLKVCMGQWRTALRYPGCRQSAMNDVLIKIERGIFQGDSLSPLWFCLALNPLSTLLEGSGLGYRLQKDDRVISHLFYMDDLKLLAPTRLQLTALLKVTENFSNSIKMEFGVDKCAVMYVKKGEIVESEGIELSDSTKLRSLSATETYKYLGFSQYLGMPESDMKQTLRERFFSRLKKVLKSLLSGGNKVRACNGWVMPVLMYSFGVLRWTQTELDAIDRRVRTLLTAFRMHHPRSSVMRLYIPRRLGGRGLLNIKTLHNREVYNLREYFLQTDVGVHRSVVTVDTGLTPLALAKENWRKPVVLSTNDRREVWKGKELHGRFYRALHGPDIDFKTSTSWLRYGDLFGETEGFVCAIMDEVIMTNNYRRYILKDGTVDICRACHRPGESIRHIISGCSRLANGEYLHRHNQVARIVHQQLALKYHLVNSEVPYYRYVPDPVLENGRATLYWDRSIITDRTIVANKPDIVVIDRLERRAIIIDIAVPHDENLVKVEKEKQIKYLDLSHEIVDMWNVDSVIIVPIVVSAHGLIAKSLDQHLKRLTLEGWIKGLIQKAVLLDTARIVRRFLSLEP

SEQ ID NO: 13662 - protein, 1199 aa, Spilarctia lutea
MLTRARRRAQLSPPDSSLRSALPSPEEAIEVPAGAEASSSSSSDEFFSPPTSPIPVRRQGRGQPPTSLGSRGPLTSNRAPAAGGDVRRMKWTHSINENVMRAYFRATELGTNLTAYRIRLVSLFQELEPAVNVSAQRLSDQVRAIQRCQLLDDAALERIRSDIRNSLTVPSSSHVLNVVTNSTPQVPQNDDISELVDSEIISVSTQYNDRIRSTLEDAIREYRYVNLNNRPRLSRLPIHKRNLALVSALDSLLPKYFSNSEDLSDTHSILYCAAIAVCRVAGVKFAEYTTTTRQENTLPAWQYRIERRIAEARTLIGKLMSFRSGNTRPRVMRFVKRAFLGTTISPQEYMSCVTERIDFLKQKVYAWANRIRRYRKRVDRYNQNRMFQRNEKWVYRKWENLSPCISDGQVPDENATNSFWHNIWSVPVTHTEGDWYRDVERSCESLLPMEPISIDEEDVSCAVRSLPNWKAPGPDGLHNFWLKWFRSSHACLASQFQTALDSGSLPQFLTTGITHLLYKSGDAMDPKNFRPITCLPTLYKLLTSILRLKITTHINHNSILSISQNGCRSGTRGTKELLIIDMTISQQVRRNRKSLATCWIDYKKAFDSVPHTWLLKVLELYKIDTTLCTFLKVCMGQWRTALRYPGCRQSAMNDVLIKIERGISQGDSLSPLWFCLALNPLSTLLEGSGLGYRLQKDDRVISHLLFMDDLKLLAPTKLQLTALLKVTENFSNSIKMEFGVDKCAVMYVKKGEIVESEGIELSDSTKLRSLSATETYKYLGFSQSLGIPESDMKQTLRERFFSRQKKVLKSLLSGGNKVRACNGWVMPVLMYSFGVLRWTQTELDAIDRRVRTLLTAFRMHHPRSSVMRLYIPRRLGGRGLLNIKTLHNREVYNLREYFLQTDVGMHRSVVTVDTGLTPLALAKENWRKPVVLSTNDRREVWKGKVLHGRFYRALNGPDIDFKASTSWLRYSDLFGETEGFVCAIMDEVIMTNNYRKYILKDGTVDICRACHRPGESIRHIISGCSRLANGEYLHRHNQVARIVHQQLALKYNLVISEVPYYRYVPDPVLENGRATLYWDRSIITDRTIVANKPDIVVIDRLERRAMIVDIAVPHDENLVKVEKEKQIKYLDLSHEIVDMWNVDSVIIVPIVVSAHGLIAKSLDQHLKRLTLGGWIKGLIQKAVLLDTARIVRRFLSLEP

SEQ ID NO: 13663 - protein, 1197 aa, Spilarctia lutea
MLTRARRRALITSPDSSLRSALPSPEEAIEVPAGAEASSSSSSDEFFSPPTSPIPVRRQGRDRPPTSLGSRGPLTSNRAPATGGDVRRMKWTHSINENVMRAYFRATELGTNLTAYRVRLVSLFQELEPAVNVSAQRLSDQVRAIQRCHLLDDAVLERIRSDVRNTLTIPSSSHTVDVVVNTPQLPDNHDVDEQRESEIISVSTQCNDRIRSALEDAIQEYRYVNYNNRPRLPRLPIHKRNLALVGALNSLLPDYFGNSEDLSDTHSILYCAAIAVCRVVGVKFIERITTRTKNTVPAWQYRIERRIAETRTLIGKLISFKSGNTRPRVMRFVKQAFLGTTISPQQYMSSVTERIDFLKQKVCAWANRIRRYKKRGDRFNQNRMFQTNEKWVYRKWEAPNPCDRDGHLPDENATNTFWRNIWSVPVTHTDGDWMRDVKRSCESITNMEPVRINKEDVSCAVRSLPNWKAPGPDGLHNFWLKWFRSSHACLASQFQAALDSGSLPQFLTTGITHLLYKSGGTMDPKNFRPITCLPTLYKLLSSILRIKITTHINHNSILSISQNGCRSGTRGTKELLIIDMTISQQVRRNRRNLATCWIDYKKAYDSVPHTWLLKVLELYKIDKTLCTFLKSCMGQWRTVLRYPGCRQSPMTDVLIKIERGIFQGDSLSPLWFCLALNPLSTLLEGSELGYGLRKDDRVISHLLYMDDLKLLAPTKLQLTALLKITENFSNSIKMEFGVDKCAVMYVKKGLIVESEGVELSDSTKLRSLSVTEGYKYLGFTQSLGIPESDMKQALRERFFGRLKKVLKSLLSGGNKVRACNGWVMPVLMYSFGILRWTQTELDALDRGVRTLLTAFRMHHPRSSVMRLYIPRKLGGRGLLNIKTLHNREIYNLREYFLHTDVGMHRSVVAVDTGLTPLALAKENWRKPVVLSTDDRREVWKGKELHGRFYRALHGPDIDFKTSTSWLRYGDLFGETEGFVCAIMDEVIMTNNYRKYILKDGTVDICRACHRPGESIRHIISGCSRLANGEYLHRHNQVARIVHQQLALKYNLVISEVPYYRYVPDPVLENGRATLYWDRSIITDRTIVANKPDIVVIDRLERRAIIIDIAVPHDDNLVKVEKEKQIKYLDLSHEIVDMWNVDSVIIVPIVVSVHGLIARSLDQHLKRLTLDGWIKGLIQKAVLLDTARIVRRFLSLEP

SEQ ID NO: 13664 - protein, 1046 aa, Xestia c-nigrum
MLDDTVLDRLRTEMHSSHVIATPPSQAVVPPQSTTITYRDDDVSSDMITNVSTQYSEDMRSALEGAIREYRFMTPELRPCLPRLPMHNKNRMLVAVLDSQLSNYFDNCEDLTDVHSILYCAAVAACRVARVKFSDDSATRPKPAVPAWQYRIEQRIGGARALIGKLICFREGNTRPRVMRFVRRAFSGTDINPRDYMSRVTERIDFLKQKVYAWASRIRRYKRRVDRYTQNRTFQRDERWVYRAWERPDQGVADTRLPDDDAMCSFWRSIWSVPVSHAEGEWTRVIERACDPVPEMGAITISPQDVACAVRPLPNWKSPGPDGLHNFWIKWFTRSHARLATLFQSALESGSLPEFLTTGITHLLHKSGSTAEPKNYRPITCLPTVYKVLTSILRTKICKHVDDNSVMSASQNGCRNGSRGTKELLLIDMAISQQVRRSRKDLSTCWIDYKKAYDSVPHTWLMRVLELYKVDATLRTFLMSCMGQWRTVLRYPGCRQIQRNSEPIRIERGIFQGDSLSPLWFCLALNPLSTLLEDSGLGYQLRKDGRVISHLLYMDDLKLFAPNDLQLMELLKVTETFSSAIRMEFGVDKCAVMHVKRGEIVESVGTQLSDSINLRSLSATETYKYLGMSEALGINVADMKQSLKERFFGRLKKVFNSLLSGGNKVRAFNGWVMPVLMYSFGILKWTQTELDALDTKVRKLLTAFRMHHPRSSVMRLYIPRKCGGRGFLNAKTLHNREICSLRDYFLEADVGMHRDVVTMDKGLTPLSLAKENWRKPIILTTDDRRKEWQGKELHGRFYRALHGPDVDFLASVSWLRSGDLFGETEGFVCAIMDEVMMTNNYRRFIVKDGTVDICRACHRPGESIRHIISGCSRLANGEYLHRHNLVARIIHQQLALKYNLVESEVPYYRYVPDPVLVNGSITLYWDQSIITDRTVIANRPDIVVMDRSERRAMIVDITVPHDENLVKAEKDKQIKYLDLAREVVDMWEVDSAIIVPIVVSAHGLIAKSLDQHLRRLSLGSWIKGLIQKAVLLDTARIVRRFLSLEP

SEQ ID NO: 13665 - protein, 983 aa, Xestia c-nigrum
MGAIREYRFMTPELRPRLPRLPMHNKNRMLVAVLDSQLSNYFDNCEDLTDVHSILYCAAVAACRVARVKFSDDRATRPKPAVPAWQYRIEQRIGGARALIGKLICFREGNTRPRVMRFVRRAFLGTDINPRDYMSRVTERIDFLKQKVYAWASRIRRYKRRVDRYTQNRTFQRDERWVYRAWERPDQGVADTRLPDDDAMCSFWRSIWSVPVSHAEGEWTRVIERACDPVPEMGAITISPQDVACAVRPLPNWKSPGPDGLHNFWIKWFTRSHARLATLFQSALESGSLPEFLTTGITHLLHKSGSTAEPKNYRPITCLPTVYKVLTSILRTKICKHVDDNSVMSASQNGCRNGSRGTKELLLIDMAISQQVRRSRKDLSTCWIDYKKAYDSVPHAWLMRVLELYKVDATLRTFLMSCMGQWRTVLRYPGCRQIQRNSEPIRIERGIFQGDSLSPLWFCLALNPLSTLLEDSGLGYQLRKDGRVISHLLYMDDLKLFAPNDLQLMELLKVTETFSSAIRMEFGVDKCAVMHVKRGEIVESVGTQLSDSINLRSLSATETYKYLVMSEALGINVADMKQSLKERFFGRLKKVFNSLLSGGNKVRAFNGWVMPVLMYSFGILKWTQTELDALDTKVRKLLTAFRMHHPRSSVMRLYIPRKCGGRGFLNAKTLHNREICSLRDYFLEADVGMHRDVVAMDKGLTPLSLAKENWRKPIILTTDDRRKEWQGKELHGRFYRALHGPDVDFLASVSWLRSGDLFGETEGFVCAIMDEVMMTNNYRRFIVKDGTVDICRACHRPGESIRHIISGCSRLANGEYLHRHNLVARIIHQQLALKYNLVESEVPYYRYVPDPVLVNGSITLYWDQSIITDRTVIANRPDIVVMDRSERRAMIVDITVPHDENLVKAEKDKQIKYLDLAREVVDMWEVDSAIIVPIVVSAHGLIAKSLDQHLRRLSLGSWIKGLIQKAVLLDTARIVRRFLSLEP

SEQ ID NO: 13666 - protein, 1198 aa, Xestia c-nigrum
MLTRAAARRARLPPPDPWLSSASPPPEPSPIVSAVTPAVAVASSSSDEYFSPPTTPPPARRRGGRRPPDGLGPRRPPASDRVPAPGGSVQRMRWTQSNNENVMRAYYGATEGGNNLTAYRVRMLSLFQVLEPAVNVSAQRLSDQVRVIQRNRMLDDTVLDRLRTEMHSSHVIATPPSQAVVPPQSTTITNRDDDVSSDMITNVGTQYSEDMRSALEGAIREYRFMTPELRPRLPRLPMHNKNRMLVAVLDSQLSNYFDNCEDLTDVHSILYCAAVAACRVARVKFSDDRATRPKPAVPAWQYWIEQRIGGARALIGKLICFREGNTRPRVMRFVRRAFSGTDINPRDYMSRVTERIDFLKQKVYAWASRIRRYKRRVDRYTQNRTFQRDERWVYRAWERPDQGVADTRLPDDNAMCSFWRSIWSVPVSHAEGEWTRVIERACDPVPEMGAITISPQDVACAVRPLPNWKSPGPDGLHNFWIKWFTRSHARLATLFQSALESGSLPEFLTTGITHLLHKSGSTAEPKNYRPITCLSTVYKVLTSILRTKICKHVDDNSVMSASQNGCRNGSRGTKELLLIDMAISQQVRRSRKDLSTCWIDYKKAYDSVPHTWLMRVLELYKVDATLRTFLMSCMRQWRTVLRYPGCRQIQRNSEPIRIERGIFQGDSLSPLWFCLALNPLSTLLEDSGLGYQLRKDGRVISHLLYMDDLKLFAPNDLQLMELLKVTETFSSAIRMEFGVDKCAVMHVKRGEIVESVGTQLSDSINLRSLSATETYKYLGMSEALGINVADMKQSLKERFFGRLKKVFNSLLSGGNKVRAFNGWVMPVLMYSFGILKWTQTELDDLDTKVRKLLTAFRMHHPRSSVMRLYIPRKCGGRGFLNAKTLHNREICSLRDYFLEADVGMHRDVVTMDKGLTPLSLAKENWRKPIILTTDDRRKEWQGKELHGRFYRALHGPDVDFLASVSWLRSGDLFGETEGFVCAIMDEVMMTNNYRRFIVKDGTVDICRACHRPGESIRHIISGCSRLANGEYLHRHNLVARIIHQQLALKYNLVESEVPYYRYVPDPVLVNGSITLYWDQSIITDRTVIANRPDIVVMDRSERRAMIVDITVPHDENLVKAEKDKQIKYLDLAREVVDMWEVDSAIIVPIVVSAHGLIAKSLDQHLRRLSLGSWIKGLIQKAVLLDTARLVRRFLSLEP

SEQ ID NO: 13667 - protein, 1198 aa, Griposia aprilina
MLTRSAARRARPPPPDSSLSSASLPPVSSPTVSAVTTPAAVVASSSSDEYFSPPTTPPPVRRRGGHRPPDGLGPRGPPASDRVPAPGGSVQRMRWTRSINENVMRSYYGATEGGNNLTAYRVRMLSLFQVLEPAVNVSAQRLSDQVRVIQRNHMLDDTVLDRLRNEMQSSHVIAPPSQTVVVLPQSNTSQADEESDDRATNVSTQCNDELRSALEDAIREYRFISPELRPRLPRLPMHNKNRVLVAALDAQLSNYFDDCVDLTDTHSILYCAAVAACRVAHVKFANDSRATRPKPAVPAWQCRIERRIGEARALIGKLICFREGNTRPRVMRFVRRAFAGTNISPQDYMSCVTERIDFLKQKVYAWANRIRRYKRRVERYTQNRTFQRDERWVYRGWERPDQGVADTCLPDDDAMCSFWRNIWSVPVSHTEGDWTREVERACDPIPEMGAITICPQDVTRAVRPLPNWKSPGPDGLHNFWIKWFGRSHARLAAQYQVALESGSLPQFLTTGVTHLLHKSGSTAEPKNYRPIACLPTVYKVLTSILRDKINKHIDTNYIMSPSQNGCRNGSRGTKELLLIDMAISQQVRRSRKDLSTCWIDYKKAYDSVPHTWLMRVLELYKVEATLRTFLMSCMGQWRTVLHYPACRNTQRNSEPIRIERGIFQGDSLSPLWFCLALNPLSTLLEDSGLGYRLRRGGQVISHLLYMDDLKLFAPNNSQLMDLLKVTETFSSAIRMEFGVDKCAVMHVKRGETVESVGTQLSDSINLRALSASETYKYLGMSEALGINGTDMKQSLKDRFFGRLKKVFNSLLSGGNKVRAFNGWVMPVLMYSFGILKWTQTELDALDRKVRTLLTANRMHHPRSSVMRLYIPRKCGGRGFLNAKTLHNREICSLREYFLEADVGMHRDVVTVDKGLTPLSLAKENWRKPVVLDTNDRMEVWQSKELHGRFFRALHGPDVDQLASVAWLRFGDLFGETEGFVCAIMDEDMMTNNYRRFIVKDGTVDICRACHRPGESIRHIISGCSRLANEEYLHRHNLVARIIHQQLALKYSLVESEVPYYRYVPDPVLENGHITLYWDRSIITDRTIVANKPDIVMVDRLERRAMIVDITVPHDGNLVKAEKDKQIKYLDLAREVVDMWDVDSAIIVPIVVTANGLIAKSLDQHLRRLSLGSWIKGLIQKAVLLDTARIVRRFLSLEP

SEQ ID NO: 13668 - protein, 1204 aa, Griposia aprilina
MQTRARARQETHPPSPDLSLSSASQPPVRASTMSAVSPVAAVASSSSDEFFSPPSSPTPPRQRGRGRPPAGLGSRGQQASNGVPAAGGNVSRMRWTQSINENVMRAYYGATEGGINLTAYRSRMLSLFQVLEPAVNVSAQRLSDQVRVIRHNHRLDDATLDRLRLEMQSSSASNPSPLQNFVHAPTVVPLRTNQQDEEEDTRAISADNLCNVELRSILEDAIREYRFTSSDLRPRLPRLPMNKKNRALVCALDALLPNLIENSADLCDTHSILYCTAVAACRIARVKFPNTDRTAQLKPAAPAWQCRIERRINEARVLIGKLTCFREGNTRPRVMRFVRQAFSGTNISPREYISCVTERIDFLKQKVYAWANRIRRYRRRVDRYTQNRMFQKDERWVYRAWERPIPTQGVTDVLPPDNDTVSAFWRSIWSVPVSHTEGDWMRVVEQACDSIPEMEAISISPLDVARAVRPLPNWKSPGPDGLHNFWIKWLQRSHACLASQFQSSLETGSLPLIFTTGVTHLLHKSGSTAEPKNYRPITCLPTVYKVLTSILRAKIAEHIKNNSIMSVSQNGCKNGSRGTKELLLIDMAISQQVRRSRKDLSTCWIDYKKAYDSVPHTWLIRVLELYKIDATLRTFLISCMGQWRTILLYPGCRQIQRTDEPIRIERGIFQGDSLSPLWFCLALNPLSTLLEDSGLGYRLRRGGQVISHLLYMDDLKLFAPNNLRLMELLKVTETFSSAIRMEFGVDKCAVMHVKRGGIMESVGTQLSDSIHLRSLSSTETYKYLGMSEALGINAADMKQSLRERFFGRLNKVLNSLLSGGNKVRAFNGWVMPVLMYTFGILKWTQTELDALDRKVRTLLTAYRMHHPRSSVMRLYIPRKCGGRGFLNAKTLHNREICSLREYFLQTDVGMHRDVVAVDKGLTPLSLAKENWRKPAVLDTNDRKEVWQGKELHGRFFRALHGPDVDFLASVSWLRFGDLFGETEGFVCAIMDEVIMTNNYRKYIVKDGTVDICRACHRPGESIRHIVSGCSRLANGEYLHRHNLVARIIHQQLALQYNLVESEVPYYRYVPDPVLENGHTTLYWDRSIITDRTIVANKPDIVVIDRRERRAMIVDIAVPHDENLVKAEKDKKIKYLDLAHEVVDMWGVDSAIIVPIIVSVNGLIAESLDQHLRRLSLRSWVKSLIQRAVLLDTARIVRRFLSLDP

SEQ ID NO: 13669 - protein, 1198 aa, Griposia aprilina
MLTRSAARRARPPPPDSSLSSASLPPVSSPTVSAVTTPAAVVASSSSDEYFSPPTTPPPVRRRGGHRPPDGLGPRGPPASDRVSAPGGSVQRMRWTRSINENVMRSYYGATEGGNNLTAYRVRMLSLFQVLEPAVNVSAQRLSDQVRVIQRNHMLDDTVLDRLRNEMQSSHVIAPPSQTVVVLPQSNTSQADEESDDRATNVSTQCNDELRSALEDAIREYRFISPELRPRLPRLPMHNKNRVLVAALDAQLSNYFDDCVDLTDTHSILYCAAVAACRVAHVKFANDSRATRPKPAVPAWQCRIERRIGEARALIGKLICFREGNTRPRVMRFVRRAFAGTNISPQDYMSCVTERIDFLKQKVYAWANRIRRYKRRVERYTQNRTFQRDERWVYRGWERPDQGVADTCLPDDDAMCSFWRNIWSVPVSHTEGDWTREVERACDPIPEMGAITICPQDVTRAVRPLPNWKSPGPDGLHNFWIKWFGRSHARLAAQYQVALESGSLPQFLTTGVTHLLHKSGSTAEPKNYRPIACLPTVYKVLTSILRDKINKHIDTNYIMSPSQNGCRNGSRGTKELLLIDMAISQQVRRSRKDLSTCWIDYKKAYDSVPHTWLMRVLELYKVEATLRTFLMSCMGQWRTVLHYPACRNTQRNSEPIRIERGIFQGDSLSPLWFCLALNPLSTLLEDSGLGYRLRRGGQVISHLLYMDDLKLFAPNNSQLMDLLKVTETFSSAIRMEFGVDKCAVMHVKRGEIVESVGTQLSDSINLRALSASETYKYLGMSEALGINGTDMKQSLKDRFFGRLKKVFNSLLSGGNKVRAFNGWVMPVLMYSFGILKWTQTELDALDRKVRTLLTANRMHHPRSSVMRLYIPRKCGGRGFLNAKTLHNREICSLREYFLEADVGMHRDVVTVDKGLTPLSLAKENWRKPVVLDTNDRMEVWQSKELHGRFFRALHGPDVDQLASVAWLRFGDLFGETEGFVCAIMDEVMMTNNYRRFIVKDGTVDICRACHRPGESIRHIISGCSRLANEEYLHRHTLVARIIHQQLALKYSLVESEVPYYRYVPDPVLENGHITLYWDRSIITDRTIVANKPDIVMVDRLERRAMIVDITVPHDGNLVKAEKDKQIKYLDLAREVVDMWDVDSAIIVPIVVTANGLIAKSLDQHLRRLSLGSWIKGLIQKAVLLDTARIVRRFLSLEP

SEQ ID NO: 13670 - protein, 962 aa, Griposia aprilina
MHNKNRVLVAALDAQLSNYFDDCVDLTDTHSILYCAAVAACRVAHIKFANDSRPTRPKPAVPAWQCRIERRIGGARALIGKLICFREGNTRPRVMRFVRRAFAGTNISPQDYMSCVTERIDFLKQKVYAWANRIRRYKRRVERYTQNRTFQRDERWVYRGWERPDQGVADTCLPDDDAMCSFWRNIWSVPVSHTEGDWGREVERACDPIPEMGAISICPQDVTRAVRPLPNWKSPGPDGLQNFWIKWFGRSHARLAAQYQVAIESGSLPQFLTTGVTHLLHKSGSTAEPKNYRPITCLPTVYKVLTSILRAKINKHIDTNSIMSPSQNGCRNGSRGTKELLLIDMAISQQVRRSRKDLSTCWIDYKKAYDSVPHTWLVRVLELYKVDATLRTFLKSCMGQWRTILHYPGCRNIQRDNEPIRIERGIFQGDSLSPLWFCLALNPLSTLLEDSGLGYRLRRGGQVISHLLYMDDLKLFAPNNLQLMELLKVTETFSSAIRMEFGVDKCAVMHVKRGEIVESVGTQLSYSINLRALSASDTYKYLGMSEALSINGTDMKQSLKERFFGRLKKVFNSLLSGGNKVRAFNGWVMPVLMYSFGILKWTQTELDALDRKVRTLLTANRMHHSRSSVMRLYIPRKCGGRGFLNAKTLHNREICSLREYFLEADVGMHTDVVKVDKGLTPLSLAKENWRKPVVLDTNDRMEVWQSKELHGRFFRALHEPDVDQLASVAWLRFGDLFGETEGFVCAIMDEVILTNNYRRHIMKDGTVDVCRACHRPGESIRHIISGCSRLANEEYLHRHNLVARIIHQQLALKYSLVESEVPYYRYVPDPVLENGHITLYWDRSIITDRTIVANKPDIVVVDRLERRAMIVDITVPHDGNLVKAEKDKQIKYLDLAREVVDMWDVDSAIIVPIVVTANGLIAKSLDQHLRRLSLGSWIKGLIQKAVLLDTARIVRRFLSLEP

SEQ ID NO: 13671 - protein, 1199 aa, Griposia aprilina
MMLTRSAKRRAHPPPPDSSLSSASPPPVSSPTVSAVTTPAAVVASSSSDEYLSPPTTPPPVRRRGGHRPPDGLGPRGPPASDRVPAPGGSVQRMRWTRSINENVMRSYYGATEGGNNLTAYRVRMLSLFQVLEPAVNVSAQRLSDQVRVIQRNHMLDDTVLDRLRNEMQSSHVIAPPSQTVVVLPQSNTSQADEESDDRATNVSTQCNDELRSALEDAIREYRFISPELRPRLPRLPMHNKNRVLVAALDAQLSNYFDDCVDLTDTHSILYCAAVAACRVAHIKFANDSRPTRPKPAVPAWQCRIERRIGGARALIGKLICFREGNTRPRVMRFVRRAFAGTNISPQDYMSCVTERIDFLKQKVYAWANRIRRYKRRVERYTQNRTFQRDERWVYRGWERPDQGVADTCLPDDDAMCSFWRNIWSVPVSHTEGDWGREVERACDPIPEMGAISICPQDVTRAVRPLPNWKSPGPDGLQNFWIKWFGRSHARLAAQYQVAIESGSLPHFLTTGVTHLLHKSGSTAEPKNYRPITCLPTVYKVLTSILRAKINKHIDTNSIMSPSQNGCRNGSRGTKELLLIDMAISQQVRRSRKDLSTCWIDYKKAYDSVPHTWLVRVLELYKVDATLRTFLKSCMGQWRTILHYPGCRNIQRDNEPIRIERGIFQGDSLSPLWFCLALNPLSTLLEDSGLGYRLRRGGQVISHLLYMDDLKLFAPNNLQLMELLKVTETFSSAIRMEFGVDKCAVMHVKRGEIVESVGTQLSYSINLRALSASDTYKYLGMSEALGINGTDMKQSLKERFFGRLKKVFNSLLSGGNKVRAFNGWVVPVLMYSFGILKWTQTELDALDRKVRTLLTANRMHHPRSSVMRLYIPRKCGGRGFLNAKTLHNREICSLREYFLEADVGMHTDVVKVDKGLTPLSLAKENWRKPVVLDTNDRMEVWQSKELHGRFFRALHEPDVDQLASVAWLRFGDLFGETESFVCAIMDEVILTNNYRRHIMKDGTVDVCRACHRPGESIRHIISGCSRLANEEYLHRHNLVTRIIHQQLALKYSLVESEVPYYRYVPDPVLENGHITLYWDRSIITDRTIVANKPDIVVVDRLERRAMIVDITVPHDGNLVKAEKDKQIKYLDLAREVVDMWDVDSAIIVPIVVTANGLIAKSLDQHLRRLSLGSWIKGLIQKAVLLDTARIVRRFLSLEP

SEQ ID NO: 13672 - protein, 962 aa, Griposia aprilina
MHNKNRVLVAALDAQLSNYFDDCVDLTDTHSILYCAAVAVCRVAHVKFANDSRATRPKPAVPAWQCRIERRIGGARALIGKLICFREGNTRPRVMRFVRRAFAGTNISPQDYMSYVTELIDFLKQKVYAWANRIRRYKRRVERYTQNRTFQRDERWVYRGWERPDQGVADTCLPADDAMCSFWRNIWSVPVSHTEGDWAREVERACDPIPEMGAISICPQDVTRAVRPLPNWKSPGPDGLHNFWIKWFGRSHARLAAQYQVALESGSLPQFLTTGVTHLLHKSGSTAEPKNYRPITCLPTVYKVLTSILRAKINKHIDTNYIMSPSQNGCRNGSRGTKELLLIDMAISQQVRRSRKDLSTCWIDYKKAYDSVPHTWLVKVLELYKVDATLRTFLKSCMGQWRTVLHYPGCRNIQRDNEPIRIERGIFQGDSLSPLWFCLALNPLSTLLEDSGLGYRLRRGGQVISHLLYMDDLKLFAPNNLQLMELLKVTETFSSAIRMEFGVDKCAVMHVKRGEIVESVRTQLSDSINLRALSASETYKYLGMSEALGINGTDMKQSLKERFFGRLKKVFNSLLSGGNKVRAFNGWVMPVLMYSFGILKWTQTELDALDRKVRTLLTANRMHHPRSSVMRLYIPRKCGGRGFLNAKTLHNREICSLREYFLEADVGMHRDVVTVDKGLTPLSLAKENWRKPVVLDTNDRMEVWQSKELHGRFFRALHGPDVDQLASVAWLRFGDLFGETEGFVCAIMDEVILTNNYRRHIMKDGTVDVCRACHRPGESIRHIISGCSRLANEEYLHRHNLVARIIHQQLALKYSLVESEVPYYRYVPDPVLENGHITLYWDRSIITDRTIVANKPDIVVVDRLERRAMIVDITVPHDGNLVKAEKDKQIKYLDLAREVVDMWDVDSAIIVPIVVTANGLIAKSLDQHLRRLSLGSWIKGLIQKAVLLDTARIVRRFLSLEP

SEQ ID NO: 13673 - protein, 868 aa, Omphaloscelis lunosa
MRFVRRAFLGTDISPQDYMTRVTERIDFLKQKVYAWANRIRRYKRRVERYTQNRTFQSDERWVYRAWERPDQGVADTHLPDDDAMCSFWRSIWSVPVSHTEGDWTREVERACDPIPEMGAITICPQDVARAVRPLPNWKSPGPDGLHNFWIKWFVRSHARLAAQYQTALESGSLPQFLTTGVTHLLHKSGSTAEPKNYRPITCLPTVYKVLTSILRAKINKHIDTNSIMSVSQNGCRNGSRGTKELLLIDMAISQQVRRSRKDLSTCWIDYKKAYDSVPHTWLMRVLELYKVHTTLRTFLMSCMGQWRTVLRYPGCRNIQRNSEPIRIERGIFQGDSLSPLWFCLALNPLSTLLEDSGLGYRLRRGGQVISHLLYMDDLKLFAPNNLQLMELLKVTETFSSAIRMEFGVDKCAVMHVKRGEIMESVGTQLSDSINLRALSASETYNYLGMSEALGINVTDMKQSLKERFFGRLKKVLNSLLSGGNKVRAFNGWVMPVLMYSFGILKWTQTELDALDRRVRTLLTAYRMHHPRSSVMRLYIPRKCGGRGFLNAKTLHNREICSLREYFLGVDVGMHRDVVVVDKGLTPLSLAKENWRKPVVLDTKDRMEIWQSKELHGRYFRALHGLDVDLPASVTWLRFGDLFGETEGFVCAIMDEVMMTNNYRRFIVKDGTVDICRACHRPGESIRHIISGCSRLANEEYLHRHNLVARIIHQQLALKYSLVESEVPYYRYVPDPVLENGNITLYWDRSIITDRTIAANKPDIVVVDRGERRTMIIDITVPHDENLVKAEKDKQIKYLDLAREVVDMWDVDSAIIVPIVVTANGLIAKSLDQHLRRLSLGSWIKGLIQRAVLLDTARIVRRFLSLEP

SEQ ID NO: 13674 - protein, 1198 aa, Omphaloscelis lunosa
MLTRSAARRARLPPPDSPLSSASSPPVLSPTVNAVMTPAAAVASSSSDEYFSPPTTPPPARRRGRRRPPDGLGPRGPPASDRVPAPGGSVQRMRWTRSINENVMRSYYGATEGGNNLTAYRVRMLSLFQVLEPAVNVSAQRLSDQVRVIQRNHMLDDTVLDRLRSEMQSSHVIAPPVRSVIVPSQIITSQADERIDDRATNVSTQCNEELRSALEGAIHEYRFMSPELRPRLPRLPMHNKNRALVAALDSQLSNYFDDCEDLTDTHSILYCAAVAVCRVAHVKFSNDSRATRPKPAVPAWQCRIERRICGARTLIGKLICFREGNTRPRVMRFVRRAFLGTDISPQDYMTRVTERIDFLKQKVYAWANRIRRYKRRVERYTQNRTFQSDERWVYRAWERPNQGVTDTHLPDEDAMCSFWRSIWSVPVSHTEGDWTREVERACDSIPEMGAITICPQDVARAVRPLPNWKSPGPDGLHNFWIKWFVRSHARLAAQYQTALESGSLPQFLTTGVTHLLHKSGSTAEPKNYRPITCLPTVYKVLTSVLRAKINKHIDTNSIMSASQNGCRNGSRGTKELLLIDMAISQQVRRSRKDLSTCWIDYKKAYDSVPHTWLMRVLELYKVDITLRTFLMSCMGQWRTVLRYPGCRNIQRNSEPIRIERGIFQGDSLSPLWFCLALNPLSTLLEASGLGYRLRRGGQVISHLLYMDDLKLFAPNNLQLMELMKVTETFSSAIRMEFGVDKCAVMHVKRGKIMESVGTQLSDSINLRALSASETYKYLGMSEALGINVTDMKQSLKERFFGRLKKVLNSLLSGGNKVRAFNGWVMPVLMYSFGILKWSQTELDALDRRVRTLLTAYRMHHPRSSVMRLYIPRKCGGRGFLNAKTLHNREICSLREYFLEADVGMHRDVVVVDKGLTPLSLAKENWRKPVVLDTKNRMEIWQSKELHGRYFRALHGPDVDLPASVAWLRCGDLFGETEGFVCAIMDEVMMTNNYRRFIVKDGTVDICRACHRPGESIRHIISGCSRLANEEYLHRHNLVARIIHQQLALKYSLVESEVPYYRYVPDPVLENGNITLYWDRSIITDRTIVANKPDIVVVDRGERSAMIIDITVPHDENLVKAEKDKQIKYLDLAREVVDMWDVDSAIIVPIVVTANGLIAKSLDQHLRRLSLGSWIKGLVQKAVLLDTARIVRRFLSLEP

SEQ ID NO: 13675 - protein, 868 aa, Sesamia nonagrioides
MRFVRRAFSGTDVSTRDYLLRVTERIDFLKQKIYAWANRIRRYRRRVERYSQNRNFQSDERWVYRAWERSDQGVTDTCLPDDDATRSFWRNIWSVPVSHTEGGWTRDVERACDPVPEMGAITICPQDVARAVRPLPNWKSPGPDGLHNFWIKWFSGSHACLASQFQTALESGSLPQFLTTGITHLLHKSGSTAEPKNYRPITCLPTVYKVLTSILKAKINTHIDSNSIMSASQNGCRNGSRGTKELLLIDMAISQQVRRSRKDLSTSWIDYKKAYDSVPHTWLMRVLELYKVDATLRTFLMTCMSQWRTVLRYPGCRNIQRNSEPIRIERGIFQGDSLSPLWFCLALNPLSTLLEDSGLGYRLRRGGQVISHLLYMDDLKLFAHTNSQLKELLKITETFSSAIRMEFGVDKCAVMHVQRGEIVESVGTQLTGSINLRSLSASETYKYLGMSEALGINVTDMKQSLKERFFGRLKKVLNSLLSGGNKVRAFNGWVMPVLMYSFGILKWTQTELDALDQRVRTLLTANRLHHPRSSVMRLYIPRKCGGRGFLNAKTLHNREVCSLREYFLKTDVGMHRDVVAVDKGLTPLSLAKENWRKPVVLETNDRMEVWQSKELHGRFFRALSGPDVDFQASVAWLRYGDLFGETEGFVCAIMDEVMMTNNYRKFIVKDGTVDICRACHRPGESIRHIISGCSRLANGEYLHRHNLVARIIHQQLALKYNLVESEVPYYRYMPDPVLENGHITLYWDRSIITDRTIVANKPDIVMVDRSERRAMIVDITIPHDENLVKAEKDKQIKYLDLAHEVVDMWEVDSAIIVPIVVTANGLIAKSLDQHLRRLSLGGWIKGLIQKAVLLDTARIVRKFLSLEP

SEQ ID NO: 13676 - protein, 1047 aa, Sesamia nonagrioides
MLDDVLLDRLRLESRNSHVTPASSLVAVQLYSVSPRPNRVDEEDDDRAISVSPQCIEKLRSAMEDAFCEYRSTPPELRPRLPRLPMHKKNKALVCALDSQLSYYLKDSKDLTDTHSILYCGAVAICRVAHVKFPDSDRATRPKSTVPAWQCRIERRIGETRALIGKLTSFREGNTRPRVMRFVRRAFSGTDTSTRDYLFRVTERIDFFKQKIYAWANRIRRYKRRVERYSQNRNFQSDERRVYRAWERSDQGVTDTCLPDDDAMCSFWRNIWSVPVSHTEASWTRVVERACDPVPEMGAITICPQDVARAVRPLPNWKSPGPDGLHNFWIKWFSGSHARLASQFQTALESGSLPQFLTTGVTHLLHKSGSTAEPKNYRPITCLPTVYKVLTSILKSKINTHIDSNSIMSASQNGCRSGSRGTKELLLIDMAISQQVRRSRKDLSTCCIDYKKAYDSVPHTWLMRVLELYKVDATLRTFLMTCMRTWRTVLRYPGCRNIQRNSEPIRIERGIFQGDSLSPLWFCLALNPLSTLLEDSGLGYRLRRSGQVISHLLYMDDLKLFAHTDSQLKELLKITETFSSSIRMEFGVDKCAVMHVKRGEIMESVGTQLTSSINLRALSASETYKYLGMSEALGINVTDMKQSLKERFFGRLKKVLNSLLSGGNKVRAFNGWVMPVLMYSFGILKWTQTELDALDQRVRTLLTANRLHHPRSSVMRLYIPRKCGGRGFLNAKTLHNREVCSLREYFLETDVGMHRDMVAADKGLTPLSLAKENWRKPVVLDTNDRLEVWKSKELHGRFFRALHGPDVDFRASVAWLRFGDLFGETEGFVFAIMDEVMMTNNYRRFIVKDGTVDICRACHRPGESIRHIISGCSRLANGEYLHRHNLVARIIHQQLALKYNLVESEVPYYRYMPDPVLENGHITLYWDRSIITDRTIVANKPDIVLVDRSERRAMIVDITIPHDENLVKAEKDKQIKYLDLAHEVVDMWEVDSAIIVPIVVTANGLIAKSLDQHLRRLSLGSWIKGLIQKAVLLDTARIVRKFLSLEP

SEQ ID NO: 13677 - protein, 1200 aa, Sesamia nonagrioides
MLTRSAARRARPPSPDSSLSSASPPPVSSPTVNAVMTPAAVVASSSSDEYFSPPTTPPPARRRGGRRPPDRLGPRGPSASDRVPAPGGSVQCMRWTQSINENVMRSYYGATEGGNNLTAYRVRMLSLFQVLEPAVNVSAQRLSDQVRVIQRNHMLDDVVLDRLRLESRNSHVTPASSLVAVQLNSVSPRPNHIDEEDDDRAISVSPQCNEKLRSALEDAFREYRSIPPELRPRLPRLPMHKKNKALVCALDSQLSNYLKDSKDLNDTHSILYCGAVAICRVAHVKFPDNDRATRPKSAVPAWQCRIERRIGETRALIGKLVSFREGNTRPRVMRFVRRAFSGTDTSTRDYLFRVTERIDFFKQKIYAWANRIRRYRRRVERYSQNHNFQSDERRVYRAWERSDQGVTDTCLPDDDATCSFWRNIWSVPVSHTEGSWTRVVERACDPVPEMGAITICPQDVARAVRPLPNWKSPGPDGLHNFWIKWFSGSHARLASQFQTALESGSLPQFLTTGVTHLLHKSGSTAEPRNYRPITCLPTVYKVLTSILKSKINTHIDSNSIMSASQNGCRSGSRGTKELLLIDIAISQQVRRSRKDLSTCWIDYKKAYDSVSHTWLMRVLELYKVDATLRTFLMTCMRTWRTVLRYPGCRNIQRNSEPIRIERGIFQGDSLSPLWFCLALNPLSTLLEDSGLGYRLRRGGQVISHLLYMDDLKLFAHTDSQLKELLKITETFSSSIRMEFGVDKCAVMHVKRGEIMESVGTQLTSSINLRALSASETYKYLGMSEALGINVTDMKQSLKERFFGRLKKVLNSLLSGGNKVRAFNGWVMPVLMYSFGILKWTQTELDALDRRVRTLLTANRLHHPRSSVMRLYIPRKCGGRGFLNAKTLHNREICSLREYFLTTDVGMHRDVVAVDKGLTALSLAKENWRKPVVLDTNDRMEVWKSKELHGRFFKALHGPDVDLQASVAWLRFGDLFGETEGFVCAITDEVMMTNNYRRFIVKDGTVDICRACHRPGESIRHIISGCSRLANGEYLHRHNLVARIIHQQLALKYNLVESEVPYYRYTPDPVLENDHITLYWDRSIITDRTIIANKPDIVLVDRSERRAMIVDITIPHDENLVKAEKDKQIKYLDLAHEVVDMWEVDSAIIVPIVVTANGLIAKSLDQHLRRLSLGSWIKGLIQKAVLLDTARIVRKFLSLEP

SEQ ID NO: 13678 - protein, 1200 aa, Sesamia nonagrioides
MLTRSAARCARPPPPDSSLSSASPPPVSSPNVNAVMTPAAVVASSSSDEYFSPPTTPPPARRRGGRRPPDRLGPRGPSASDRVPAPGGSVQRMRWTQSINENVMRSYYGATEGGNNLTAYRVRMLSLFQVLEPAVNVSAQRLSDQVRVIQRNHMLDDVVLDRLRLESRNSHVTPASSLVAVQLNSVSPRPNHVDEEDDDRAISVSPQCNEKLRSALEDAFREYRSIPPEFRPRLPRLPMHKKNKALVCALDSQLSNYLKDSNDLNDTHSILYCGAVAICRVAHVKFPDSDRATRPKSAVPAWQCRIERRIGETRALIGKLISFREGNTRPRVMRFVRRAFSGTDTSTRDYLFRVTERIDFFKQKIYAWANRIRRYRRRVERYSQNRNFQSDERRVYRAWERSDQGVTDTCLPDDDATCSFWRNIWSVPVSHTEGSWTRVVERACDPVPEMGAITICPQDVARAVRPLPNWKSPGPDGLHNFWIKWFSGSHARLASQFQTALESGSLPQFLTTGVTHLLHKSGSTAEPKNYRPITCLPTVYKVLTSILKSKINTHIDSNSIMSASQNGCRSGSRGTKELLLIDMAISQQVRRSRKDLSTCWIDYKKAYDSLPHTWLMRVLELYKVDATLRTFLMTCMRTWRTVLRYPGCRNIQRNSEPIRIERGIFQGDSLSPLWFCLALNPLSTLLEDSGLGYRLRRGGQVISHLLYMDDLKLFAHTDSQLKELLKITETFSSSIRMEFGVDKCAVMHVKRGEIMESVGTQLTSSINLRALSASETYKYLGMSEALGINVTDMKQSLKERFFGRLKKVLNSLLSGGNKVRAFNGWVMPVLMYSFGILKWTQTELDALDRRVRTLLTANRLHHPRSSVMRLYIPRKCGGRGFLNAKTLHNREICSLRQYFLTTDVGMHRDVVAVDKGLTPLSLAKENWRKPVVLDTNDRMEVWKSKELHGRFFKALHGPDVDLQASVAWLRFGDLFGETEGFVCAITDEVMMTNNYRRFIVKDGTVDICRACHRPGESIRHIISGCSRLANGEYLHRHNLVARIIHQQLALKYNLVESEVPYYRYTPDPVLENDHITLYWDRSIITDRTIVANKPDIVLVDRSERRAMIVDITIPHDENLVKAEKDKQIKYLDLAHEVVDMWEVDSAIIVPIVVTANGLIAKSLDQHLRRLSLGSWIKGLIQKAVLLDTARIVRKFLSLEP

SEQ ID NO: 13679 - protein, 1197 aa, Sesamia nonagrioides
MLTRSAALRARPPPPDSLLSSASPPPVSSATVSAVTTPAAAVALSSSDEYFSPPTTPPPARRRGGRRPPDRLGPRGPSASDRVPAPGGSVQHMRWTQSINENVMRSYYGATEGGTNLTAYRVRMLSLFQVLEPAVNVSAQRLSDQVRVIQRNHMLDDTVLDRLRNEMQSSRVIAHQSQTAEIPPQSTNYADEGSNDRATNVSTQCNEELINALEAAIREYRYTSAELRPRLPRLPMHNRNRALMAALDAQLSNYFDTCEDLTDTHSILYCAAVAACRVAHVKFPSDSRATRPKPVVPAWQHRIERRIGGARALIGKLICFREGNTRPRVMRFVRRAFSGTNISPQNYMARVTERIDFLKQKVYAWANRIRRYKRRVERYTQNRTFRSNERWVYRDWERPEQGVTDTCLPDDDAMCSFWRSIWSVPVSHTEGDWARDVGRACDPIPEMGAITICPQDVACAVRPLPNWKSPGPDGLHNFWIKWFPRSHARLASQFQTALVSGSLPPFLTTGITHLLHKSGSTAEPKNYRPITCLPTVYKVLTSILKTKINKHIDSNSIMSASRNGCKSGSRGTKELLLIDMAISQQVRRSRKDLSTCWIDYRKAYDSVPHTWLMRVLELYKVDATLRTFLMSCMRTWRTVLRYPGCRNIQRNSEPIRIERGIFQGDSLSPLWFCLALNPLSTLLEDSGLGYRLSRGGQVISHLLYMDDLKLFAPNNSQLRELLKITETFSSSIRMEVGVDKCAVMHVKRGEIMESVGTQPTDSINLRALSAAETYKYLGMSEALGINVTDMKQSLKERFFGRLKKVLNSLLSGGNKVRAFNGWVMPVLMYSFGILKWTQTELDALDQRVRTLLTANRLHHPRSSVMRLYIPRKCGGRGFLNAKSLHNREVCSLREYFLETDVGMHRDVVAADKGLTLLSLAKENWRKPVVLDTNDRLEVWKSKELHGRFFRALHGSDVDFQASVAWLRFGDLFGETEGFVFAIMDEVMMTNNYRRFIVKDGTVDICRGCHRPGESIRHIISGCSRLANGEYLHRHNLIARIIHQQLALKYNLVESEVPYYRYMPDPVLENGHITLYWDRSIITDRTIVANKPDIVLVDRSERRAMIVGITIPHDENLVKAEKDKQIKYLDLAHEVVDMWEVDSAIIVPIVVTANGLIAKSLDQHLRRLSLGSWIKGLIQKAVLLDTARIVRKFLSLEP

SEQ ID NO: 13680 - protein, 1074 aa, Sesamia nonagrioides
MLSLFQVLEPAVNVSAQRLSDQVRVIQRNHMLDDTVLDRLRNEMQSSRVIAHQWQTAEIPPQSTNYADEGSNDRATNVSTQCNEELINALEAAIREYRSTSAELRPRLPRLPMHNRNRALMAALDAQLSNYFDTCENLTDTHSILYCAAVAACRIAHVKFPSDSRATRPKPVVPAWQHRIERRIGGARALIGKLICFREGNTRPRVMRFVRRAFAGTNISPQNYMARVTERIDFLKQKVYAWANRIRRYKRRVERYTQNRTFQNNERWAYRDWERPEQGVTDTCLPDDDVMCSFWRSIWSVPVSHTEGDWARDVERACDLIPEMGTITICPQDVACAVRPLPNWKSPGPDGLHNFWIKWFPRSHARLASQFQTALVSGSLPQFLTTGITHLLHKSGSTAEPKNYRPITCLLTVYKVLTSILKTKINKHIDSNSIMSASQNGCKSGSRGTKELLLIDMAISQQVRRSRKDLSTYWIDYRKAYDSVPHTWLMRVLELYKVDATLRTFLMSCMGTWRTVLRYPGCRNIQRNSEPIRIERGIFQGDSLSPLWFCLALNPLSTLLEGSGLGYRLRRGGQVISHLLYMDDLKLFAPNNSQLRELLKITETFSSSIRMEFGVDKCAVMHVKRGEIMESVGTQLTGSINLRALSASETYKYLGMSEALGINVTDMKQSLKERFFGRLKKVLNSLLSGGNKVRAFNGWVMPVLMYSFGIPKWTQTELDALDQRVRTLLTANRLHHPRSSVMRLYIPRKCGGRGFLNAKTLHNREVCSLREYFLETDVGMHRDVVAADKGLTPLSLAKENWRKPVVLDTNDRLEVWKSKELHGRFFRALHGPDVDFQASVAWLRFGDLFGETEGFVFAIMDEVMMTNNYRRFIVKDGTVDICRACHRPGESIRHIISGCSRLANGEYLHRHNLVARIIHQQLALKYKLVESEVPYYRYMPDPVLENGHIILYWDRSIITDRTIVANKPDIVLVDRSERRAMIVDITIPHDENLVKAEKDKQTKYLDLAHEVVDMWEVDSAIIVPIVVTANGLIAKSLDQHLRRLSLGSWIKGLIQKAVLLDTARNVRKFLSLEP

SEQ ID NO: 13681 - protein, 1197 aa, Sesamia nonagrioides
MLTRSAARRARPPSPDSLPSSASPPPVSSTTVSAVTTPAATVASSSSDEYFSPPTTPPPVRRRGGRRPPDCLGPRGPSASDRVPAPGGSVQRMRWTQSINENVMRSYYGATEGGNNLTAYRVRMLSLFQVLEPAVNVSAQRLSDQVRVIQRNHMLDDTVLDRLRNEMQSSRVITHQSHSAEIPPQPTNYADEESNDRATNVSTQCNEELRNALEAAIREYRFMSAELRPRLPRLPMHNRNRALMAALDAQLSNYFDTCENLTDTHSILYCAAVAACRVAHVKFFSDSRATRPKPVVPAWQHRIERRIGGARALIGKLICFREGNTRPRVMRFVRRAFSGTNTSPQNYMARITERIDFLKQKVYAWANRIRRYKRRVERYTQNRTFQSNQRWVYRDWERPVQGVADTCLPDDDAMCSFWRSIWSVPVSHTEGDWARDVERACDPIPEMGAITICPQDVARAVRPLPNWKSPGPDGLHNFWIKWFPRSHASLASQFQTALVYGSLPQFLTTGITHLLHKSGSTAEPKNYRPITCLPTVYKVLTSILKAKINNHIDSNSIMSVSQNGCRSGSRGTKELLLIDMAISQQVRRSRKDLSTCWIDYKKAYDSVPHTWLMRVLELYKVDTTLRTFLMTCMGQWRTVLRYPGCRNIQRNSEPIRIERGIFQGDSLSPLWFCLALNPLSTLLEDSGLGYRLRRGGQVISHLLYMDDLKLFAPNNLQLKELLKITETFSSAIRMEFGVDKCAVMHIKRGEIVESVGTQLTSSINLRALSASETYKYLGMSEALGINVTDMKQSLKERFFGRLKKVLNSLLSGGNKVRAFNGWVMPVLMYSFGILKWTQTELDALDQRVRTLLTANRLHHPRSSVMRLYIPRKCGGRGFLNAKTLHNREICSLREYFLETDVGMHRDVVAVDKGLTPLSLAKENWRKPVVLDTNDRMEVWKSKELHGRFFRALHGPDVDLQASVAWLRFGDLFGETEGFVCAIMDEVMMTNNYRRFIVKDGTVDICRACHRPGESIRHIISGCSRLANGEYLHRHNLVARIIHQQLALKYNLVESEVPYYRYMPDPVLENGHITLYWDRSIITDRTIVANKPDIVMVDRSERRAMIVDITIPHDENLVKAEKDKQIKYLDLAHEVVDMWEVDSAIIVPIVVTANGLIAKSLDQHLRRLSLGSWIKGLIQKAVLLDTARIVRKFLSLEP

SEQ ID NO: 13682 - protein, 868 aa, Sesamia nonagrioides
MRFVRRAFSGTDTSTRDYLFRVTERIDFFKQKIYAWANRIRRYKRRVERYSQNRNFQSDERRVYRAWERSDQGVTDTCLPDDDATCSFWRNIWSVPVSHTEGSWTRVVERACDPVPEMGAITICPQDVAHAVRPLPNWKSPGPDGLHNFWIKWFTRSHACLASQFQTALESGSLPQFLTTGVTHLLHKSGSTAEPKNYRPITCLPTVYKVLTSILKSKINTHIDSNSIMSASQNGCRSGSRGTKELLLIDMAISQQVRRSRKDLSTCWIDYKKAYDSVPHTWLMRVLELYKVDATLRTFLMTCMRTWRTVLRYPGCRNIQRNSEPIRIERGIFQGDSLSPLWFCLALNPLSTLLEDSGLGYRLRRGGQVISHLLYMDDLKLFAHTDSQLKELLKITETFSSSIRMEFGVDKCAVMHVKRGEIMESVGTQLTSSINLRALSASETYKYLGMSEALGINVTDMKQSLKERFFGRLKKVLNSLLSGGNKVRAFNGWVMPVLMYSFGILKWSQTELDALDQRVRTLLTANRLHHPRSSVMRLYIPRKCGGRGFLNAKTLHNREVCSLREYFLETDVGMHRDVVAADKGLTPLSLAKENWRKPVVLDTNDRLEVWKSKELHGRFFRALHGPDVDFRASVTWLRFGDLFGETEGFVFAIMDEVMMTNNYRRFIVKDGTVDICRACHRPGESIRHIISGCSRLANGEYLHRHNLVARIIHQQLALKYNLVESEVPYYRYMPDPVLENGHITLYWDRSIITDRTIVANKPDIVLLDRSERRAMIVDITIPHDENLVKAEKDKQIKYLDLAHEVVDMWEVDSAIIVPIVVTANGLIAKSLDQHLRRLSLGSWIKGLIQKAVLLDTARIVRKFLSLEP

SEQ ID NO: 13683 - protein, 1197 aa, Sesamia nonagrioides
MLTRSAARRARPPSPDSLLGSASPPPVSSPTVSAVTTPAAAVALSSSDEYFSPPTTPPPVRRRGGRRPPDRLGPRGPSASDRVPAPGGSVQRMRWTQSINENVMRSYYGATEGGNNLTAYRVRMLSLFQVLEPAVNVSAQRLSDQVRVIQRNHMLDDTVLDRLRNEMQSSRVIAHQSQTAEIPPQSTNYADEGSNDRATNVSTQCNEELINALEAAIREYRSTSAELRPRLPRLPMHNRNRALMAALDAQLSNYFDTCEDLTDTHSILYCAAVAACRVAHVKFPSDSRATRPKPVVPAWQHRIERRIGGARALIGKLICFREGNTRPRVMRFVRRAFAGTNISPQNYMARVTERIDFLKQKVYAWANRIRRYKRRVERYTQNRTFQNNERWVYRDWERPEQGVTDTCLPDDDVMCSFWRSIWSVPVSHTEGDWARDVERACDLIPEMGAITICPQDVACAVRPLPNWKSPGPDGLHNFWIKWFPRSHARLASQFQTALVSGSLPQFLTTGITHLLHKSGSTAEPKNYRPITCLPTVYKVLTSILKTKINKHIDSNSIMSASQNGCKSGSRGTKELLLIDMAISQQVRRSRRDLSTCWIDYRKAYDSVPHTWLMRVLELYKVDATLRTFLMSCMRTWRTVLRYPGCRNIQRNSEPIRIERGIFQGDSLSPLWFCLALNPLSTLLEDSGLGYRLRRGGQVISHLLYMDDLKLFAPNNSQLRELLKITETFSSSIRMEFGVDKCAVMHVKRGEIMESVGTQLTGSINLRALSASETYKYLGMSEALGINVTDMKQSLKERFFGRLKKVLNSLLSGGNKVRAFNGWVMPVLMYSFGILKWTQTELDALDQRVRTLLTANRLHHPRSSVMRLYIPRKCGGRGFLNAKTLHNREVCSLREYFLETDVGMHRDVVAADKGLTPLSLAKENWRKPVVLDTNDRLEVWKSKELHGRFFRALHGPDVDFQASVAWLRFGDLFGETEGFVFAIMDEVMMTNNYRRFIVKDGTVDICRACHRPGESIRHIISGCSRLANGEYLHRHNLVARIIHQQLALKYKLVESEVPYYRYMPDPVLENGHITLYWDRSIITDRTIVANKPDIVLVDRSERRAMIVDITIPHDENLVKAEKDKQIKYLDLAHEVVDMWEVDSAIIVPIVVTANGLIAKSLDQHLRRLSLGSWIKGLIQKAVLLDTARIVRKFLSLEP

SEQ ID NO: 13684 - protein, 1079 aa, Drepana arcuata
MLLLFQELEPTVNVSAQRLSDQVRVIQRNHRLDDNVLDRLRSEMQGSHVTSAPAQSAAQSLVSSITLPQPSYTDMEGGDRPLNAGTQYNELVRSTLKDAVQQYKFVSPGLRPRLPRLPMHKKNLALVATLDSLLPEYLDCCEDLTETHQILYCAAIAACRLAHVNFPNHERTGQPKPAVPIWQRRIQRRIDDARVLIGKLSCFREGNTRPRVMRYVRKAFSGSDINPRDYVACVTERIDYLKQKVYAWANRIRRYKQRVDRYTQNRMFQNDQKWVYRGWERSEQGVSDEQLPDNDAVCTFWSNIWSVPVTHTEGDWIEEIKKVCESIQEMGEVTISPKDVADAVQSLSNWKSPGPDGLHNFWLKWLRTSHARLASQFQSSLESGSLPSFLMTGITHLLHKSGSTMDPKNYRPITCLPTMYKLLTSILRAKISIHINNNVIMSASQNGCKNGSRGTKELLLIDMTISQQVRRSRKNLSTCWIDYKKAYDSVPHTWLMRVLELYKVNSTLRIFLKSIMGQWKTVLHYPRGRQIPGNDEPIRIERGIFQGDSLSPLWFCLALNPLSTLLESSGLGYRLRRGGQVISHLLYMDDLKLFAPNELQLTELLNVTQNFSNSIRMEFGIDKCAVMHVKRGNIMESVGIQLSDSINIRSLTPTENYTYLGMSEALGIHEADMKKSLLDRFYGRLTKVLKSLLTGGNKVRAYNGWVMPVLMCSFGILKWTQRELEITDRKVRTLLTSYRMHHPRSSIMRLYIPRKCGGRGFLNAKTLHNCEVYKLREYFRSTEVGMHRDVVAVDKGLTALSLAKENWRKPVVLTTNDRREIWQSKELHGRFYRALHDPDVDHEASLAWLRFGDLFGETEGFVCAIMDEVMMTNNYRKYILRDGTVDICRACHRPGESLRHIISGCSHLANGEYLHRHNQVAKIIHQQLALKYNLVDSEVPYYKYSPDPVLENGHVTLYWDRSIITDRCITANKPDIVLIDRLERRTMIVDITVPHDGNLVKAEKDKQIKYLDLAHEIVSMWDMDSAIIVPIVITANGLMAKSLDQHLKRLSLDGWIKCLIQKAVLLETARIVRFLSLGP

SEQ ID NO: 13685 - protein, 1198 aa, Apamea monoglypha
MLTRSAARRARLPSPDSSLSSASPPPVPSPTVSAVTTPAAVVASSSSDEYFSPPTTPPPARRRGGRRPPDGLGPRGPLASDRVAAPGGSVQRMRWTRSINENVMRSYYGATEGGNNLTAYRVRMLSLFQVLEPAVNVSAQRLSDQVRVIQRNHMLDDTVLDRLRSEMQSSHVIAPQSQTAAVLPQSNTSHADEGSNDRATNVSIQCNEELRNALEGAIREYRFMSPELRPRLPRLPMHNKNRALVAVLDAQLSSHFDACEDLTDTHSILYCAAVAACRVAHVKFDSDSRATRPKPAIPAWQCRIERRIGGARALIGKLICFREGNTRPRVMRFVRRAFLGTDISSQDYLSRVTERIDFLKQKVYAWANRIRRYKRRVERYTQNRTFQSDERWVYRGWERPDQDVADTCLPDDDAMCSFWRSIWSAPVSHTEGDWAREVERACDPIPEMEAITICPQDVARAVRPLPNWKSPGPDGLHNFWVKWFTRSHARLASQFQTALESGSLPQFLTTGVTHLLHKSGSTAEPKNYRPITCLPTVYKVLTSILRAKINKHIDTNSIMSASQNGCKNGSRGTKELLLIDMAISQQVRRSRKDLSICWIDYKKAYDSVPHTWLMRVLDLYKVDATLRTFLMSCMGQWRTVLRYPGCRNIQRNSEPIRIERGIFQGDSLSPLWFCLALNPLSTLLEDSGLGYRLRRGGQVISHLLYMDDLKLFAPNNLQLMELLKVTETFSSDIRMEFGVDKCAVMHVKRGEIVESVGTQLSDSTNLRALSVSETYKYLGMSEALGINVTDMKQSLKERFFGRLKKVLNSLLSGGNKVRAFNSWVMPVLMYSFGILKWTQTELDALDRKVRTLLTVNRMHHPRSSVMRLYIPRKCGGRGFLNAKTLHNREICSLREYFLETDVGMHRDVVAVDKGLTPLSLVKENWRKPVVLDTNDRMEVWQSKELHGRFYRALHGPDVDLLASVAWLRFGDLFGETEGFVCAIMDEVMMTNNYRRFIVKDGTVDICRACHRPGESIRHIISGCSRLANGEYLHRHNLVARIIHQQLALKYNLVESEVPYYRYVPDPVLENGNITLYWDRSIITDRTIVANKPDIVVVDRSERRAMIVDITVPHDENLVKAEKDKQIKYLDLAREVVDMWDVDSTVIVPIVVTANGLIAKSLDQHLRRLSLGSWIKGLIQKAVLLDTARIVRRFLSLEP

SEQ ID NO: 13686 - protein, 868 aa, Apamea monoglypha
MRFVRRAFLGTDISSQDYLSRVTERIDFLKQKVYAWANRIRRYKRRVERYTQNRTFQSDERWVYRGWERPDQSVADTCLPDDDAMCSFWRSIWSAPVSHTEGDWTGKIERACELIPEMGAITICPQDVARAVRPLPNWKSPGPDGLHNFWIKWFQRSHAPLAAQFQSALESGLLPQFITTGITHLLHKSGSTADPKNYRPITCLPTIYKVLTSILRAKINKHIDSNSIMSVSQNGCRNGSRGTKELLLIDMAISQQVRRSRKDLSTCWIDYKKAYDSVPHTWLMRVLELYKVDTTLRTFLMTCMGQWRTVLRYPGCRNIQRNSEPIRIERGIFQGDSLSPLWFCLALNPLSTLLDDSGLGYRLRRGGQVISHLLYMDDLKLFAPNNLQLMKLLKITETFSSAIRMEFGVDKCAVMHVKRGEIVESVGTQLSDFTNLRALSAAETYKYLGMSEALGINVTDMKQSLKERFFGRLKKVFNSLLSGGNKVRAFNSWVMPVLMYSFGILKWTQTELEALDRRVRTLLTANRMHHPRSSVMRLYIPRKCGGRGFLNAKTLHNREICSLREYFLETDVGMHRDVVAVDKGLTPLSLAKENWRKPVVLDTNDRMEVWQSKELHGRFYRALHGPDVDLLASVAWLRFGDLFGETEGFVCAIMDEVMMTNNYRRYIVKDGTVDICRACHRPGESIRHIISGCSRLANGEYLHRHNLVARIIHQQLALKYSLVESEVPYYRYVPDPVLENGNITLYWDRSIITDRTIVANKPDIVVVDRSERRAMIVDITVPHDENLVKAEKDKQIKYLDLAHEVVDMWDVDSAIIVPIVVSANGLIAKSLDQHLRRLSLGSWIKGLIQKAVLLDTARIVRRFLSLEP

SEQ ID NO: 13687 - protein, 1196 aa, Furcula furcula
MLTRHKARLRPPDSSPRSASQPLAPSTGGPPAAVASSESDEYFSPPSSPPPVCRRRGRPPRDLGLLGQPAPNRVLVPGGVVRRMKWTLSINENVMRAYYEATEGGTNLTAYRDRMLSLFQTLEPAVNVSAQRLSDQVRAIQRGHMLDDAVLDRLRSEVQGSRVVPCIPSSQAVAPAVNTAPAPRLAATSGDDRDDMSTNISTNVSTQLRSTLEDVVREYRTMPQGLRPRLPRLPMHKRNRALVCALDSLLSSYFDSSEDLADAHSLLYCAAMTACRVARVKFPNSDAATRPRPAVPAWQCRIERRIGEARVLIGKLTCFREGNTRPRVMRFVRRAFSGTGIDPREYFSCVTERIDFLKQKVCAWANRIRRYRARVDRYSQNNMFQRDQRWVYRSWERPSQIGGEVQRPDDDAMIRFWRNIWSVPVTHSEGDWIRDVEQVCEPIPEMGAITIRPQDVADAVRPLPNWKAPGPDGLHNFWLKWLRSSHACLASLFQSAVESGSLPEFLTTGITHLLHKTNSTADPKNYRPITCLPTVYKTLTSILRAKIYRHVEGNSIMSASQNGCRSGARGTKELLLIDMAICQQARRNRRDLSTCWIDYKKAYDSVPHTWLVRVLELYKVNTTLRTFLASCMRQWRTVLLYPGSRQTLGDGEPIRIERGIFQGDSLSPLWFCLALNPLSTLLKSSGLGYRLRRGGQVISHLLYMDDLKLFTPTEVQLMGLLKVTETFSSSIRMEFGVDKCAVMHVKRGRLVESRSIQLSDSTDLRTLSATETYKYLGMSQALGINETDMKQSLRERFLGRLRKVLKSLLSGGNRVRAYNGWVMPVLMYSFGILKWTQTELDTLDRTVRTLLTAYRMHHPRSSVMRLYIPRKCGGRGFLNAKTLHNREIYNLREYFLHCGGEMHTDVVAVDSGLTPLSLAKGNWRRPVVLTTGDREAVWQSKELHGRFYRALHGPDVDFSASVAWLRFGDLFGETEGSVCAIMDEVVMTNNYRKYILRDGTIDICRACHRPGESLRHIISGCSRLANGEYLHRHNQVARIIHQQLALKYRLVTSEVPYYRYVPEPVLEDGHITLYWDRSIITDRSIVANRPDIVLIDRTERRAMIVDVTVPHDENLVKAEKDKECKYLDLAHEVVDLWDIDKAIIVPIVVSAHGLMAKSLDKHLKRLTLDGWIKGQMQKAVLLETARIVRKFLSLEP

SEQ ID NO: 13688 - protein, 1164 aa, Spodoptera exigua
MLTRAAARRARPPPPASSLSSASPPPESSPTVSDVTPAVAAASSSSDEYYSPPTTPPPTRRRGGRRPPARLGPRGPPASDRVPAVGGSVQRMRWTQSINENVMRAYYGATEGGNNLTAYRVRMLSLFQVLEPAVNVSAQRLSDQVRVIQRNRMLDDTVLDRLQTEMGSRASASSSRTVVPATLPLTSHGIVSAVADEESTDTVAHVSTQCIDELRSALEYAIREYRYISPELRPRLPRLPMHNKNKALVAALDSQLSNYLDDCEDLGDTHSIMYCAAVAACRVAHVKFPTNDVTTRPKPAVPAWQRRIECRIAGARALIGKLICFREGNTRPRVMRSVRRAFSGTDISPRDYMSRVTERIDFLKQKVYAWANRIRRYRRRVERYTQNRTFRSNERWVYRTWERPDHGVTDRRLPDDDAMCSFWRSIWSVPVSHTEGDWIRDVERACDPIPQMGTINISPQDVARAVRPLPNWKSPGPDGLHNFWIKWFTRAHARLASQFQSAVESGSLPKFLTTGVTHLLHKSGSTAEPKNYRPITCLPTVYKVLTSILRSKINSHIDKNKIMSTAQNGCKNGSRGTKELLLIDMAINQQVRRARKDLSTCWIDYKKAYDSIPHTWLMRVLELYKIDTILRTFLMSCMRQWSTVLRYPGCRHTQRNSEPVRIERGIFQGDSLSPLWFCLALNPLSTLLENSGLGYRLKRGGQVISHLLYMDDLKLFAPNKLQLMELLKLTETFSSAIRMEFGVDKCAIMHVKRGEVVVSVGTQLTDSINLRSLSPTETYKYLGMSEALGINVTDMKQSLKERFFGRLKKVFNSFLSGGNKVRAFNGWVMPVLMYSFGVLKWSQTELDALDRQVRTMLTAYRMHHPRSSVMRLYIPRKCGGRGFLNAKTLHNREVCSLREYFLAADVDMHRDVVAVDKGLTPLSLAIENWRKPVVLDTNARREVWQSKELHGRFFRALHGPDVDQVASVAWLRFGDLFGETEGFVCAIMDEVIMTNNYRRFIVKDGTVDICRACHRPGESIRHIISGCSRLANGEYLHRHNLVARIIHQQLALKYSLVESEVPYYRYEPDPVLDNGHITLYWDRSIITDRTIVANKPDIVVVDRKERRAMIVDIAVPHDENLVKAEKDKLIKYIDLAREVVDMWEVDSAIIVPIVIIINILGGSR

SEQ ID NO: 13689 - protein, 1200 aa, Arctia plantaginis
MITRARSKAQLTSPDSSLRSVLPSTETTTEAPAVAEASSSTSSDEFFSPPTSPTPVRRQGRGRPPICLVSRGPLTSNRVPATGGNVRRMKWTNSINENVMRAYYRATEMGTNLTAYRVRLVSLFQELEPAVNVSAQRLSDQVRAIQRCHLLDDAVLERIRSDIRNSLIIPSSSHTVDLVANSTPQLVSHTNDVDELVEGEVISVSTQYNDRIRSALEDAILEYRYVNWNNRPRLSRLPIHKRNLALVGALDSLLPDYLDNSEDLGDTHSILYCAAVAVCRVAGVIIVENVTTTRPKSTVPAWQCRIERRFAETRVLIGKLISFRSGNTRPRVMRFVKQAFLGTTIGPQQYMLCVTERIDFLKQKIYAWANRIRRYKKRIDRYNQNRMFQRNEKWVYRKWEEPDPCVSHGHLPDENVTHTFWRNIWSVPVTHIEGDWLRDVRRSCESITPMEPVIIDKDDVSCAVRSLPNWKSPGLDGLHNFWLKWFRSSHACLASQFQAALNSGSLPQFLTTGITHLLYKSGSVMDPKNFRPITCLPTMYKLLTSILRLKITLHINNNSIMSVSQNGCRSGSRGTKDLLIIDRAISQQVRRNRKSLATCWIDYKKAYDSVPHTWLLRVLELYKIDTTLCTFLKSCMGQWRTALRYPGCRQTTVIDAPIKIERGIFQGDSLSPLWFCLALNPLSTLLEGSGLGYRLQKDDQVISHLLYMDDLKLLAPTKLQLSALLKVTENFSNSIKMEFGVDKCAVMYVKKGEILESEGIELSDSTKLRSLSATETYKYLGISQSLGIPESDMKQTLQERFFGRLKKVLKSLLSGGNKVRACNGWVMPILMYSFGILKWTQTELDAIDRRVRTLLTAFRMHHPRSSVMRLYIPRKLGGRGLLNIKTLHNREICNLREYFLHTDVGMHRNVVAVDIGFTPLALAKENWRKPVVFSTNDRREVWKGKELHGRFYRALNGSHIDFKASTTWLRYGDLFGETEGFVCAIMDEVIMTNNYRKYILKDGTVDICRACHRPGESIRHIISGCSRLANGEYLHRHNQVARIVHQQLALKYHLVNLEVPYYRYVPDPVLENGRATLYWDRSIITDRTIVANKPDIVVIDRLERRAIIVDIAVPHDENLVKVEKEKQIKYLDLSHEIVDMWNVDSVIIVPIVVSAHGLIAKSLDQHLKRLTLDGWIKGLIQKAVLLDTARMVRRFLSLQS

SEQ ID NO: 13690 - protein, 868 aa, Arctia plantaginis
MRFVKQAFLGTTIGPQQYMSCVKERIDFLKQKIYAWANRIRRYKKRIDRYNQNRMFQRNEKWVYRKWEEPDPCVSHGHLPDENVTHTFWRNIWSVPVTHIEGDWLRDVRRSCESITPMEPVIIDKDDVSCAVRSLPNWKSPGLDGLHNFWLKWFRSSHACLASQFQAALNSGSLPQFLTTGITHLLYKSGSVMDPKNFRPITCLPTMYKLLTSILRLKITLHINNNSIMSVSQNGCRSGSRGTKDLLIIDRAISQQVRRNRKSLATCWIDYKKAYDSVPHTWLLRVLELYQIDTTLCTFLKSCNGQWRTALRYPGCRQTTVIDAPIKIERGIFQGDSLSPLWFCLALNPLSTLLEGSGLGYRLQKDDQVISHLLYMDDLKLLAPTKLQLLALLKVTENFSNSIKMEFGVDKCAVMYVKKGEIVESEGIELSDSTKLRSLSATETYKYLGISQSLGIPESDMKQTLQERFFGRLEKVLKSLLSGGNKVRACNGWVMPILMYSFGILKWTQTELDALDRRVRTLLTAFRMHHPRSSFMRLYIPRKLGDRGLLNIKTLHNREICNLREYFLHTDVGMHRNIVAVDIGFTPLALAKENWRKPVVFSTNDRREVWKGKELHGRFYRALNGSDIDFKASTTWLRYGDLFGETEGFVCAIMDEVIMTNNYRKYILKDGTVDICRACHRPGELIRHIISGCSRLANGEYLHRHNQVARIVHQQLALKYHLVNLEVPYYRYVPDPVLENGRATLYWDRSIITDRTIVANKPDIVVIDRLERRAIIVDIAVPHDENLVKVEKEKPIKYLDLSHEIVDMWNVDSVIIVPIVVSAHGLIAKSLDQHLKRLTLDGWIKGLIQKAVLLHTARIVRRFLSLQS

SEQ ID NO: 13691 - protein, 1200 aa, Mamestra configurata
MLTRSRARAQTAQPTPSGSSLSSASQPPGPAPAVSPEIPVAAVASSSSDEYFSPPTTPPPARRRGRGRPPTSLGPRGPPASDRVPAIGGSVQRMRWTQTINENVMRSYYGATEGGTNLTAYRGRMLSLFQVLEPAVNVSAQRLSDQVRVILRNRMLDDAVLDRLRLESRSGRVSPASPPAAVQIQSSVSPRPNNVGEDDDDGAISVSTQCNERLRSALEDAFREYRSTPPELRPRLPRLPMHNKNRALVCALDSQLTNCFDSSEDLADTHSILYCAAAAACRVAHVKFPNSDRATRPAVPAWQCRIERRIGEARALIGKLICFREGNTRRRVMRFVRRAFSGTDTSPRDYLTRVTERIDFLKQKIYAWANRIRRYKRRVERYTQNRTFQSNERWVYRAWERPDQGVTDTRLPDDDVMCSFWRNIWSVPVSHTEGDWTREVERACDPIPEMGAITISPQDVARAVRPLPNWKSPGPDGLHNFWIKWFKRSHARLASQFQSALESGSLPQFLTTGITHLLHKSGSTAEPKNYRPITCLPTVYKVLTSILRAKINHHIETNSIMSASQNGCRNGSRGTKELLLIDVAISQQVRRSRRDLSTCWIDYKKAYDSVPHTWLMRVLELYKVDAVLRTFLMSCMGQWRTVLRYPGCRQIQANSDPIRIERGIFQGDSLSPLWFCLALNPLSTLLEGSGQGYRLKRGGQVISHLLYMDDLKLFAPNNLQLMKLLKVTETFSSAISMEFGVDKCAVMHVKRGEIMESVGTQLSDSINLRSLSSTETYKYLGMSEALGINAADVKQSLKERFFGRLNKVLNSLLSGGNKVRAFNGWVMPVLMYSFGILKWTQTELDALDRRVRSLLTANRMHHPRSSVMRLYIPRKCGGRGFLNAKTLHNREICSLREFFLEADVGMHRDVVAVDKGLTALSLANENWRKPVVLDTNDRREVWQSKELHGRFYRVLHGPDVDFLASVAWLRFGDLFGETEGFVCAIMDEVMMTNNYRKYIVKDGTVDICRACHRPGESIRHIISGCSSLANGDYLHRHNLVARIIHQQLALKYNLVESEVPYYRYVPDPVLENGNCTLYWDRSIITDRTIVANKPDIVVIDRLERRAMIVDIAVPHDENLVKTEKDKQTKYLDLAREVVDMWDVNTAVIVPIVVTANGIIAKSLDQHLKRLSLGSWIKGLIQKAVLLDTARIVRRFLSQGP

SEQ ID NO: 13692 - protein, 868 aa, Amphipyra berbera
MRFVRRAFSGTEINPRDYMSCVTERIDFLKQKVYAWANRIRRYKRRVERYTQNRMFHSDERWVYRTWERRDQCVSDTHLPDSDAMNTFWRHIWSMPVTHTEGDWMQEVQRACEPIEEMGDITIVPQDVTSAVRPMSNWKSPGPDRLHNFWLKWLRSSHARLASQFQSSLESGSLPEFLITGVTHLLHKSGSTAEPKNYRPITCLPTVYKLLTSILRSKINCHIINNSIMSVSQNGCKNGSCGTKELLLIDMAISQQVRRSRKDLSTCWIDYKMAYDSVPHTWLKRVLELYKVNTTLCAFLTSCMGQWRTVLHYPGCRQVQGRGEPIRIERGIFQGDSLSPLWFCLALNPLSTLLEGSGLGYRLRRGGQVISHLLYMDDLKIFAPNNLQLVKLLKVTETFSNSIRVEFGVDKCAVMHVKRGGIMESVGTQLSDSIHLGSLSSAETYKYLGMSEALGINEADMKQSLRERFYGRLKKVLKSVLSGGNKVRAFNGWVMPVLMYSFGILKWTQTELNALDRRVRALLTAYRMHHPRSSVMRLYIPRKCGGRGFLNAKTLHNRVVCSLREYFLQADVGMHRDVVAVDKGFTPLSLAKENWRKPAVLDTNGRREVWQSKELHGRFYRALHGPDVDFLASVAWLRFGDLFGETEGFVCAIMEEVMMTNNYRKYIVKDGTIDICRACHCPGESIRHIISDCSRLANGEYLHRHNLVARIIHQQLALKYNLVDAEVPYYKYVPDLVLENGHITLYWDRSIITDRTIVANKPDIVVIDRSERLTMIVDVPVPHDENLVKAEKDKEIKYQDLAHEVVDMWQVDSAVIVPIVVTANGLIAKSLDQHLMRLSLGSWVKGLIQRAVLLDTARIVRKFLSLRP

SEQ ID NO: 13693 - protein, 1208 aa, Amphipyra berbera
MLTRSRAKAIAQNTRPRPSASSLSSASQPPDSSIVSDVTPAAAVASSSSDEYFSPPSTPPPPPPPRRRGRGRPPASLGPRGPPASDRVPAPGGSVQRMRWTPTMNENCMRAYFGATEGGTNLTAYRGRMLSLFQVLEPAVNVSAQRLSDQVRVIQRDHRLTDDALDRLRSEVQSNCIISLQSQTAAQPQVPPMVPPQPIRADEESDDRVTIVSAQCNEQLRSALELAIREYRFTPPNLRPRIPRLPMNRQNRALMCALDSLLSNYFDNSEGLEDTHSILYCAAVAACRVAHVKFDNNDRATRPKPAVPAWQCRIERRINEARALIGKLICFREGNTRPRVMRFVRRAFSGTDINPREYMSRVTERIDFLKQKVYAWANRIRRYKRRVERYTQNRMFHSDERWVYRTWERPEHDVSDTHLPDNDVMNTFWRNIWSMPVTHTEGDWMQEVQRACEPIEEMGDIIIVPQDVTSAVRPMVNWKSPGPDGLHNFWLKWLRSSHARLASQFQSSLESGSLPPFLTTGITHLLHKSGSTAEPKNYRPITCLPTIYKLLTSILRAKINTHIINNSIMSASQNGCKNGSRGTKELLLIDMAISQQVRRSRKDLSTCWIDYKKAYDSVPHTWLMRVLELYKVNTTLCAFLTSCMGQWRTVLHYPGCRQIQGRGEPIRIERGIFQGDSLSPLWFCLALNPLSTLLEGSGLGYRLRRGGQVISHLLYMDDLKLFAPNNLQLMKLLKVTETFSNSIRMEFGVDKCAVMHVKRGGIMESVGTQLSDSIHLRSLSSTETYKYLGMSEALGINETDMKQSLRERFYGRLKKVLKSLLSGGNKVRAFNGWVMPVLMYSFGILKWTQTELDALDRRVRTLLTAYRMHHPRSSVMRLYIPRKCGGRGFLNAKTLHNREVCSLREYFLQADVGMHRDVVAVDKGFTPLSLAKENWRKPVVLDTNGRREVWQSKELHGRFYRALHGPDVDFLASVAWLRFGDLFGETEGFVCAIMDEVMMTNNYRKYIVKDGTVDICRACHCPGESIRHIISGCSRLANGEYLHRHNLVARIIHQQLALKYNLVDAEVPYYKYVPDPVLENGHITLYWDRSIITDRTIVANKPDIVVIDRTERLTMIVDITVPHDENLVKAEKDKEIKYQDLAHEVVDMWEVDSAVIVPIVVTANGLIAKSLDHHLTRLSLGSWVKGLIQKAVLLDTARIVRKFLSLRP

SEQ ID NO: 13694 - protein, 1202 aa, Amphipyra berbera
MLTRSRTRTTEQRSARPPPPDSPLSSASQPPELGLPVTPAAAASSSSSDEYFSPPTSPRPVRRQGRGRPPNSLGPRGPLAPSRVLAAGGYVQRMKWTQSINENVMRAYYGSTEGGTNLTAYRVRMLTLFQELEPAINVSAQRLSDQVRVIQRNHRLDDAALDRLRLEVQNSCAIPGPSQTAVHQLINVAPPRSDRVDGDEDDGAVTVSSQYNDRLRSALEDAIRECRANPESRPRLPRLPMHNKNRALVCALDSLLASYFESSEDLGDTHSILYCAAVAVCRVANVKFNNSERATRSKPAIPAWQCRIERRIDETRALIGKLICFREGNTRPRVMRFVRRAFSGTGISPREYTSRATERINFLKQKVCAWASRIRRYKRRVERYTQNRMFQCDQRWVYRAWERPDQSVSGGRLPDDDAMSSFWRSIWSVPVIHTEGDWMRDIERTCESIEEMGEIVISPQDVAGAVRPLPNWKSPGPDGLHNFWIKWLRSSHARLASQFQSSLESGSLPQFLTTGVTHLLHKSGSTAEPKNYRPITCLPTVYKLLTSILRSKINTHIGNNSVLSSSQNGCRNGSRGTKELLLIDTAISQQVRRSQKSLSTCWIDYKKAYDSVPHTWLMRVLELYKINTTLSTFLKSCMGQWRTVLRYPGCQPIRGSGEPIRIERGIFQGDSLSPLWFCLALNPLSTLLEGSGLGYPLRRGGQVVSHLLYMDDLKLFAPTKLQLVDLLKVTETFSNSIRMEFGVDKCAVMHVRRGRIMESEGLQLSDSIHLRPLSANDTYKYLGMSEGLGISEADMKQSLRERFFGRLKKVLKSLLSGGNKVRAFNGWVMPILMYSFGILKWTQTELDALDRRVRTLLTANRMHHPRSSVMRLYIPRKCGGRGLLNAKTLHNREVCSLREFFLHADAGMHRDVVAVDKGLTPLSLARENWRKPVVLSTNDRREIWQSKELHGRFYRALHGPDVDFLASVSWLRFGDLFGETEGFVCAIMDEVIMTNNYRKYIVKDGTVDICRACHCPGESLRHIISGCSRLANGEYLHRHNQVARIIHQQLALKYNLVESEVPYYRYVPDPVLENGCITLYWDRSIITDRTIVANKPDIVVIDRSERRTMIVDVTIPHDGNLVKAEKDKQIKYLDLAHEVVNMWDVESATIVPIVVTANGLMAKSLDKHLMRLSLGGWIKGLIQKAVLLDTARIVRRFLSLEP

SEQ ID NO: 13695 - protein, 1212 aa, Amphipyra berbera
MLTRSRTKTQDTRTRPRPSASSLSSASQPPASSIVSDVTPAAAVASSSSDEFYSPPTSPPPPPPPPPRRGRRGRGRPPTCMGPRGPLASDRVPAPGGSVQRMRWTLTMNENCMRAYFGATEGGTNLTAYRGRMLSLFQVLEPTVNVSAQRLSDQVRVIQRDHRLTDAALDRLRSEVQSNRIISLQSQTAAQPQTPTVVPPLPIHADEESDDRVTNVCTQCNEQLRSALELAIREYRFTPPNIRPRIPRLPMHRKNRALMCALDSLLSSYFDNSENLEDTHSILYCAAVAACRVAHAKFDNNDRATRPKPAVPAWQCRIERRINEARALIGKLICFREGNTRPRVMRFVRRAFSGTDINPRDYLSRVTERIDFLKQKVYAWANRIRRYKRRVERYTQNRMFHSDERWVYRTWERPDHDVSDTHLPDNDVMNTFWRNIWSMPVTHTEGDWMQEVQRACEPIEEMGDITIVPQDVTSAVRPMANWKSPGPDGLHNFWLKWLRSSHARLASQFQSSLESGSLPEFVTTGVTHLLHKSGSTAEPKNCRPITCLPTVYKLLTSILRAKINSHIINNSIMSVSQNGCKNGSRGTKELLLIDMAISQQVRRSRKDLSTCWIDYKKAYDSVPHTWLMRVLELYKVNTTLCAFLTSCMGQWRTVLHYPGCRQIQGRGEPIRIERGIFQGDSLSPLWFCLALNPLSTLLEGSGLGYRLRRGGQVISHLLYMDDLKLFAPNNLQLMKLLKVTETFSNSIRMEFGVDKCAVMHVKRGGIMESVGTQLSDSIHLRPLSSTETYKYLGMSEALGINETDMKQSLRERFYGRLKKVLKSLLSGGNKVRAFNGWVMPVLMYSFGILKWTQTELDALDRRVRTLLTAYRMHHPRSSVMRLYIPRKCGGRGFLNAKTLHNREVCSLREYFLQADVGMHRDVVAVDKGFTPLSLAKENWRKPVVLDTNGRREVWQSKELHGRFYRALYGPDVDVLASVAWLRFGDLFGETEGFVCAIMDEDMMTNNYRKYIVKDGTVDICRACHCPGESIRHIISGCSRLANGEYLHRHNLVARIIHQQLALKYNLVDAEVPYYKYVPDPVLENGHITLYWDRSIITDRTIVANKPNIVVIDRSERLTIIVDITVPHDENLVKAEKDKEIKYQDLAHEVVDMWEVDSAVIVPIVVTANGLIAKSLDQHLTRVSLGSWVKGLIQKAVLLDTARIVRKFLSWRP

SEQ ID NO: 13696 - protein, 1211 aa, Amphipyra berbera
MLTRSRTKTQDTRTRPRPSASSLSSASQPPDSSIVSDVTPAAAVASSSSDEFYSPPTSPPPPPPPPRRGRRGRGRPPACMGPRGPPASDRVPAPGGSVQRMRWTLTMNENCMRAYFGATEGGTNLTAYRGRMLSLFQVLEPTVNVSAQRLSDQVRVIQRDHRLTDAALDRLRSEVQSNRIISLQSQTAAQPQTPTVVPPLPIHADEESDDRVTNVSTQCNEQLRSALELAIREYRFTPPNIRPRIPRLPMHRKNRALMCALDSLLSSYFDNSENLEDTHSILYCAAVAACRVAHSKFDNNDRATRPKPAVPAWQCRIERRINEARALIGKLICFREGNTRPRVMRFVRRAFSGTDINPRDYLSRVTERIDFLKQKVYAWANRIRRYKRRVERYTQNRMFHSDERWVYRTWERPDHDVSDTHLPDNDVMNTFWRNIWSMPVTHTEGDWMQEVQRACEPIEEMGDITIVPQDVTSAVRPMANWKSPGPDGLHNFWLKWLRSSHARLASQFQSSLESGSLPEFLTTGVTHLLHKSGSTAEPKNYRPITCLPTVYKLLTSILRAKINSHIINNSIMSVSQNGCKNGSRGTKELLLIDMAISQQVRRSRKDLSTCWIDYKKAYDSVPHTWLMRVLELYKVNTTLCAFLTSCMGQWRTVFHYPGCRQIQGRGEPIRIERGIFQGDSLSPLWFCLALNPLSTLLEGSGLGYRLRRGGQVISHLLYMDDLKLFAPNNLQLMKLLKVTETFSNSIRMEFGVDKCAVMHVKRGGIMESVGTQLSDSIHLRPLSSTETYKYLGMSEALGINETDMKQSLRERFYGRLKKVLKSLLSGGNKVRAFNGWVMPVLMYSFGILKWTQTELDALDRRVRTLLTAYRMHHPRSSVMRLYIPRKCGGRGFLNAKTLHNREVCSLREYFLQADVGMHRDVVAVDKGFTPLSLAKENWRKPVVLDTNGRREVWQSKELHGRFYRALYGPDVDFLASVAWLRFGDLFGETEGFVCAIMDEVMMTNNYRKYIVKDGTVDICRACHCPGESIRHIISGCSRLANGEYLHRHNLVARIIHQQLALKYNLVDAEVPYYKYVPDPVLENGHITLYWDRSIITDRTIVANKPDIVVIDRSERLTMIVDITVPHDENLVKAEKDKEIKYQDLAHEVVDMWEVDSAVIVPIVVTANGLIAKSLDQHLTRLALGSWVKGLIQKAVLLDTARIVRKFLSLRP

SEQ ID NO: 13697 - protein, 1203 aa, Amphipyra berbera
MLTRARARKQTAHPRSPDSSLSSASQPPESSPPVSAVTPAAAVASSSSDEYYSPPSSPPPVRRRGGARPPACLGPRGQPATNRVPAAGGNVSRMRWTQSINENVMRAYYGATEGGINLTAYRERMLFLFQVLEPAINVSAQRLSDQVRVVQRNRRLDDTVLERLRSEARNSQTVTFPVQAAVQMQPIAVPPRPIHVDGEGDGEAINVSNQCSEELRSALDDAILEFRTTPPEIRPRLPRLPMHGKNRALMCALDSLLSNYFDGSEDLADTHSILYCAAIAACRVAHVKFTENERATRPKPAVPAWQSRIERRIGGARVLIGKLICFREGNNRPRVMRFVRRAFSGTDISPRDYMSRVTERIDFLKQKVYAWANRIRRYKRRVERYTQNRIFQSDQRRVYRAWERPDPGGGDVRLPDDDALSSFWRSIWSVPIAHTEDGWMRDIEQVCEPIAEMEPITITPQDVADAARPLPNWKSPGPDGLHNFWLKWLRSSHARLASQFQSSLESGSLPQFLTTGVTHLLYKSGSTAEPKNYRPITCLPTVYKLLTSILRVKITTHIDNNCIMSASQNGCRKGSRGTKELLLIDMAISQQVRRSQKDLSTCWIDYKKAYDSVPHSWLMRVLELYKINTTLRTFLMSCMRHWRTVLRYPGCRRIRGSGEQIRIERGIFQGDSLSPLWFCLALNPLSTLLEGTGLGYQLRRGGQVISHLLYMDDLKLFAPTDLQLMELLKVTENFSNSIRMEFGVDKCAVMHVKRGRIAESEGIQLPNSVQLRSLSPTETYKYLGMSEALGISETDMRQSLRERFFGRLNKLLKSLLSGGNKVRAFNGWVMPVLMYSFGTLKWTQADLDALDRRVRALLTAHRMYHPRSSVMRLYIPRKCGGRGFLNAKTLHNREVYSLREYFLQAEGVMHRDVVAVDKGFTPLALARENWRKPAVLSTNDREVVWQSKELHGRYYRALHGPDVDFSASVSWLRSGNLFGETEGFVCAIMDEVMMTNNYRKYIVKDGTVDICRACHRPGESIRHIVSGCSRLANGEYLHRHNLVARIIHQQLALKYNLVESEVPYYRYVPDPVLENGHATLYWDRSIITDRTIVANKPDIVVIDRSERRTMIVDITVPHDENLVKAEKDKQIKYLDLAHEVVGMWDVDSAVIVPIVVTANGIIAKSLDIHLMRLSLGGWIKGLIQRAVLLDTARIVRRFLSLEP

SEQ ID NO: 13698 - protein, 1197 aa, Noctua janthe
MLTRSATRRARLSPPDPSLSSASPPPESSPIVSAVTPAVAVASSSSDEYFSPPTTPPPVRRRGGRRPPDGLGPRGPPASDRVPAPGGSVPRMRWTQSINANVMRAYYGATEGGNNLTAYRVRMLSLFQVLEPAVNVSAQRLSDQVRVIQRNGMLDDTVLDRLRTEMQSSHVIATPPQTVVPPQSTIIPTHDNNVSNDMVTNVSTQCNEEMRCALEGAIREYRFMQPDLRPRVPRLPMHNKNKVLVAVLDSQLSNYFDNCENLTDAHSVLYCAAVAACRVAHVKFSDDRATRPKPAVPSWQYRIERRIGEARALIGKLICFREGNTRPRVMRFVRRAFSGTDISARDYMSRVTERIDFLKQKVYAWANRIRRYKRRVDRYTQNRTFQRDERWVYRAWERPDQGVADTHLPDDDAMCSFWRSIWSVPVSHTEGEWTREVERACDLVPEMGAITISPQDVVRAVRPLPNWKSPGPDGLHNFWIKWFTRSHARLAILFQSALESGSLPEFLTTGITHLLHKSGSTAEPKNYRPIACLPTVYKVLTSILRAKINKHIDDNSVMSASQNGCRNASRGTKELLLIDMAISQQVRRSRRDLSTCWIDYKKAYDSVPHTWLMRVLELYKVDSTLRIFLMSCMGQWRTVLRYPGCRQIQRNSEPIRIERGIFQGDSLSPLWFCLALNPLSTLLEDSGLGYRLRRGGQVISHLLYMDDLKLFAPNDLQLMELLKVTETFSSAIRMEFGVDKCAVMHVKRGEIVESVGTQLSDSINLRSLSATETYKYLGMSEALGINVADMKQSLKERFFGRLKKVFNSLLSGGNKVRAFNGWVMPVLMYSFGILKWTQTELDALDRRVRTLLTTYRMHHPRSSVMRLYIPRRCGGRGFLNAKTLHNREIYSLREYFLETDVGMHRDVVAVDKGLTPLSLAKENWRKPVVLDTNDRMEVWQSKELHGRFFRALHGPDVDLPASVAWLRSGDLFGETEGFVCAIMDEVMMTNNYRRFIVKDGTVDICRACHRPGESIRHIISGCSRLANGEYLHRHNLVARIIHQQLALKYNLVESEVPYYKYVPDPVLENGNITLYWDRSIVTDRTIVANKPDIVVVDRSERRAMIVDITVPHDGNLVKAEKDKQIKYLDLAHEVVDMWDVDSAIIVPIVVSAHGLIAKSLDQYLRRLSLGSWIKGLIQKAVLLDTARIVRRFLSLEP

SEQ ID NO: 13699 - protein, 1197 aa, Noctua janthe
MLTRSATRRARLSPPDPSLSSASPPPESSPIVSAVTPAVAVASSSSDEYFSPPTTPPPVRRRGGRRPPDGLGPRGPPASDRVPAPGGSVPRMRWTQSINANVMRAYYGATEGGNNLTAYRVRMLSLFQVLEPAVNVSAQRLSDQVRVIQRNGMLDDTVLDRLRTEMQSSHVIATPPQTVVPPQSTIIPTHDNNVNNDMVTNVSTQCNEEMRCALEGAIREYRFMQPDLRPRVPRLPMHNKNKVLVAVLDSQLSNYFDNCENLTDAHSVLYCAAVAACRVAHVKFSDDRATRPKPAVPSWQYRIERRIGEARALIGKLICFREGNTRPRVMRFVRRAFSGTDISARDYMSRVTERIDFLKQKVYAWANRIRRYKRRVDRYTQNRTFQRDERWVYRAWERPDQGVADTHLPDDDAMCSFWRSIWSVPVSHTEGEWTREVERACDLVPEMGAITISPQDVVRAVRPLPNWKSPGPDGLHNFWIKWFTRSHARLAILFQSALESGSLPEFLTTGITHLLHKSGSTAEPKNYRPIACLPTVYKVLTSILRAKINKHIDDNSVMSASQNGCRNGSRGTKELLLIDMAISQQVRRSRRDLSTCWIDYKKAYDSVPHTWLMRVLELYKVDSTLRIFLMSCMGQWRTVLRYPGCRQIQRNSEPIRIERGIFQGDSLSPLWFCLALNPLSTLLEDSGLGYRLRRGGQVISHLLYMDDLKLFAPNDLQLMELLKVTETFSSAIRMEFGVDKCAVMHVKRGEIVESVGTQLSDSINLRSLSATETYKYLGMSEALGINVADMKQSLKERFFGRLKKVFNSLLSGGNKVRAFNGWVMPVLMYSFGILKWTQTELDALDRRVRTLLTTYRMHHPRSSVMRLYIPRRCGGRGFLNAKTLHNREIYSLREYFLETDVGMHRDVVAVDKGLTPLSLAKENWRKPVVLDTNDRMEVWQSKELHGRFFRALHGPDVDLPASVAWLRSGDLFGETEGFVCAIMDEVMMTNNYRRFIVKDGTVDICRACHRPGESIRHIISGCSRLANGEYLHRHNLVARIIHQQLALKYNLVESEVPYYKYVPDPVLENRNITLYWDRSIVTDRTIVANKPDIVVVDRSERRAMIVDITVPHDGNLVKAEKDKQIKYLDLAHEVVDMWDVDSAIIVPIVVSAHGLIAKSLDQYLRRLSLGSWIKGLIQKAVLLDTARIVRRFLSLEP

SEQ ID NO: 13700 - protein, 1045 aa, Noctua janthe
MLDDTVLDRLRTEMQSSHVIATPPQTVVPPQSTIIPTHDNNVSNDMVTNVSTQCNEEMRCALEGAIREYRFIQPDLRPRVPRLPMHNKNKVLVAVLDSQLSNYFDNCENLTDAHSVLYCAAVAACRVAHVKFSDDRATRPKPAVPSWQYRIERRIGEARALIGKLICFREGNTRPRVMRFVRRAFSGTDISARDYMSRVTERIDFLKQKVYAWANRIRRYKRRVDRYTQNRTFQRDERWVYRAWERPDQGVADTHLPDDDAMCSFWRSIWSVPVSHTEGEWTREVERACDLVPEMGAITISPQDVVRAVRPLPNWKSPGPDGLHNFWIKWFTRSHARLAILFQSALESGSLPEFLTTGITHLLHKSGSTAEPKNYRPIACLPTVYKVLTSILRAKINKHIDDNSVMSASQNGCRNGSRGTKELLLIDMAISQQVRRSRRDLSTCWIDYKKAYDSVPHTWLMRVLELYKVDSTLRIFLMSCMGQWRTVLRYPGCRQIQRNSEPIRIERGIFQGDSLSPLWFCLALNPLSTLLEDSGLGYRLRRGGQVISHLLYMDDLKLFAPNDLQLMELLKVTETFSSAIRMEFGVDKCAVMHVKRGEIVESVGTQLSDSINLRSLSATETYKYLGMSEALGINVADMKQSLKERFFGRLKKVFNSLLSGGNKVRAFNGWVMPVLMYSFGILKWTQTELDALDRRVRTLLTTYRMHHPRSSVMRLYIPRRCGGRGFLNAKTLHNREICSLREYFLETDVGMHRDVVAVDKGLTPLSLAKENWRKPVVLDTNDRMEVWQSKELHGRFFRALHGPDVDLPASVAWLRSGDLFGETEGFVCAIMDEVMMTNNYRRFIVKDGTVDICRACHRPGESIRHIISGCSRLANGEYLHRHNLVARIIHQQLALKYNLVESEVPYYKYVPDPVLENGNITLYWDRSIVTDRTIVANKPDIEVVDRSERRAMIVDITVPHDGNLVKAEKDKQIKYLDLAHEVVDMWDVDSAIIVPIVVSAHGLIAKSLDQYLRRLSLGSWIKGLIQKAVLLDTARIVRRFLSLEP

SEQ ID NO: 13701 - protein, 1197 aa, Noctua janthe
MLTRSATRRARLSPPDPSLSSASPPPESSPIVSAVTPAVAVASSSSDEYFSPPTTPPPVRRRGGRRPPDGLGPRGPPASDRVPAPGGSVPRMRWTQSINANVMRAYYGATEGGNNLTAYRVRMLSLFQVLEPAVNVSAQRLSDQVRVIQRNGMLDDTVLDRLRTEMQSSHVIATPPQTVVPPQSTIIPTHDNNVSNDMVTNVSTQCNEEMRCALEGAIREYRFMQPDLRPRVPRLPMHNKNKVLVAVLDSQLSNYFDNCENLTDAHSVLYCAAVTACRAAHVKFSDDRATRPKPAVPSWQYRIERRIGEARALIGKLIYFREGNTRPRVMRFVRRAFSGTDISARDYMSRVTERIDFLKQKVYAWANRIRRYKRRVDRYTQNRTFQRDERWVYRAWERPDQGVADTHLPDDDAMCLFWRSIWSVPVSHTEGEWTREVERACDLVPEMGAITISPQDVVRAVRPLPNWKSPGPDGLHNFWIKWFTRSHARLAILFQSALESGSLPEFLTTGITHLLHKSGSTAEPKNYRPIACLPTVYKVLTSILRAKINKHIDDNSVMSASQNGCRNGSRGTKELLLIDMAISQQVRRSRRDLSTCWIDYKKAYDSVPHTWLMRVLELYKVDSTLRIFLMSCMGQWRTVLRYPGCRQIQRNSEPIRIERGIFQGDSLSPLWFCLALNPLSTLLEDSGLGYRLRRGGQVISHLLYMDDLKLFAPNDLQLMELLKVTETFSSAIRMEFGVDKCAVMHVKRGEIVESVGTQLSDSINLRSLSATETYKYLGMSEALGINVADMKQSLKERFFGRLKKVFNSLLSGGNKVRAFNGWVMPVLMYSFGILKWTQTELDALDRRVRTLLTTYRMHHPRSSVMRLYIPRRCGGRGFLNAKTLHNREIYSLREYFLETDVGMHRDVVAVDKGLTPLSLAKENWRKPVVLDTNDRMEVWQSKELHGRFFRALHGPDVDLPASVAWLRSGDLFGETEGFVCAIMDEVMMTNNYRRFIVKDGTVDICRACHRPGESIRHIISGCSRLANGEYLHRHNLVARIIHQQLALKYNLVESEVPYYKYVPDPVLENGNITLYWDRSIVTDRTIVANKPDIVVVDRSERRAMIVDITVPHDGNLVKAEKDKQIKYLDLAHEVVDMWDVDSAIIVPIVVSAHGLIAKSLDQYLRRLSLGSWIKGLIQKAVLLDTARIVRRFLSLEP

SEQ ID NO: 13702 - protein, 1200 aa, Mythimna ferrago
MLTRAAARRARPPPPASSLSSASPPPEPSPIVSAVTPAVAAASSSSDEYYSPPTTPPPTRRRGGRRPPDCLGPRGPPASDRVPAPGGSVQRMRWTQSINENVMRSYYGATEGGNNLTAYRVRMLSLFQVLEPAVNVSAQRLSDQVRVILRNHMLDDTVLDRLRTEMSDRVITPPSQPVVPAVVPPSSYISFHTDEVSSDTVTNVSNQCNSELRSALECVIREYRNIPPELRPRIPRLPMCNKNRALVAALDSQLSNYFDDCEDLTDTHSIMYCAAVAACRVAHVEFPNSDVATRPKPAVPAWQCRIERRIGGARALIGKLICFREGNTRPRVMRFVRRAFSGTDISPRDYMSRVTERIDFLKQKVYAWANRIRRYKRRVERNTQNRTFRSNESWVYRAWERPDQGVTDARLPDDDAMSSFWRSIWSVPVSHTEGDWTREVERACDPIPQMGAIDISPQDVARAVRPLPNWKSPGPDGLHNFWIKWFTRSHARLAYQFQSALESGSLPQFLTTGITHLLHKSGSTAEPKNYRPITCLPTVYKVLTSILRSKINSHIDENSIMSPSQNGCRNGSRGTKELLLIDMTISQQVRRSRKDLSTCWIDYRKAYDSVPHTWLMRVLELYKIDTTLRTFLMSCMRQWSTVLRYPGCRNIQRNSEPVRIERGIFQGDSLSPLWFCLALNPLSTLLENSGLGYRLKRGGQVISHLLYMDDLKLFAPNNLQLMELLKVTEIFSSAIRMEFGVDKCAVMHVKRGEVVESVSTQLTDSINLRSLSPTETYKYLGMSEALGISITGMKQSLRERFFGRLKKVFNSLLSGGNKVRAFNGWVMPVLMYSFGVLKWTQTELDALDRRVRTLLTAYRMHHPRSSVMRLYIPRKCGGRGFLNAKTLHNREVCSLREYFLAADVGMHRDVVAVDKGLTPLSLANENWRKPIVLDTNDRREVWQSKELHGRFFRALHGPDVDQLASVAWLRFGDLFGETEGFVCAIMDEVIMTNNYRRFIVKDGTVDICRACHRPGESIRHIISGCSRLANGEYLHRHNLVARIIHQQLALKYSLVESEVPYYRYEPDPVLDNGHITLYWDRPIITDRTIVANKPDIVVVDRSERRAMIVDISVPHDENLVKAEKDKQIKYIDLAREVVDMWEVDSAVIVRIVVSANGLIAKSLDQHLRRLSLGDWIKGLIQKAVLLDTARIVRRFLSLEP

SEQ ID NO: 13703 - protein, 1197 aa, Mythimna ferrago
MLTRSRARSQIAQPTSSGSSLSSASQPPGPAPAVSPEIPVAAVASSSSDEYFSPPTTPPPARRRGRGRPPACLGPRGPPASDRVLAAGGSVQRMRWTQSINENVMRSYFGATEGGTNLTAYRGRMLSLFQVLEPAVNVSAQRLSDQVRVIQRNRMLDDAVLDRLRLESRNGRVSPISPPAAVLRQPSVSPRPDHVGEDDDDGAISVSTQCNARLRSALEDAFREYRSIELRPRLPRLPMHRKNRALVCALDSQLSNCFDSSEDLTDTHSILYCAAAAACRVAHVKIPNNDRATRPAKPAWQCRIERRIGEARALIGKLICFREGNTRPRVMRFVRRAFSGTDISPRDYLPRITERIDFLKQKVYAWANRIRRYKRRVERYTQNHTFQSNERWVYRAWERPDQSVIDTRLPVDDAMYSFWRSIWSVPVNHTEGDWTREIERVCELVPEMGAINISPQDVARAVRPLPNWKSPGPDGLHNFWLKWFQSSHARLAFQFQSALESGSLPQFLTTGITHLLHKSGSTAEPKNYRPITCLPTVYKVLTSILRAKINNHIETNSIMSASQNGCRNGSRGTKELLLIDVAISQQVRRSRRDLSTCWIDYKKAYDSVPHTWLMRVLELYKVDATLRAFLMSCMGQWRTVLHYPGCRRVSENSEPLRIERGIFQGDSLSPLWFCLALNPLSTLLEASGLGYRLRREGQVISHLLYMDDLKLFASNNLQLMELLKVTETFSSAIRMEFGLDKCAVMHVKRGEIMESVGTQLSDSIHLRSLCSTETYKYLGMSEALGINAADVKQSLRERFFGRLNKVLNSLLSGGNKVRAFNGWVMPVLMYSFGILKWTQTELDALDRRVRTLLTANRMHHPRSSVMRLYIPRKCGGRGFLNAKTLHNREVCSLREYFLETDVGMHRDVVAVDKGLTPLSLANENWRKPIVMDTNERKEVWKGKELHGRFYRALHGPDVDLLASVSWLRFGDLFGETEGFVFAIMDEVMMTNNYRKYIVKDGTVDICRACHRPGESIRHIISGCSHLANGDYLHRHNLVARIIHQQLALKYNLVESEVPYYRYVPDPVLENGSVTLYWDRSIITDRTIVANKPDIVVIDRLERRTMIVDIAVPHDENLVKAEKDKQTKYLDLAREVVDMWEVDGAIIVPIVVTANGLIAKSLDQHLRRLSLGSWIKGLIQKAVLLDTARIVRRFLSQP

SEQ ID NO: 13704 - protein, 942 aa, Mythimna ferrago
MSALAPPIRRSIMYCAAVAACRVAHVKFPNSDVATRPKPAVPAWQCRIERRIGGARALIGKLICFREGNTRPRVMRFVRRAFSGTDISPRDYMSRVTERIDFLKQKVYAWANRIRRYKRRVERYTQNRTFRSNERWVYRAWERPDQGVTDARLPDDDAMSSFWRSIWSVPVSHTEGDWIRGVERACDPIPQMGAIGISPQDVARAVRPLPNWKSPGPDGLHNFWIKWFTRSHARLAYQFQSALESGSLPQFLTTGMTHLLHKSGSTAEPKNYRPITCLPTVYKVLTSILRSKINNHIDENSIMSPSQNGCRNGSRGTKELLLVDMTISQQVRRSRKDLSTCWIDYKKAYDSVPHTWLMRVLELYKIDTTLRTFLMSCTRQWSTVLCYPGCRNIQRNSEPVRIKRGIFQGDSLSPLWFCLALNPLSTLLENSGLGYWLKRGGQVISHLLYMDDLKLFAPNNLQLMELLKVTETYSSAIRMEFGVDKCAVMHVKRGEVVESVSTRLTDSINLRSLSPTETYKYLGMSEALGISITNMKQSLKERFFGRLKKVFNSFLSGGNKVRAFNGWVMPVLMYSFGVLKWTQTELDALDRRVRTLLTAYRMHHPRLSVMRLYIPRKCGGRGFLNAKTLHNREVCSLREYFLAADVGMHRDVVAVDKGLTPLSLAIENWRKPIVLDTNDRREVWQSKELHGRFFRALHGPDVDQLASVAWLRFGDLFGETEGFVCAIMDEVIMTNNYRRFIVKDGTVDICRACHRPGESIRHIISGCSRLANGEYLHRHNLVARIIHQQLALKYSLVESEVPYYRYEPDPVLDNGHITLYWDRPIITDRTIVANKPDIVVVDRSERRAMIVDISVPHDENLVKAEKDKQIKYIDLAREVVDMWEVDSAIIVPIVVSANGLIAKSLDQHLRRLSLSDWIKGLIQKAVLLDTARIVRRFLSLEP

SEQ ID NO: 13705 - protein, 1109 aa, Mythimna ferrago
MRWTQSTNENVMRAYYGATEGGNNLTAYRVRMLSLFQVLEPAVNVSAQRLSDQVRVIQRNHMLDDTVLDRLRTEMSDRVITAPSQPVVPVVAPPPSHISFHTDEVSTDTVTNVSTQCNNELRSALECAIREYRNMPLEFRPRLPRLPMRNKNKALVAALDSQLSNYFDDCEDLTDTHSIMYCAAVAACRVAHVKFPNSDVATRPKPAVPAWQCRIERRIGGARALIGKLICFREGNTRPRVMRFVRRAFSGTDINPRDYMSRVTERIDFLKQKVYAWANRIRRYKRRVGRYTQNSTFRSNERWVYRAWERPDQGVTDTRLPDDDAMCLFWRNIWSVPVSHTEGGWTREVERACESITEMGAITISPQDVARAVRPLPNWKSPGPDGLHNFWIKWLQRSHARLASQYQAALESGSLPEFLTTGVTHLLHKSGSTAEPKNYRPITCLPTVYKVLTSILRAKINHHVDNNAIMSASQNGCRNGSRGTKELLLIDMAISQQVRRSRKDLSTCWIDYKKAYDSVPHTWLMRVLELYKVDATLRTFLMSCMRQWRTVLRYPGCRNIQRNSEPVRIERGIFQGDSLSPLWFCLALNPLSTLLENSGLGYRLKRGGQAISHLLYMDDLKLFAPNNLQLMELLKVTETFSSAIRMEFGVDKCAVMHIKRGEIVESVGIQLSDSIHLRSLSPTETYKYLGMSEALGINATDMKQSLRERFFGRLKKVLNSLLSGGNKVRAFNGWVMPVLMYAFGVLKWTQTELDALDRRVRTLLTAYRMHHPRSSVMRLYIPRKCGGRGFLNAKTLHNREVCSLREYFLAADGGMHRAVVAVDKGLTPLSLANENWRKPVVLDTNVRKEVWQSKELHGRFFRALHGPDVDQLASVAWLRVGDLFGETEGFVCAIMDEVIMTNNYRRFIVKDGTVDICRACHRPGESIRHIISGCSRLANGEYLHRHNLVARIIHQQLALKYSLVESEVPYYRYVPDPVLDSGDITLYWDRSIITDRTIVANKPDIVVVDRRERRAMIVDISVPHDENLVKAEKDKQIKYIDLAREVVDMWNVDSAIIVPIVVSANGLIAKSLDQHLRRLSLSGWIKGLIQKAVLLDTARIVRRFLSLEP

SEQ ID NO: 13706 - protein, 1200 aa, Mythimna ferrago
MLTRAAARRARPPPLASSLSSASLPPEPSLTVSAVTPAAAAASSSSDEYYSPPTTPPPARRRGGRRPPACLGPRGPPVSDRVPAAGGSVPRMRWTQSTNENVMRAYYGATEGGNNLTAYRVRMLSLFQVLEPAVNVSAQRLSDQVRVIQRNHMLDNTVLDRLRTEMSNRVITPPSQPVVPVVVPQSSHISLHTDEVSTDTVTNVSTQCNNELRSALECAIREYRNMPLELRPRLPRLPMHNKNKALVAALDSQLSNYFDDCEDLTDTHSIMYCAAVAACRVAHVKFPNSDVATRPKPAVPAWQYRIERRIGGARALIGKLICFREGNTRPRVMRFVKRAFSGTGISPRDYMSRVTERIDFLKQKVYAWANRIRRYKRRVERYIQNSTFRSNERWVYRAWERPDQGVTDTRPPDDDAMCSFWRNIWSVPVSHTEGGWTREVERACESVTEMGAITISPQDVARAVRPLPNWKSPGPDGLHNFWIKWLQRSHARLASQYQAALESGSLPEFLTTGVTHLLHKSGSTAEPKNYRPITCLPTVYKVLTSILRAKINHHVDNNAIMSASQNGCRNGSRGTKELLLIDMAISQQVRRSRKDLSTCWIDYKKAYDSVPHTWLMRVLELYKVDATLRTFLMSCMRQWRTVLRYPGCRNIQRNSEPVRIERGIFQGDSLSPLWFCLALNPLSTLLENSGLGYRLKRGGQVISHLLYMDDLKLFAPNNLQLMELLKVTETFSSAIRMEFGVDKCAVMHIKRGEIVESVGIQLSDSIHLRSLSPTETYKYLGMSEALGINATDMKQSLRERFFGRLKKVLNSLLSGGNKVRAFNGWVMPVLMYAFGVLKWTQTELDALDRRVRTLLTAYRMHHPRSSVMRLYIPRKCGGRGFLNAKSLHNREVCSLREYFLAADGGMHRDVVAVDKGLTPLSLANENWRKPVVLDTNVRREVWQSKELHGRFFRALHGPDVDQLASVAWLRVGDLFGETEGFVCAIMDEVIMTNNYRRFIVKDGTVDICRACHRPGESIRHIISGCSRLANGEYLHRHNLVARIIHQQLALKYSLVESEVPYYRYVPDPVLDSGDITLYWDRSIITDRTIVANKPDIVVVDRSERRAMIVDISVPHDENLAKAEKDKQIKYIDLAREVVDMWEVDSAIIVPIVVSANGLIAKSLDQHLRRLSLGDWIKGLIQKAVLLDTARIVRRFLSLEP

SEQ ID NO: 13707 - protein, 1048 aa, Mythimna ferrago
MLDDTVLDRLRTEMSNHVIAPSSQPVVPVMVPPSNHVANPADVESTDMVIQVSTQCTNELRSALECAIREYRNMPSVLRPRLPRLPMHNKNKALVAALDMQLTNYFDNCKDLTDAHSIMYCAAVAACRVAHVKFPNSDVATRPKPAVPAWQCRIERRIGEARALIGKLICFREGNTRPRVMRFVRRAFSGTDICPRDYMLRVTERIDFLKQKVYAWANRIRRYKRRVERYTQNRAFQSNERWVYRAWERPDQGVTDTRLPDDDAMCSFWRNIWSVPVSHTEGGWTREVEQACEPITEMGAITISPQDVARAVRPLPNWKSPGPDGLHNFWIKWLQRSHACLASQYQAALESSSLPEFLTTGVTHLLHKSGSTAEPKNYRPITCLPTVYKVLTSILRHKINNHIDNNSIMSASQNGCRKGSRGTKELLLIDMAISQQVRRSRKDLSTCWINYKKAYDSVPHTWLMRVLELYKIDATLRTFLMSCMRQWRTVLRYPGCRNIQRSSEPVRIERGIFQGDSLSPLWFCLALNPLSTLLENSGLGYQLKRGGQVTSHLLYMDDLKLFAPNKLQLMELLKVTETFSSAIRMEFGVDKCAVMHVKRGEIVESVSTQLSDSISLRSLSATETYKYLGMSEALGINATDMKQSLRERFFGRLKKVFNSLLSGGNKVRAFNGWVMPVLMYSFGVLKWTQTELDALDRRVRSLLTANRMHHPRSSVMRLYIPRKCGGRGFLNAKTLHNREVCSLREYFLAADVGMHRDVVAVDKGLTPLSLANENWRKPVVLDTNDRKEVWQSKELHGRFFRALHGPDVDQLASVAWLRVGDLFGETEGFVCAIMDEVIMTKNYRRFIVKDGTVDICRACHRPGESIRHIISGCSRLANGEYLHRHNLVARIIHQQLALKYSLVESEVPYYRYVPDPVLDNGDITMYWDRSIITDRTIVANKPDIVVVDRSERRAMIVDISVPHDENLVKAEKDKQIKYIDLAREVVDMWDVDSAIIVPIVVSGNGLIAKSLDQHLRRLALGSWIKGLIQRAVLLDTARIVRRFLSLEP

SEQ ID NO: 13708 - protein, 1192 aa, Eilema sororculum
MLTRAQATRNRSAPTTSPDSSLSSAAQPPTVEPAASSSSSSDEFFSPPTSPTPERRPGRGRPPTCLGPRRPPASNRAPAAGGNVHRMRWTNSINENVMRAYFAATEGGTNLSAYRTRMLPLFQALEPTINTSAQRLSDQVRVIQRNRMLNETVLETLRLECLRNICVTPAPAPAPASTAERNDDTRVAPDDTPIPVSIQYNEEIKEALECALREYRSMPVHVRPRLPRLPIHRRNIALVSALDSLLPRYLENSENLGDTHSILYCTAVAACRMAGAKFPIKDPAIRPKFTIPAWQCRIERRVAEARVLIGKLICFRSGNTRPRVMRYVTRAFAETDISPQDYTSRVTERIDFLKQKVCAWANRIRRYKKRVDRYTVNRMFQRDQRWVYRSWERTDESVDDVRRPDAEATNAFWRSIWSVPVSHTEGDWMREVERACETIPEMEEIYIDATDVDCAVRSLSNWKSPGPDGLHNFWLKWLRSSHVVLASQFQSAIESGTLPAFMTTGVTHLLHKTGSTLEPNNYRPITCLPTVYKLLTSILRAKINNHINNNSIMCASQNGCRNGARGTKELLLIDMAISQQARRNRKDLTACWIDYKKAFDSVPHTWLLRVLELYKVNTTLCTFLRSCMRQWRTVLFYPGCRQALGGGVPITIERGIFQGDSLSPLWFCLALNPLSTLLVNSGLGYRLRREGQMVSHLFYMDDLKLFAHTNPQLIALLKVTETFSNSIKMAFGVDKCAVIHVKRGRVVESEGIQLSDSTNLRSLLVTETYKYLGMSQALCINEVDMKQLLQERFFGRLKKVLNSLLSGGNKVRACNSWVMPLLMYSFGILKWTQTELDTIDRKVRTQLTAFRMHHPRSSVMRLYIPRKCGGRGFLNAKTLHNREVCNLRDYFLKSNVDMHRDVVNVDTGLTPLGLAKENWRRPTIVSTDNRREVWQSKELHGRFYRALHRPEVDLLASVAWLRFSDLFGETEGFVCAIADEVIKTNNYRKYIMRDGTIDICRACHQPGESLRHITSGCSRLANGEYLHRHNQVARIIHQRLALKYNLVEVEVPYYRYVPEPVQENSHITLYWDRSIITDRTVVANKPDIVVIDRSERRALIVDVTIPHDENLVKAETDKQVKYLDLAHEVVDMWNVDSAIIVPIVVSVNGLIAKSLDQHLKRLGLDGWVKGQMQKAVLLDTARIVRKFLSLEP

SEQ ID NO: 13709 - protein, 1192 aa, Eilema sororculum
MLTRAQAIRNRSAPITSPDSSLSSAAQPPAVEPAASSSSSSDEFFSPPTSPTPVRRPGRGRPPTCLGPRRPPASNGAPATGGDVHRMRWTNSINENVMRAYFAATEGGTNLSAYRTRMLPLFQALEPSINVSAQRLSDQVRVIQRNRMLNETVLETLRLECLRNICVTPAPVPVPASTVELNDDTCVAPDDTPIPVSIQYNEEIKEALECALREYRSMPVHVRPRLPRLPIHRRNIALVSALDSLLPRYLENSENLGDTHSILYCTAVVACRMAGAKFPIKDPAIRPKSAIPAWQCRIERRVTEARVLIGKLICFRSGNTRPRVMRYVTRAFAGTDISPQDYTSRVTERIDFLKQKVYAWANRIRRYKKRVDRYTVNRMFQRDQRWVYRSWERTEESVDDVRRPDAEVTNAFWRSIWSVPVSHTEGDWMHEVERACETIPEMEEINIDAIDVDCAVRSLSNWKSPGPDGLHNFWLKWLRSSHVVLASQFQSAVESGTLPAFMTTGVTHLLHKTGSTLEPNNYRPITCLPTVYKLLTSILRAKINNHINNNSIMCASQNGCRNGARGTKELLLIDMAISQQARRNRKDLTACWIDYKKAFDSVPHTWLLRVLELYKVNTTLCTFLRSCMGQWRTVLFYPGCRQALGGGVPITIERGIFQGDSLSPLWFCLALNPLSTLLVNSGLGYRLRREGQMVSHLFYMDDLKLLAHTNPQLITLLKITETFSNSIKMTFGVDKCAVIHVKRGRVVESEGIQLSDSTNLRSLLVTETYKYLGMSQALCINEVDMKQMLQERFFGRLKKVLNSLLSGGNKVRACNSWVMPLLMYSFGILKWTQTELDTIDRKVRTQLTAFRMHHPRSSVMRLYIPRKCGGRGFLNAKTLHNREVCNLRDYFLKSNVDMHRDVVNVDTGLTPLGLAKENWRRPTIVSTDSRREVWQSKELHGRFYRALHRPEVDLLASVSWLRFSDLFGETEGFVCAIADEVIKTNNYRKYIMRDGTIDICRACHQPGESLRHITSGCSRLANGEYLHRHNQVARIIHQRLALKYNLVEFEVPYYRYVPEPVLENTHITLYWDRSIITDRTVVANKPDIVVIDRSERRALIVDVTIPHDENLVKAEKDKQVKYLDLAHEVVDMWNVDSAIIVPIVVSVNGLIAKSLDQHLKRLGLDGWVKGQMQKAVLLDTARIVRKFLSLEP

SEQ ID NO: 13710 - protein, 975 aa, Eilema sororculum
MPIHVRPRLPRLPIHRRNIALVSALDSLLPKYLENSENLGDTHSILYCTAVAACRMAGAKFPIKDPAIRPKPAIPAWQCRIERRVAKARVLIGKLICFRSGNTRPRVMRYVTRAFAGTNISPQDYTSRVTERIDFLKQKVCAWANRIRRYKKRVDRYTVNRMFQRDQRWVYRSWERTDESVDDLRRPDAEATNAFWRSIWSVPVSHTEGDWMREVERACETIPEMEEIYIDATDVDCAVRSLSNWKSPGPDGLHNFWLKWLRSSHVVLASQFQSAIESGTLPAFMTTGVTHLLHKTGSTLEPNNYRPITCLPTVYKLLTSILRAKINNHINNNSIMCTSQNGCRNGARGTKELLLIDMTISQQARRNRKDLVACWIDYKKAFDSVPHTWLLRVLELYKVNTTLCTFLRSCMGQWRTVLLYPGCRQALGSGEPITIERGIFQGDSLSPLWFCLALNPLSTLLVNSGLGYRLRREGQMVSHLFYMDDLKLFAHTNPHLIALLKVTETFSNSIKMAFGVDKCAVIHVKRGRVVESEGIQLSDSTNLRSLLVTETYKYLGMSQALCINEVGMKQMLQERFFGRLKKVLNSLLSGGNKVRACNSWVMPLLMYSFGILKWTQTELDTIDRKVRTQLTAFRMHHPRSSVMRLYIPRKCGGRGFLNAKTLHNREVCNLRDYFLKSNVDMHRDVVNVDTGLTPLGLAKENWRRPTIVGTDSRREVWQSKELHGRFYRALHRPEVDLLASVSWLRFGDLFGETEGFVCAIADEVIKTNNYRKYIMRDGTIDICRACHQPGESLRHITSGCSRLANGEYLHRHNQVARIIHQRLALKYNLVEVEVPYYRYVPEPVLENSHITLYWDRSIITDRTVVANKPDIVVIDRSERRALIVDVTIPHDENLVKAEKDKQVKYLDLAHEVVDMWNVDSAIIVPIVVSVNGLIAKSLDQHLKRLGLDGWVKGQMQKAVLLDTARIVRKFLSLEP

SEQ ID NO: 13711 - protein, 975 aa, Eilema sororculum
MPIHVRPRLPRLPIHRRNIALVSALDSLLPKYLENSENLGDTHSILYCTAVAACRMAGAKFPIKDPAIRPKPAIPAWQCRIERRVAEARVLIGKLICFRSGNTRPRVMRYVTRAFAGTNISPQDYTSRVTERIDFLKQKVCAWANRIRRYKKRVDRYTVNRMFQRDQRWVYRNWERTDESVDDVRRPDAEATNAFWRSIWSVPVSHTEGDWMREVERACEPIPEMEEIYIDATDVDCAVRSLSNWKSPGPDGLHNFWLKWLRSSHVVLASQFQSAVESGTLPVFMTTGVTHLLHKTGSTLEPNNYRPITCLPTVYKLLTSILRAKINNHINNNSIMCASQNGCRNGARGTKELLLIDMTISQQARRNRKDLAACWIDYKKAFDSVPHTWLLRVLELYKVNTTLCTFLRSCMGQWRTVLFYPGCRRALGSGEPITIERGIFQGDSLSPLWFCLALNPLSTLLVNSGLGYRLRREGQMVSHLFYMDDLKLFAHTNPQLIALLKVTETFSNSIKMAFGVDKCAVIHVKRGRVVESEGIQLSDSTNLRSLLVTETYKYLGMSQALCIKEVDMKQMLQERFFGRLKKVLNSLLSGGSKVRACNSWVMPLLMYSFGILKWTQTELDTIDRKVRTQLTAFRMHHPRSSVMRLYIPRKCGGRGFLNAKTLHNREVCNLRDYFLKSNVEMHRDVVNVDTGLTPLGLAKENWRRPTIVGTDSRREVWQSKELHGRFYRALHRPEVDLLASVSWLRFSDLFGETEGFVCAIADEVIKTNNYRKYIMRDGTIDICRACHQPGESLRHITSGCSRLANGEYLHRHNQVARIIHQRLALKYNLVEVEVPYYRYVPEPVLENSHITLYWDRSIITDRTVVANKPDIVVIDRSERRALIVDVTIPHDENLVKAEKDKQVKYLDLAHEVVDMWNVDSAIIVPIVVSVNGLIAKSLDQHLKRLGLDGWVKGQMQKAVLLDTARIVRKFLSLEP

SEQ ID NO: 13712 - protein, 1197 aa, Eilema sororculum
MLTRAKAKQIINYAQPTPSDSSCSSASQPPESTSPRPATVEASSSDEYFSPPTSPTPVRRPGRGRPPSSLGSRGPPASNRAPATGGNVRRMRWTSSINENVMRAYFAATGGGANLTAYRDRMLILFQDLEPTVNVSAQRLSDQVRAIQRCHLLDSSVLERLRSDLQNNDITPSPPQAVMQVVPQETQPVQTDCELDNVATSVSTQYIEQIRNALECAVRDYRSMNYQIRPRLPRLPVHKRNIALVCALDSLLPNYLDNCEHLGDTHSILYCAAYAACRVAGVKFPECNTAIRPKSGKPRWQCRIERRIAETRALIGKLICFRSGNTRPRVMRFVNRVFSGTGVSPFDYTSRVTERIDFLKQKVYAWANRIKRYKKRCDRYTLNRTFQRDERWVYRNWERADSVGDEHFPDVTATNTFWRNIWSVPVAHTEGDWVRKVKRSCEAIETMEPVIISEDDIACVVRSLPNWKAAGPDGLHNFWLKWLRSSHARLAFQFQSALESGSLPSFMTTGITHLLFKSGCAMNPKNYRPITCLPTVYKLLTSVLRVKIASHMTRNSILSYSQNGCRSGARGTKELLIIDTAVNQQVRRNRRDMATCWIDYKKAYDSVPHTWLLRVLELYKVDTTLCTFLEACMGQWSTALRYPGCRHIPDDGELIKIERGIFQGDSLSPLWFCLALNPLSTILEDSGLGYCLRRGSQVISHLLYMDDLKLFAPNNRQLMELLKVTETFSTSIRMEFGVDKCAVMHVKKGEIVESEGIELSDSTKLRSLSVNDTYKYLGISQALGVNESDMKQSLRERFFCRLKKVLKSLLSGGNKVRAYNDWVIPVLTYSFGILRWTQTELEALDRRVRTLLTAYRMHHPRSSVMRLYIPRKFGGRGFLNIKTLHNREICNLREYFLKVNVDVHRDVVAVDRGLTPLALAKENWRKPAILSINDRKEVWKSKELHGRFHRALYGPDVDLKASVSWLRFGDLFGETEGFVCAITDEVVMTNNYRRYILKDGTVDICRACHRPGESLRHIISGCSRLANGEYLHRHNQVARIVHQQLALKYKLVDSEVPYYRYVPDPVLDDGRVTLYWDRSVITDRTIVANKPDIVVIDRLERRAIIIDVTIPHDENLVKAEKDKQIKYLDLAHEVVDMWNVDSAIIVPIVVSVHGLIAKSLDQHLKRLALDSWVKGLMQKAVLLDTARIVRRFLSLEP

SEQ ID NO: 13713 - protein, 1106 aa, Eilema sororculum
MRWTNSINENVMRAYFAATEGGTNLSAYRTRMLPLFQALEPSINVSAQRLSDQVRVIQSNRMLNETVLETLRLECLRNICVTPAPVPVPASTVELNDDTCVAPDDTPIPVSIQYNEEIKEALECALREYRSMPVHVRPRLPRLPIHRRNIALVSALDSLLPRYLENSENLGDTHSILYCTAVAACRMAGAKFPIKVPAIRPKSAIPAWQCRIERRVTEARVLIGKLICFRSGNTRPRVMRYVTRAFAGTDISPQDYTSRVTERIDFLKQKVYAWANRIRRYKKRVDRYTVNRMFQRDQRWVYRSWERTEESMDDVRRPDAEVTNAFWRSIWSVPVSHTEGDWMHEVERACETIPEMEEINIDAIDVDCAVRSLSNWKSPGPDGLHNFWLKWLRSSHVVLASQFQSAVESGTLPAFMTTGVTHLLHKTGSTLEPNNYRPITCLPTVYKLLTSILRAKINNHINNNSIMCASQNGCRNGARGTKELLLIDMAISQQARRNRKDLTACWIDYKKAFDSVPHTWLLRVLELYKVNTTLCTFLRSCMGQWRTVLFYPGCRQALDGGVPITIERGIFQGDSLSPLWFCLALNPLSTLLVNSGLGYRLRREGQMVSHLFYMDDLKLFAHTNPQLIALLKITETFSNSIKMAFGVDKCAVIHVKRGRVVESEGIQLSDSTNLRSLLVTETYKYLGMSQALCINEVDMKQMLQERFFGRLKKVLNSLLSGGNKVRACNSWVIPLLMYSFGILKWTQTELDTIDRKVRTQLTAFRMHHPRSSVMRLYIPRKCGGRGFLNAKTLHNREVCNLRDYFLKSNVDMHRDVVNVDTGLTPLGLAKENWRRPTIVSTDSRREVWQSKELHGRFYRALHRPEVDLLASVSWLRFSDLFGETEGFVCAIADEVIKTNNYRKYIMRDGTIDICRACHQPDESLRHITSGCSRLANGEYLHRHNQVARIIHQRLALKYNLVEFEVPYYRYVPEPVLENTHITLYWDRSIITDRTVVANKPDIVVIDRSERRALIVDVTIPHDENLVKAEKDKQVKYLDLAHEVVDMWNVDSAIIVPIVVSVNGLIAKSLDQHLKRLGLDGWVKGQMQKAVLLDTARIVRKFLSLEP

SEQ ID NO: 13714 - protein, 1192 aa, Eilema sororculum
MLTRAQAKRHRNAPTTSPDSSLSSAAQPPAVEPAASSSSSSDEFFSPPTSPTPVRRPGRGRPPTCLGPRRPPASSGAPATGGDVHRMRWTTSINENVMRAYFAATEGGTNLSAYRTRMLPLFQALEPSINTSAQRLSDQVRVIQRNRMLNETVLETLRLECLRNICVTPAPAPAPASTAERNDDTRVAPDDTPIPVSIQYNEEIKEALECALREYRSMPVHVRPRLPRLPIHRRNIALVSALDSLLPRYLENSENLGDTHSILYCTAVAACRMAGAKFPIKDPVIRPKFTIPAWQCRIERRVAEARVLIGKLICFRSGNTRPRVMRYVTRAFAGTDISPQDYTSRVTERIDFLKQKVCAWANRIRRYKKRVDRYTVNRMFQRDQRWVYRSWERTDESVDDVRRPDAEATNAFWRSIWSVPVSHTEGDWMREVERACETIPEMEEIYIDATDVDCAVRSLSNWKSPGPDGLHNFWLKWLRSSHVVLASQFQSAIESGTLPAFMTTGVTHLLHKTGSTLEPNNYRPITCLPTVYKLLTSILRAKINNHINNNSIMCASQNGCRNGARGTKELLLIDMAISQQDRRNRKDLTACWIDYKKAFDSVPHTWLLRVLELYKVNTTLCTFLRSCMRQWRTVLFYPGCRQALGGGVPITIEWGIFQGDSLSPLWFCLALNPLSALLVNSGLGYRLRREGQVVSHLFYMDDLKLFAHTNPQLIALLKVTETFSNSIKMAFGVDKCAVIHVKRGRVVESEGIQLSDSTNLRSLLVTETYKYLGMSQALCINEVDMKQLLQERFFGRLKKVLNSLLSGGNKVRACNSWVMPLLMYSFGILKWTQTELDTIDRKVRTQLTAFRMHHPRSSVMRLYIPRKCGGRGFLNAKTLHNREVCNLRDYFLKSNVDMHRDVVNVDTGLTPLGLAKENWRRPTIVSTDSRREVWQSKELHGRFYRALHRPEVDLLASVAWLRFSDLFGETEGFVCAIADEVIKTNNYRKYIMRDGTIDICRACHQPGESLRHITSGCSRLANGEYLHRHNQVARIIHQRLALKYNLVEVEVPYYRYVPEPVQENSHITLYWDRSIITDRTVVANKPDIVVIDRSERRALIVDVTIPHDENLVKAETDKQVKYLDLAHEVVDMWNVDSAIIVPIVVSVNGLIAKSLDQHLKRLGLDGWVKGQMQKAVLLDTARIVRKFLSLEP

SEQ ID NO: 13715 - protein, 1192 aa, Eilema sororculum
MLTRAQAKRNGSAPITSPDSSLSSAAQPPAVEPAASSSSSSDEFFSPPTSPTPVRRLGRGRPPTCLGPRRPPASNGAPATGGDVHRMQWTNSINENVMRAYFAATEGGTNLSAYRTRMLPLFQALEPSLNVSAQRLSDQVRVIQRNRMLNETVLETLRLECLRNICVTPAPVPVPASTVELNDDTCVAPDDTPIPVSIQYNEEIKEALECALREYRSMPVHVRPRLPRLPIHRRNIALVSALDSLLPRYLENSENLGDTHSILYCTAVAACRMAGAKFPIKDPAIRPKSAIPAWQCRIERRVTEARVLIGKLICFRSGNTRPRVMRYVTRAFAGTDISPQDYTSRVTERIDFLKQKVYAWANRIRRYKKRVDRYTVNRMFQRDQRWVYRSWERTEESVDDVRRPDAEVTNAFWRSIWSVPVSHTEGDWMHEVKRACETIPEMEEINIDAIDIDCAVRSLSNWKSPGPDGLHNFWLKWLRSSHVVLASQFQSAVESGTLPAFMTTGVTHLLHKTGSTLEPNNYRPITCLPTVYKLLTSILRAKINNHINNNSIMCASQNGCRNGARGTKELLLIDMAISQQARRNRKDLTACWIDYKKAFDSVPHTWLLRVLELYKVNTTLCTFLRSCMGQWRTVLFYPGCRQALGGGVPITIERGIFQGDSLSPLWFCLALNPLSTLLVNSGLGYRLRREGQMVSHLFYMDDLKLFAHTNPQLITLLKITETFSNSIKMAFGVDKCAVIHVKRGRVVESEGIQLSDSTNLRSLLVTETYKYLGMSQALCINEVDMKQMLQERFFGRLKKVLNSLLSGGNKVRACNSWVMPLLMYSFGILKWTQTELDTIDRKVRTQLTAFRMHHPRSSVMRLYIPRKCGGRGFLNAKTLHNREVCNLRDYFLKSNVDMHRDVVNVDTGLTPLGLAKENWRRPTIVSTDSRREVWQSKELHGRFYRALHRPEVDLLASVSWLRFSDLFGETEGFVCAIADEVIKTNNYRKYIMRDGTIDICRACHQPGESLRHITSGCSRLANGEYLHRHNQVARIIHQRLALKYNLVEFEVPYYRYVPEPVLENTHITLYWDRSIITDRTVVANKPDIVVIDRSERRALIVDVTIPHDENLVKAEKDKQVKYLDLAHEVVDMWNVDSAIIVPIVVSVNGLIAKSLDQHLKRLGLDGWVKGQMQKAVLLDTARIVRKFLPLEP

SEQ ID NO: 13716 - protein, 1193 aa, Eilema depressum
MLTRAQARRNANAPATPPDSSLSSAAQPPPREPAASSSSSSDEFFSPPTSPTPVRRPGRGRPPICLGPRRPPASNRAPAAGGDVHRMRWTPSINENVMRAYFAATEGGTNLSAYRTRMLPLFQALEPSVNTSSQRLSDQVRVIQRNRMLNETVLETLRQECLRNICVTPAPAPASTPAPVPVSHMNEETGDDTLIPVSIQYNEQIKEALECALREYRSMSLNDRPRLPRLPIHRRNMALVGALDSLLPSYLDNSENLGDTHSILYCTAVAACRMAGVKFPNKDPAIRPKSTIPAWQCRIERRVAEARVLISKLICFRSGNTRPRVMRYVTRAFAGTGISPQEYTSRITERIDFLKQKVCAWANRIRRYRKRVDRFTVNRMFRRDQRWVYRSWEQPDESVDDVRRPEAAATNTFWRSIWSVPVSHIEGDWMCEVERACESIPEMEDIYIDAIDVDCAVRPLSNWKSPGPDGLHNFWLKWLRSSHALLASQFQSAVESGTLPAFMTTGVTHLLHKTGSTLEPNNYRPITCLPTVYKLLTSILRVKINNHINNNSIMCASQNGCRNGARGTKELLLIDMAISQQARRHTKDLAACWIDYKKAFDSVPHTWLLRVLELYKVNATLCTFLRSCMRQWRTVLFYPGCRQALGDGEPITIERGIFQGDSLSPLWFCLALNPLSTLLVNSGLGYRLRREGQMVSHLLYMDDLKLFAHTNPQLMALLKITENFSNSIKMGFGVEKCAVIHVKRGRVVESQGIQLSDSTSLRSLLITETYKYLGMSQALCINEAGMKQMLQERFFGRLKKVLNSLLSGGNKVRACNSWVMPLLMYSFGILKWTQTELDTIDRRVRTQLTAFRMHHPRSSVMRLYIPRKCGGRGFLNAKTLHNREVCNLRDYFLKSNVDMHRDVVSVDTGLTPLGLAKENWRRPIVVGTDSRREVWQSKELHGRFYRALHRPEVDLLASVSWLRFGDLFGETEGFVCAIADEVIKTNNYRKYIMRDGTIDICRACHQPGESLRHITSGCSRLANGEYLHRHNQVARIIHQRLALKYNLVELEVPYYRYVPEPVLENSHITLYWDRSIITDRTVVANKPDIVVIDRSERRALIVDVTIPHDENLVKAEKDKQVKYLDLAHEIVDMWNVDSAIIVPIVVTVNGLIAKSLDQHLKRLGLDGWVKGQMQKAVLLDTARIVRKFLSLEP

SEQ ID NO: 13717 - protein, 1113 aa, Ptilodon capucinus
MRWTSSINENVMRAYYEATEGGTNLTAYRNRMLPLFQSLEPAVNVSAQRLSDQVRVIQRGNMLADTVLDRLRSEMQSRRVVPVASSQPAAQPVASATVTSRLAADSDVDRDNAPINVSNQYNELLRSTLEDVVRVYRSMPNHLRPRIPRLPMHKGNRALVGTLDSLLSIYFDSSDNLADTHSILYCAAITVCRVARVKVFNTDTATRPKPAVPAWQCRIERRISEARALIGKLSCFREGNTRPRVMRFVKRAFAGTDVSPREYISHVTERIDFLKQKIYAWANRIRRYKVRVDRYSQNSMFQRDQRWVYRSWERPSEPVSELQRPDDNATTTFWRDIWSVPVTHYEGDWIGDVERMCEPIKEMEAISIGPLDVANAVRSLPNWKAPGPDGLHNFWLKWLRSSHVRLASQFQSALQSGSLPEFITTGVTHLLHKTGSTTDPKNYRPITCLPTIYKTLTSILRAKIARHVEDNSIMSASQNGCRSGSRGTKELLLIDMTICQQARRNRKDLSTCWIDYKKAYDSVPHTWLVRVLELYKIDTTLRTFLESCMRQWKTVLLCPGSRQILGNGEPIRIERGIFQGDSLSPLWFCLALNPLSTLLEESGFGFRLRRGGQVISHLLYMDDLKLFAPTALQLTGLLKVTETFSNSIRMEFGVDKCAVMHAKQGRLVESEGIQLSDSIQLRTLAATETYKYLGMSQGLGISETDMKQLLRDRFLGRLKKVLKSLLSGGNKVRAYNGWVMPVLMYSFGILKWTQTELDTLDRTVRTTLTSYRMHHPRSSVMRLYIPRKCGGRGFLNVKTLHNREICSLREYFLRADGEMHVDVVAVDNGLTPLSLAKENWRKPVVLTTDDRRLVWQGKELHGRYYRALHGPDVDLAASVAWLRFGDLFGETEGFVCAIMDEVVMTNNYRKYILRDGTIDICRACHRPGESLRHIISGCSRLANGQYLHRHNQVARIIHQQLALKYRLVTSEVPYYRYEPQPVLEDGHISLYWDRSIITDRTIVANKPDIVLIDRQERRAIIVDITVPHDENLVKAEKDKESKYLDLAHEVVDMWDIDAAIIVPIVVSAHGLLAKSLDKHLKRLALGGWIKGQIQKAVLLETARIVRKFLSLEP

SEQ ID NO: 13718 - protein, 1212 aa, Ptilodon capucinus
MTDAPRRNPRRLCRQRTVNEPNAQSTPPDPSPRSASPSPASIIRTSVTAVASSESDEYFSPPTSPPPVRQQRGRPPGHLGLLGQPAPNRVLVPSGVVRRMRWTSSINENVMRAYYEATEGGTNLTAYRNRMLPLFQSLEPAVNVSAQRLSDQVRVIQRGNMLADTVLDRLRSEMQSRRVVPVASSQPAAQPVASATVTSRLAADSDVDRDNAPINVSNQYNELLRSTLEDVVRVYRSMPNHLRPRIPRLPMHKGNRALVGALDSLLSIYFDSSDNLADTHSILYCAAITVCRVARVKVFNTDTATRPKPAVPAWQCRIERRISEARALIGKLSCFREGNTRPRVMRFVKRAFAGTDVSPREYISRVTERIDFLKQKIYAWANRIRRYKVRVDRYSQNSMFQRDQRWVYRSWERPSEPVSELQRPDDNATTTFWRDIWSVPVTHYEGDWIGDVERMCEPIKEMEAISIGPLDVANAVRSLPNWKAPGPDGLHNFWLKWLRSSHVRLASQFQSALQSGSLPEFITTGVTHLLHKTGSTTDPKNYRPITCLPTIYKTLTSILRAKIARHVEDNSIMSASQNGCRSGSRGTKELLLIDMTICQQARRNRKDLSTCWIDYKKAYDSVPHTWLVRVLELYKIDTTLRTFLESCMRQWKTVLLCPGSRQILGNGEPIRIERGIFQGDSLSPLWFCLALNPLSTLLEESGFGFRLRRGGQVISHLLYMDDLKLFAPTALQLTGLLKVTETFSNSIRMEFGVDKCAVMHAKQGRLVESEGIQLSDSIQLRSLAATETYKYLGMSQGLGISETDMKQLLRDRFLGRLKKVLKSLLSGGNKVRAYNGWVMPVLMYSFGILKWTQTELDTLDRTVRTTLTSYRMHHPRSSVMRLYIPRKCGGRGFLNVKTLHNREICSLREYFLRADGEMHVDVVAVDNGLTPLSLAKENWRKPVVLTTDDRRLVWQGKELHGRYYRALHGPDVDLAASVAWLRFGDLFGETEGFVCAIMDEVVMTNNYRKYILRDGTIDICRACHRPGESLRHIISGCSRLANGQYLHRHNQVARIVHQQLALKYRLVTSEVPYYRYEPQPVLEEGHITLYWDRSIITDRTIVANKPDIVLIDRQERRAMIIDITVPHDENLVKAEKDKESKYLDLAHEVVDMWDIDAAIIVPIVVSAHGLLAKSLDKHLKRLALGSWIKGQIQKAVLLEAARIVRKFLSLEP

SEQ ID NO: 13719 - protein, 1111 aa, Agrochola circellaris
MRWTQNVNENVMRAYFGATEGGSNLTAYRGRMLSLFQVLEPAVNVSAQRLSDQVRVIQRNHMLDDAVLDRLRLESRNNRVTPASPLVAVQLQNSPSATPRADHVGEEDDDGVISVSSQCNARLRNALEDAFRDYRSTPPGLRPRLPRLPMHKKNKALVCTLDSLLSNYFDGSKDLADTHSILYCAAVAACRVAHVKFPSSDRAPRPKPAVPAWQCRIERRIGEARVLIGKLICFREGNTRPRVMRFVRRAFSGTDTSSRDYLTRVTERIDFLKQKICAWANRIRRYRRRVERYTQNRTFQSDERWVYRAWERLDQGVIDTRLPDDDAMCSFWRSIWSAPVNHTEGDWTGKIERACERIPEMGAITISPQDVACAVRPLPNWKSPGPDGLHNFWIKWFQRSHARLASQFQSALESGSLPQFLTTGITHLLHKSGSTAEPKNYRPITCLPTVYKVFTSILRTKINKHIDTNSIMSASQNGCKNGSRGTKELLLIDMAISQQVRRSRRDLSTCWIDYKKAYDSVPHTWLMRVLELYKVDATLRTFLISCMGQWRTVLRYPGCRQIQRNSEPIRIERGIFQGDSLSPLWFCLALNPLSTLLEDSGLGYRLRRGGQVISHLLYMDDLKLFAPNNLQLVELLKVTETFSSAIRMEFGVDKCAVMHVKRGGIVESGGTQLSDSIHLRSLSSIETYKYLGMSEALGINTADMKQSLRERFFNRLNKVLNSLLSGGNKVRAFNGWVMPVLMYSFGILKWTQTELDALDRRVRTLLTVNRMHHPRSSVMRLYIPRKCGGRGFLNAKTLHNREVCSLREYFLEADVGMHRDVVSVDKGLTPLSLANENWRKPIVLDTKDRREVWQSKELHGRFYRALHGPDVDLLASVSWLRFGDLFGETEGFVFAIMDEVMMTNNYRKYIVKDGTVDICRACHRPGESIRHIISGCSRLANGDYLHRHNLVARIIHQQLALKYSLVESEVPYYRYMPDPVLENGNITLYWDRSIITDRTIVANKPDIVVIDRLERRTMIIDIAVPHDENLVKAEKDKQIKYLDLAREVVDMWDVDTAVIVPIVVTANGIIAKSLDQHLRRLSLGSWIKGLIQKAVLLDTARIVRRFLSQEP

SEQ ID NO: 13720 - protein, 1045 aa, Agrochola circellaris
MLDDTVLDRLRSEMRNSHATAPPSQTVMVAPQFTINQVDEGIDDMATNVSTQYNEELRSALERAIREYRSMSPELRPRLPRLPMHNKNRALVAALDSQLSNYFDDCEDLTDTHSILYCAAVAACRVAHVKFANDSRATRPKPAVPAWQCRIERRIGGARALIGKLICFREGNTRPRVMRFVRRAFSGPDISPEDYVSRATERIDFLKQKVYAWANRIRRYKRRVERYTQNRTFQSDERRVYRAWEQPDQGVADARLPDDDAMCSFWRSIWSAPVSHTEGDWTREVERACDPIPEMGAITICPQDVARAVRPLPNWKSPGPDGLHNFWIKWFKRSHARLAAQYQTALESGSLPEFLTTGVTHLLHKSGSTADPKNYRPITCLPTVYKVLTSILRAKINKHIDTNSIMSASQNGCRNGSRGTKELLLIDMTISQQVRRSRKDLSTCWIDYKKAYDSVPHTWLMRVLELYKVDATLRTFLLSCMGQWRTVLRYPGCRNIQRNSEPIRIERGIFQGDSLSPLWFCLALNPLSTLLEGSDLGYRLRRGGQVISHLLYMDDLKLFAPNNFQLMELLKVTETFSRAIRMEFGVDKCAVMHVKRGEIVESVGTQLTDSINFRALSASETYKYLGMSETLGINVTDMKQSLKERFFGRLKKVFNSFLSGGNKVRAFNGWVMPVLMYSFGVLKWTQTELDALDRRVRTLLTGYRMHHPRSSVMRLYIPRKCGGRGFLNAKTLHNREICSLREYFLEADVGMHRDVVAVDKGLTPLSLAKENWRKPAVLDTNDRKEVWQNKELHGRYFRALHGPDVDLLASVAWLRFGDLFGETEGFVCAIMDEVMMTNNYRRFIVKDGTVDICRACHRPGESIRHIISGCSRLANEEYLHRHNLVARIIHQQLALKYSLVESEVPYYRYVPDPVLESGHITLYWDRSIITDRSIVANKPDIVVVDRAERRTMIIDITVPHDGNLVKAEKDKQIKYLDLAREVVDMWDVDSAIIVPIVVSANGLIAKSLDQHLRRLSLGGWIKGLIQKAVLLDTARIVRRFLSLEP

SEQ ID NO: 13721 - protein, 1198 aa, Agrochola circellaris
MLTRSATRRARLLPPDSSLSSASPPPVPSPTVSAGTTPAAAVASSSSDEYFSPPTTPPPARRRGGHRPPVGLGPRGPPASDRVPAPGGSVQRMRWTQSINENVMRSYYGATEGGNNLTAYRVRMLSLFQVLEPAVNVSAQRLSDQVRVILRNHMLDDTVLDRLRSEMRNSHATAPPSQTVMVAPQFTINQVDKGIDDMATNVSTQYNEELRSALERAFPEYRSMSPELRPRLPRLPMHNKNRALVAALDSQLSNYFDDCEDLTDTHSILYCAAVAACRVAHVKFANDSRATRPKPAVPAWQCRIERRIGGARALIGKLICFREGNTRPRVMRFVRRAFSGTDISPEDYVSRATERIDFLKQKVYAWANRIRRYKRRVERYTQNRTFQSDERRVYRAWEQPDQGVADARLPDDDAMCSFWRSIWSAPVSHTEGDWTREVERACDPIPEMGAITICPQDVARAVRPLPNWKSPGPDGLHNFWIKWFKRSHARLAAQYQTALESGSLPQFLTTGVTHLLHKSGSTADPKNYRPITCLPTVYKVLTSILRAKINKHIDTNSIMSASQNGCRNGSRGTKELLLIDMAISQQVRRSRKDLSTCWIDYKKAYDSVPHTWLMRVLELYKVDATLRTFLLSCMGQWRTVLRYPGCRNIQRNSEPIRIERGIFQGDSLSPLWFCLALNPLSTLLEGSDLGYRLRRGGQVISHLLYMDDLKLFAPNNFQLMELLKVTETFSRAIRMEFGVDKCAVMHVKRGEIVESVGTQLTDSINFRALSASETYKYLGMSETLGINVTDMKQSLKERFFGRLKKVFNSFLSGGNKVRAFNGWVMPVLMYSFGVLKWTQTELDALDRRVRTLLTGYRMHHPRSSVMRLYIPRKCGGRGFLNAKTLHNREICSLREYFLEADVGMHRDVVAVDKGLTPLSLAKENWRKPAVLDTNDRKEVWQNKELHGRYFRALHGPDVDLLASVAWLRFGDLFGETEGFVCAIMDEVMMTNNYRRFIVKDGTVDICRACHRPGESIRHIISGCSRLANEEYLHRHNLVARIIHQQLALKYSLVESEVPYYRYVPDPVLESGHITLYWDRSIITDRSIVANKPDIVVVDRAERRTMIIDITVPHDGNLVKAEKDKQIKYLDLAREVVDMWDVDSAIIVPIVVSANGLIAKSLDQHLRRLSLGGWITGLIQKAVLLDTARIVRRFLSLEP

SEQ ID NO: 13722 - protein, 1095 aa, Agrochola circellaris
MRSYYGATEGGNNLTAYRVRMLSLFQVLEPAVNVSAQRLSDQVRVILRNHMLDDTVLDRLRSEMRNSHATAPPSQTVMVAPQFTINQVDEGIDDMATNVSTQYNEELRSALERAIREYRSMSPELRPRLPRLPMHNKNRALVAALDSQLSNYFDDCEDLTDTHSILYCAAVAACRVAHVKFANDPRATRPKTAVPAWQCRIERRIDGARALIGKLICFREGNTRPRVMRFVRRAFSGTDISPEDYVSRATERIDFLKQKVYAWANRIRRYRRRVERYTQNRTFQSDERRVYRAWEQPDQGVADARLPDDDAMCSFWRSIWSAPVSHTEGDWTREVERACDPIPEMGANTICPQDVARAVRPLPNWKSPGPDGLHNFWIKWFKRSHARLAAQYQTALESGSLPQFLTTGVTHLLHKSGSTADPKNYRPITCLPTVYKVLTSILRAKINKHIDTNSIMSASQNGCRNGSRGTKELLLIDMTISQQVRRSRKDLSTCWIDYKKAYDSVPHTWLMRVLELYKVDATLRTFLLSCMGQWRTVLRYPGCRNIQRNSEPIRIERGIFQGNSLSPLWFCLALNPLSTLLEGSDLGYRLRRGGQVTSHLLYMDDLKLFAPNNFQLMELLKVTETFSRAIRMEFGVDKCAVMHVKRGEIVESVGTQLTDSINFRALSASETYKYLGMSETLGINVTDMKQSLKERFFGRLKKVFNSFLSGGNKVRAFNGWVMPVLMYSFGVLKWTQTELDALDRRVRTLLTGYRMHHPRSSVMRLYIPRKCGGRGFLNAKTLHNREICSLREYFLEADVGMHRDVVAVDKGLTPLSLAKENWRKPAVLDTNDRKEVWQNKELHGRYFQALHGPDVDLLASVAWLRFGDLFGETEGFVCAIMDEVMMTNNYRRFIVKDGTVDICRACHRPGESIRHIISGCSRLANEEYLHRHNLVARIIHQQLALKYSLVESEVPYYRYVPDPVLESGHITLYWDRSIITDRSIVANKPDIVVVDRAERRTMIIDITVPHDGNLVKAEKDKQIKYLDLAREVVDMWDVDSAIIVPIVVSANGLIAKSLDQHLRRLSLGGWIKGLIQKAVLLDTARIVRRFLSLEP

SEQ ID NO: 13723 - protein, 1198 aa, Agrochola circellaris
MLTRSATRRARLLPPDSSLSSASPPPVPSPTVSAGTTPAAAVASSSSDEYFSPPTTPPPARRRGGHRPPVGLGPRGPPASDRVPAPGGSVQRMRWTQSINENVMRSYYGATEGGNNLTAYRVRMLSLFQVLEPAVNVSAQRLSDQVRVILRNHMLDDTVLDRLRSEMRNSHATAPPSQTVMVAPQFTINQVDEGIDDMATNVSTQYNEELRSALERAIREYRSMSPELRPRLPRLPMHNKNRALVAALDSQLSNYFDDCEDLTDTHSILYCAAVAACRVAHVKFANDSRATRPKPAVPAWQCRIERRIGGARALIGKLICFREGNTRPRVMRFVRRAFSGTDISPEDYVSRATERIDFLKQKVYAWANRIRRYKRRVERYTQNRTFQSDERRVYRAWEQPDQGVADARLPDDDAMCSFWRSIWSAPVSHTEGDWTREVERACDPIPEMGAITICPQDVARAVRPLPNWKSPGPDGLHNFWIKWFKRSHARLAAQYQTALESGSLPEFLTTGVTHLLHKSGSTADPKNYRPITCLPTVYKVLTSILRAKINKHIDTNSIMSASQNGCRNGSRGTKELLLIDMTISQQVRRSRKDLSTCWIDYKKAYDSVPHTWLMRVLELYKVDATLRTFLLSCMGQWRTVLRYPGCRNIQRNSEPIRIERGIFQGDSLSPLWFCLALNPLSTLLEGSDLGYRLRRGGQVISHLLYMDDLKLFAPNNFQLMELLKVTETFSRAIRMEFGVDKCAVMHVKRGEIVESVGTQLTDSINFRALSASETYKYLGMSETLGINVTDMKQSLKVRFFGRLKKVFNSFLSGGNKVRAFNGWVMPVLMYSFGVLKWTQTELDALDRRVRTLLTGYRMHHPRSSVMRLYIPRKCGGRGFLNAKTLHNREICSLREYFLEADVGMHRDVVAVDKGLTPLSLAKENWRKPAVLDTNDRKEVWQNKELHGRYFRALHGPDVDLLASVAWLRFGDLFGETEGFVCAIMDEVMMTNNYRRFIVKDGTVDICRACHRPGESIRHIISGCSRLANEEYLHRHNLVARIIHQQLALKYSLVESEVPYYRYVPDPVLESGHITLYWDRSIITDRSIVANKPDIVVVDRAERRTMIIDITVPHDGNLVKAEKDKQIKYLDLAREVVDMWDVDSAIIVPIVVSANGLIAKSLDQHLRRLSLGGWIKGLIQKAVLLDTARIVRRFLSLEP

SEQ ID NO: 13724 - protein, 1201 aa, Hydraecia micacea
MLTRSATARRARIPPPDSSLSSASPPVPLVSSPTVSAVMTPAAAVASSSSDEYFSPPTTPPPARRRGGRRPPDGLGPRGPPASDRVPAPGGSVQRMRWTRSINENVMRSYYGATEGGSNLTAYRVRMLSLFQVLEPAVNVSAQRLSDQVRVIQRNHMLDDTVLDRLRNEIQSSHAIAPQSQTAVILPQSNTSHADEGSNDRATNVSTQCNEELSSALEDAIQEYRFMSPELRPRLPRLPMHNKNRALVAVLNSQLSKYFDDCEDLTDTHSILYCAAVAACRVAHVKFTNDSRATRPKPAVPAWQCRIERRIGGARALIGKLICFREGNTRPRVMRFVRRAFLGTDISPQDYTSCVTERIDFLKQKVYAWANRIRRYKRRVERYTQNRTFQSDERWVYRDWERPDQSMADTCLPDDDAMCSFWRSIWSVPVSHTEGDWARDVERACDPIPEMEAITICPQDVARAVRPLPNWKSPGPDGLHNFWIKWFSRSHARLASQFQTALESGSLPQFLTTGITHLLHKSGSTAEPKNYRPITCLPTVYKVLTSILRAKINKHIDTNFIMSASQNGCRNGSRGTKELLLIDMTISQQVRRFRKDLSTCWIDYKKAYDSVPHTWLMRVLELYKVDTTLRTFLMSCMGQWRTVLRYPGCRNIQRNSEPIRIERGIFQGDSLSPLWFCLALNPLSTLLEDSGLGYRLRRGGQVISHLLYMDDLKLFAPNNLQLMELLKVTQTFSNAIRMEFGVDKCAVMHVKRGEIVESVGNQLSDSTNLRALSASETYKYLGMSEALGINVTDMKQSLKERFFGRLKKVLNSLLSGGNKVRAFNGWVMPVLMYSFGILKWTQTELDALDRRVRTLLTANRMHHPRSSVMRLYIPRKCGGRGFLNSKTLHNREICSLREYFLETDVGMHRDVVMVDKGLTPLSLAKENWRKPVVLDTNDRMEVWQSKELHGRFFRALHGPDVDLLASVAWLRFGDLFGETEGFVCAIMDEVMMTNNYRRFIVKDGTVDICRACHRPGESIRHIISGCSRLANGEYLHRHNLVARIIHQQLALKYSLVESEVPYYRYVPDPVLENGNITLYWDRSIITDRTIVANKPDIVVVDRSERRAMIVDITVPHDENLVKAEKDKQIKYLDLAREVVDMWDVDSAIIVPIVVTANGLIAKSLDQHLRRLSLGSWIKGLIQKAVLLDTARIVRRFLSLEP

SEQ ID NO: 13725 - protein, 1199 aa, Amphipyra tragopoginis
MLTRAQARANARPPPPDSSPSSASQQQGLDPASPAVAVASSSSDEYYSPPSSPPPARRRGGTRPPVGLGLRGPLASDRVPAPGGIVPRMKWTRTINENVMRAYYGATEGGTNLTAYRGRILSLFQVLEPAVNVSAQRLSDQVRVIQRGHMLDDTVLDRIRSEVQNSPVISPSPQVLEQSQNLAATLPRPNRADEEDDDRATNVSTQCNEELRSALEDAMREYRFIRPDLRPRIPRLPMHRKNRALVCALDSLLSNYFDGSEDLSDTHSILYCAAVAACRVAHIKFTDNERATRPKNAVPAWQCRIERRIAEARALIGKLVCFREGNSRPRVMRFVRRAFSGTDVSPREYMSRVTERIDFLKQKVYAWANRIRRYRRRVDRYTQNRLFQSDERWVYRTWERPDQRVSDTRLPDDDVMNAFWRNIWSVPVAHTEGDWMQEIQRACEPIQEMGDIIISPQDVASAVRPMSNWKSPGPDGLHNFWLKWLRSSHARLASQFQSSLESGSLPQFLTTGVTHLLHKSGSTAEPKNYRPITCLPTVYKVLTSILRAKINNHIDNNSIMSASQNGCRNGSRGTKELLLIDMAISQQVRRSRKDLSTCWIDYKKAYDSVPHTWLMRVLELYKVNTTLCAFLTSCMGQWRTVLHYPGCRQIQGMGEPIRIERGIFQGDSLSPLWFCLALNPLSTLLEGSGLGYRLRRGGQVISHLLYMDDLKLFAPNNLRLLELLKVTETFSNSIRMEFGVDKCAVMHVKRGRIMESVGTQLSDSIHLRSLSSTETYKYLGMSEALGINETDMKQSLRERFYGRLKKVLNSLLSGGNKVRAFNGWVMPVLMYSFGMLRWTQTELDALDRRVRTLLTAYRMHHPRSSVMRLYIPRKCGGRGFLNAKTLHNREVCSLREYFSQTDVGMHRDVVAVDKGVTPLSLAKENWRKPVVLDAKGRMEVWRSKELHGRFYLALHGPDVDFLASVAWLRFGDLFGETEGFVCAIMDEVMMTNNYRKYIVKDGTVDICRACHCPGESIRHIVSGCSRLANGEYLHRHNLVARIIHQQLALKYNLVDTEVPYYKYVPDPVLENGHVTLYWDRSIITDRTIVANKPDIVVIDRSERLTMIVDITVPHDENLVKAEKDKEIKYQDLAHEVVAMWDVDSAIIVPIVVTANGLIAKSLDQHLKRLSLGSWIKGLIQKAVLLDTARIVRKFLSLRP

SEQ ID NO: 13726 - protein, 1110 aa, Amphipyra tragopoginis
MRWTQSINENVMRAYYGATDGGINLTAYRDRMLSLFQVLEPAINVSTQRLSDQVRVIQRNRRLDDTVLERLRSETQNNRTVTSPAQSAVQPQLPAVPPRPSHADGEGDGEVIEVSNQCSDELRSALEGAILEYRTTPPELRPRLPRLPMHKKNRALVCALDSLLSNYFDGSEDLADTHSILYCAAIAACRVAHVKFTESDRATRPKPVVPAWQCRIERRIGGARALIGKLICFREGNTRPRVMRFVRRAFSGTDISPRDYMSRITERIDFLKQKVYAWANRIRRYKRRVERYTQNRTFQSDQRRVFRTWERPDPSGSDVRLPGDEAMGSFWRSIWSVPIAHTEGDWMRDIERACEPIPEMGAIIISPQDVAGAARPLPNWKSPGPDGLHNFWLKWLRSSHACLASQFQSSLESGSLPQFLTTGATHLLYKYGSTAEPKNYRPITCLPTVYKLLTSILRVKISNHIDNNSILSPSQNGCRSGSRGTKELLLIDMTISQQVRRSRKDLSTCWIDYKKAYDSVPHTWLMRVLELYKINTTLRTFLMSCMRQWRTVLRYPGCREIRGRGEPIRIERGIFQGDSLSPLWFCLALNPLSTLLEGTRLGYRLRREGQVISHLLYMDDLKLFAPTDLRLMELLKVTENFSSSIRMEFGVDKCAVMHVKRGGIVESEGIQISNSIQLRSLSPTETYKYLGMSEALGISEADMRQSLRERFFGRLNKVLRSLLSGGNRVRAFNGWVMPVLMYSFGILKWTQTDLEALDRRVRALLTVHRMHHPRSSVMRLYIPRKCGGRGFLNAKTLHNREVCSLREYFLQAEGEMHRDVVAVDKGLTPLALAKENWRKPAVLSTNDREEVWQSKELHGRFYRALHGPDVDFPASVSWLRFGDLFGETEGFVCAIMDEVMMTNNYRKYIVKDGTVDICRACHRPGESIRHIISGCSRLANGEYLHRHNLVARIIHQQLALKYNLVESEVPYYRYVPDPVLENGHATLYWDRSIITDRTIVANKPDIVVIDRSERRTMIVDITVPHDENLVKAEKDKQIKYLDLAHEVVGMWDVDSAVVVPIVVTANGLIAKSLDQHLKRLSLGGWIKGLLQKAVLLDTARIVRRFLSLEP

SEQ ID NO: 13727 - protein, 1110 aa, Amphipyra tragopoginis
MKWTQSINENVMRAYYGSTEGGTNLTAYRVRMLTLFQELEPAINVSAQRLSDQVRVIQRNHRLDDAALDRLRLEVQNSRVTPFPSQTAIHEVNINIVPPRSDYVDGDMDDRAVTVSSQYNDQLRSALEDAIREYRANPELRPRLPRLPMHNKNRALVCALDSLLSSYFESSEDLGDTHSILYCAAVAACRVAKVKFNNSERATRPKPAVPVWQCRIERRIDGARALIGKLICFREGNTRPRVMRFVRRAFSGTGISPREYMSRVTERIDFLKQKVCAWASRIRRYKRRVERYTQNRMFQCDQRWLYRAWERPEQGVSDGRLPDDDAMSSFWRSIWSVPITHTEGDWMRDIERACEPIEEMGEILISPHDVASAARPLPNWKSPGPDGLHNFWIKWLRSSHARLASQFQSSLESGSLPQFLTTGVTHLLYKSGSTAEPKNYRPITCLPTVYKLLTSILRSKINTHVENNSVMSSSQNGCRNGSRGTKELLLIDMAISQQVRRSRKNLSTCWIDYKKAYDSVPHTWLMRVMELYKINTTLRTFLRSCMGQWRTVLRYPGCQLIRGSDVPIRIERGIFQGDSLSPLWFCLALNPLSTLLEGSGLGYPLRRGGQIVSHLLYMDDLKLFAPTKLQLVQLLKVTETFSNSIRMEFGVDKCAVMHVRRGGIMESEGLQLSDSIHLRPLSANDTYKYLGMSEGLGISEADMKQSLRERFFGRLKKVLKSLLSGGNKVRAFNGWVMPVLMYSFGILKWTQTELDALDRRVRSLLTANRMHHPRSSVMRLYIPRKCGGRGLLNAKTLHNREVCSLREYFLHADAGMHRDVVAVDKGLTPLNLAKENWRKPVVLSTNDRREIWQSKELHGQFYRALHGPDVDFQASVSWLRFGDLFGETEGFVCAIMDEVIMTNNYRKYIVKDGTVDICRACHCPGESLRHIISGCSRLANGEYLHRHNQVARIIHQQLALKYNLVESEVPYYKYVPDPVLENGHITLYWDRSIITDRTIVANKPDIVVIDRSERRTMIVDVTIPHDENLVKAEKDKQIKYLDLVHEVVNMWDVDSATIVPIVVTANGLMAKSLDQHLKRLSLGGWIKGLIQKAVLLDTARIVRRFLSLEP

SEQ ID NO: 13728 - protein, 1198 aa, Amphipyra tragopoginis
MLTRARSKAARPPPPDSPLSSASQPPELGPPVTPAAAAASSSSDEYFSPPTSPTPVRRQGRHRPPTSLGPRGPPAPSRVLATGGCVQRMKWTQSINENVMRAYYGSTEGGTNLTAYRVRMLTLFQELEPAINVSAQRLSDQVRIIQRNHRLDDAALDRLRLEVQSSRVTPFPSQTAVHEVNINIVPPRSDYVDGDMDDRAVTVSSQYNDQLRSALEDAIREYRANPELRPRLPRLPMHNKNRALVCALDSLLSSYFESSEDLGDTHSILYCAAVAACRVANVKFNNSERATRPKPAVPVWQCRIERRIDGARALIGKLICFREGNTRPRVMRFVRRAFSGTGISPREYMSRVTERIDFLKQKVCAWASRIRRYKRRVERYTQNRMFQCDQRWLYRAWERPEQGVSDGRLPDDDAMSSFWRSIWSVPVTHTEGDWMRDIERACEPIEEMGEILISPHDVASAARPLPNWKSPGPDGLHNFWIKWLRSSHARLASQFQSSLESGSLPQFLTTGVTHLLHKSGSTAEPKNYRPITCLPTVYKLLASILRSKINTHVENNSVMSSSQNGCKNGSRGTKELLLIDMAISQQVRRSRKNLSTCWIDYKKAYDSVPHTWLMRVLELYKINTTLRTFLRSCMGQWRTVLRYPGCQLIRGSDVPIRIERGIFQGDSLSPLWFCLALNPLSTLLEGSGLGYPLRRGGQVVSHLLYMDDLKLFAPTKLQLVELLKVTETFSNSISMEFGVDKCAVMHVRRGGIVESEGLQLSDSIHLRPLSANDTYKYLGMSEGLGISEADMKQSLRESFFGRLKKVLKSLLSGGNKVRAFNGWVMPVLMYSFGILKWTQTELDALDRRVRSLLTANRMHHPRSSVMRLYIPRKCGGRGLLNAKTLHNREVCSLREYFLHADAGMHRDVVAVDKGLTPLNLAKENWRKPVVLSTNDRREIWQSKELHGRFYRALHGPDVDFQASVSWLRFGDLFGETEGFVCAIMDQVIMTNNYRKYIVKDGTVDICRACHCPGESLRHIISGCSRLANGEYLHRHNQVARIIHQQLALKYNLVESEVPYYKYMPDPVLENGHITLYWDRSIITDRTIVANKPDIVVIDRSERRTMIVDVTIPHDENLVKAEKDKQIKYLDLAHEVVNMWDVDSATIVPIVVTANGLMAKSLDQHLKRLSLGGWIKGQIQKAVLLDTARIVRRFLSLEP

SEQ ID NO: 13729 - protein, 1205 aa, Amphipyra tragopoginis
MLTRSRAKTQQSTHLPPSASSLSSASQPPEPASIVSDVTPAAAVASSSSDEYFSPATTPPPARRRGRGRPPACLGPRGPPASDRVPAPGGSVQRMRWTQSMNENCMRAYFGATEGGTNLTAYRGRMLSLFRALEPAVNVSAQRLSDQVRVIQRDHRLDDAALDRLRNEMQNSHVTPLPAQIRTQPLVPPAVPLEPNHGDEEEEDRAISAGTQYSELMRSALEDALREFRSTPPELRPRLPRLPMHNKNRALVCALDLLLSNVFESSEDLGDTHSILYCAAVAACRVAHVKFPNDNRATRPKSAVPAWQCRIERRIDGARVLIGKLTCFREGNRRPRVMRFVRRAFSGTDIGPGEYVSRITERIDFLKQKVYAWANRIRRYRRRVDRYTQNRIFQSDQRWVYRTWERPDQGVSDAHLPDNDVMNAFWRNIWSVPVTHTEGDWMQEVQRACEPIQEMGAVTIGPQDVASAVRPIPNWKSPGPDGLHNFWIKWLRSSHARLASQFQSSLESGSLPSFLTTGVTHLLFKSGSTAEPKNYRPITCLPTVYKLLTSILRAKLNHHIDSNAIMCATQNGCRNGSRGTKELLLIDMAISQQVRRSRKDLSTCWIDYKKAYDSVPHTWLMRVLELYKINATLRTFLMSCMGQWRTVLHYPGCRQIQGNGELIRIERGIFQGDSLSPLWFCLALNPLSTLLEGSGLGYRLRRGGQVISHLLYMDDLKLFAPNNLQLLELLKVTETFSNSIRMEFGVDKCAVMHVKRGRIMESVGTQLSDFIHLRSLSSTETYKYLGMSEALGINEADMKQSLRERFFGRLIKVLKSLLSGGNKVRAFNGWVMPVLMYSFGILRWTQTELDALDRRVRTLLTAYRMHHPRSSVMRLYIPRKCGGRGFLNAKTLHNREVCSLREYFSQADVGMHRDVVAVDKGLTPLSLAKENWRKPVVLDTNGRRDVWRSKELHGRFYRALHGPDVDFLASVAWLRFGDLFGETEGFVCAIMDEVMMTNNYRKYIVKDGTVDICRACHCPGESIRHIVSGCSRLANGEYLHRHNLVARIIHQQLALKYNLVDTEVPYYRYVPDPVLENGHVTLYWDRSIITDRTIVANKPDIVVIDRLERRTMIVDITVPHDENLVKAENDKKIKYLDLAHEVVDMWDVDSAVIVPIVVTANGLIAKSLDQHLMRLSLGSWIKGLIQRAVLLDTARIVRKFLSLEP

SEQ ID NO: 13730 - protein, 1205 aa, Amphipyra tragopoginis
MLTRSRAKTQQSTHLPPSASSLSSASQPPEPASIVSDVTPAAAVASSSSDEYFSPATTPPPARRRGRGRPPACLGPRGPPASDRVPAPGGSVQRMRWTQSMNENCMRAYFRATEGGTNLTAYRGRMLSLFQALEPAVNVSAQRLSDQVRVIQRDHRLDDAALDRLRNEMQNSHVTPLPAQIRTQPLVPLAVPLEPNHGDEEEEDRAISAGTQCSELMRSALEDALREFRSTPPELRPRLPRLPMHNKNRALVCALDLLLSNVFESSEDLGDTHSILYCAAVAACRVAHVKFPNDNRATRPKSAVPAWQCRIERRIDEARVLIGKLTCFREGNRRPRVMRFVRRAFSGTDIGPGEYVSRITERIDFLKQKVYAWANRIRRYRRRVDRYTQNRIFQSDQRWVYRTWERPDQGVSDAHLPDNDVMNAFWRNIWSVPVTHTEGDWMQEVQRACEPIQEMGAITIGPQDVASAVRPMPNWKSPGPDGLHNFWIKWLRSSHARLASQFQSSLESGSLPSFLTTGVTHLLFKSGSTAEPKNYRPITCLPTVYKLLTSILRAKLNHHIDSNAIMCATQNGCKNGSRGTKELLLIDMAISQQVRRSRKDLSTCWIDYKKAYDSVPHTWLMRVLELYKINATLRTFLMSCMGQWRTVLHYPGCRQIQGNGELIRIERGIFQGDSLSPLWFCLALNPLSTLLEGSGLGYRLRRGGQVISHLLYMDDLKLFAPNNLQLLELLKVTETFSNSIRMEFGVDKCAVMHVKRGRIMESVGTQLSDFIHLRSLSSTETYKYLGMSEALGINEADMKQSLRERFFGRLIKVLKSLLSGGNKVRAFNGWVMPVLMYSFGILRWTQTELDALDRRVRTLLTAYRMHHPRSSVMRLYIPRKCGGRGFLNAKTLHNREVCSLREYFSQADVGMHRDVVAVDKGLTPLSLAKENWRKPVVLDTNGRRDVWRSKELHGRFYRALHGPDVDFLASVAWLRFGDLFGETEGFVCAIMDEVMMTNNYRKYIVKDGTVDICRACHCPGESIRHIVSGCSRLANGEYLHRHNLVARIIHQQLALKYNLVDTEVPYYRYVPDPVLENGHVTLYWDRSIITDRTIVANKPDIVVIDRLERRTMIVDITVPHDENLVKAENDKKIKYLDLAHEVVDMWDVDSAVIVPIVVTANGLIAKSLDQHLMRLSLGSWIKGLIQKAVLLDTARIVRKFLSLES

SEQ ID NO: 13731 - protein, 1106 aa, Noctua pronuba
MNENVMRAYYGATEGGINLTAYRCRMLSLFQALEPAVNVSAQRLSDQVRVIQNNHRLDDATLDRLRSELRISPASNPLPSQNVTHVPAALPLRANQHAEEEDDRAVSADNLCNEELRSALEDAIREYRFTSPDLRPRLPRLPMNKKNRALVCALDALLPNFIASSANLCDTHSILYCTAVAACRVANVKFPNTDSATRPKSAVPVWQCRIERRINEARALIGKLICFREGNTRPRVMRFVRRAFSGTDINPREYMSRVTERIDFLKQKVYAWANRIRRYRRRVDRYTQNRMFQSDERWVYRTWERPVTIQGVTDTHLPDNDAMSAFWRSIWSVPVSHTEGDWMRVVEQACDSIPEMEAISISPLDVARAVRPLPNWKSPGPDGLHNFWIKWLQRSHACLASQFQSSLETGSLPSFFTTGVTHLLHKSGSTAEPKNYRPITCLPTVYKVLTSILRAKIVRHIDNNSIMSVSQNGCRNGSRGTKELLLIDMTISQQVRRSRRDLSTCWIDYKKAYDSVPHTWLRRVLELYKIDATLRTFLVSCMGQWSTVLLYPGCRQVLGNDEPIRIERGIFQGDSLSPLWFCLALNPLSTLLEDSGLGYRLRRGGQVISHLLYMDDLKIFAPSNLQLMELLKVTETFSSAIRMEFGVDKCAVMHVKRGEIMESVGTQLSDSIYLRSLSSTETYKYLGMSEALGINATDMKQSLKERFFGRLNKVLKSLLSGGNKVRAFNGWVMPVLMYSYGILKWTQTELDALDRKVRTLLTANRMHHPRSSVMRLYIPRKCGGRGFLNAKTLHNREVCSLREYFLETDVGMHRDVVSVDKGLTPLSLANENWRKPVVLDTNDRKEVWQSKELHGRFFRALHGPDVDLLASVSWLRFGDLFGETEGFVCAIMDEVIMTNNYRKYIVKDGTVDICRACHRPGESIRHIVSGCSRLANGEYLHRHNLVARIIHQQLALQYNLVGTEVPYYKYVPDPVLENGHATLYWDRSIITDRTILANKPDIVVIDRRERRAMIVDITVPHDENLVKAENDKKIKYLDLAHEVVDMWDVDSAIIVPIVVTVNGLIAKSLDQHLRRLSLRGWVKGLIQKAVLLDTARIVRRFLSLEP

SEQ ID NO: 13732 - protein, 1111 aa, Noctua pronuba
MRWTQSINEQVMRAYYGATEGGSNLTAYRGRMLSLFQVLEPTVSVSAQRLSDQVRVIQRNHMLDDTVLDRLRSESRSNPVTPASPMIAGLLQSATSTSPRSDHGGEEDDSEVISVSTQCNAQLRSALEGAFREYRSTPPELRPRLPRLPMHKKNKALMCALDSQLSNYFDSSKDLADTHSILYCGAVAACRVAHVKFPNNDRATRPKLAVPAWQCRIERRIGEARALIGKLICFREGNTRPRVMRFVRRAFSGIDITFRDYLARVTERIDFLKQKICAWASRIRRYKRRVERYTQNRTFQSDERWVYRAWERPDQGVTDTRLPGDDAMCLFWRSIWSVPVSHTEGDWTREVEQACDPIQEMGAIIISPQDVACAVRPLPNWKSPGPDGLHNFWIKWFQRSHACLASQFQLALESGSLPQFLTTGITHLLHKSGSTAEPKNYRPITCLPTVYKVLTSILRAKINQHIENNSIMSASQNGCRNGSRGTKELLLIDMAISQQVRRSRKDLSTCWIDYKKAYDSVPHTWLMRVLELYKVDATLRTFLMSCMRHWRTVLRYPGCRQIQRNSEPIRIERGIFQGDSLSPLWFCLALNPLSTLLEGSGLGYRLRRGGQVISHLLYMDDLKLFAPNNLQLMKLLKVTETFSSAIRMEFGVDKCAVMHVKRGEIMESVGTQLSDSIHLRSLTSTETYKYLGMSEALGINTADMKQSLRERFFGRLNKVLGSLLSGGNKVRAFNGWVMPVLMYSFGILKWTQTELDALDRRVRALLTANRMHHPRSSVMRLYIPRKCGGRGFLNAKTLHNREVCSLREYFLEADVGMHRDVVSVDKGLTPLSLANENWRKPKVLVTNDRKEVWQGKELHGRFYRALHGPDVDFLASVSWLRFGDLFGETEGFVCAIMDEVMMTNNYRKYIVKDGTVDICRACHRPGESIRHIISGCSRLANGEYLHRHNLVARIIHQQLALKYNLVQSEVPYYKYAPDPVLDDGNITLYWDRPIVTDRTIVANKPDIVVIDRLERRAMIVDITVPHDENLVKAEKDKQFKYLDLAREVVDMWDVNTAVIVPIVVSANGLIAKSLDQHLRRLALGSWIKGLIQKAVLLDTARIVRRFLSQEP

SEQ ID NO: 13733 - protein, 1197 aa, Noctua pronuba
MLTRAAARRARLSPPDPSLSSASPLPESSPIVSAVTPAVAVASSSSDEYFSPPTTPPPVRRRRGRRPPDGLGPRGPPASDRVPALGGSVQRMRWTQSINENVMRSYYGATEGGNNRTAYRVRMLSLFQVLEPAVNVSAQRLSDQVRVIQRNRMLDDTVLDRLRTQMQSSHVITPSAQAVVLPQSNTIPNRANDESNDMVTNVSTQCNEEIRSALEDAIREYRSMQPDLRPRIPRLPMHNKNRALVAVLDSQLSNYFDNCEDLTDAHSILYCAAVAACRVAHVKFSDDRATRPKPAVPAWQYRIERRIGGARALIGKLICFREGNTRPRVMRFVRRAFSGTDISPRDYMSRVTERIDFLKQKVYAWANRIRRYKRRVDRYTQNRTFQRDERWVYRAWERPDQGVADTRLPDDDAMCSFWRSIWSVPVSHTEDEWTREVERACDPVQEMGAITISPQDVVCAVRPLPNWKSPGPDGLHNFWIKWFTRSHARLATLFQSALESGSLPEFLTTGITHLLHKSGSTAEPKNYRPITCLPTVYKVLTSILRTKISKHINDNSIMSPSQNGCRNGSRGTKELLLIDMAISQQVRRFRRDLSTCWIDYKKAYDSVPHTWLMRVLELYKVDTTLRTFLMSCMGQWRTVLRYPGCRQIQRDSEPIRIERGIFQGDSLSPLWFCLALNPLSTLLEDSGLGYRLRRGGQVISHLLYMDDLKLFAPNDLQLMELLKVTETFSSAIRMEFGVDKCAVMHVKRGEIVESVRTQLSDSINLRSLSATETYKYLGMSEALGINVADMKQSLKERFFGRLKKVFNSLLSGGNKVRAFNGWVMPVLMYSFGILKWTQTELDALDRRVRTLLTAYRMHHPRSSVMRLYIPRRCGGRGFLNAKTLHNREICSLREYFLETDVGMHRDVVAVDKGLTPLSLAKENWRKPVVLDTNDRREVWQSKELHGRFFRALHGPDVDLSASVAWLRSGDLFGETEGFVCAIMDEVMMTNNYRRFIVKDGTVDICRACHRPGESIRHIISGCSRLANGEYLHRHNLVARIIHQQLALKYNLVESEVPYYKYVPDPVLENGCVTLYWDRSIITDRTIVANKPDIVVVDRSERRAMIVDITVPHDENLVKAEKDKQIKYLDLAHEVVDLWDVDSAIIVPIVVSAHGLIAKSFDQHLRRLSLGSWIKGLIQKAVLLDTARIVRRFLSLEP

SEQ ID NO: 13734 - protein, 1207 aa, Noctua pronuba
MSPMLTRRRAKLLETHPPSPGSSLSSASQPPGRATSVSAASPVAAVASSSSDEFFSPPSTPPSPRRRGRRPPAGLGPRGQQAPNRVPAAGGNVSRIRWTQSMNENVMRAYYGATEGGINLTAYRCRMLSLFQALEPTVNVSAQRLSDQVRVIQNNHRLDDATLDRLRSELRISPASNPLPSQNVTHVPAALPLQANQHAEEEDDRAVSAENLCNVEIRSALEGAIREYRFMSPDLRPRLPRLPMNKKNRALVCALDALLPNFIENSANLCDTHSILYCTAVAACRVANVKFPNTDSATRPKSAVPVWQCRIERRINEARALIGKLICFREGNTRPRVMRFVRRAFSGTDISPREYMSRVTERIDFLKQKVYAWANRIRRYRRRVDRYTQNRMFQSDERWVYRTWERPVTIQGVTDAHLPENDAMSAFWRSIWSVPVSHTEGDWMRVVERACDSIPEMEAISISPLDVARAVRPLPNWKSPGPDGLHNFWIKWLQRSHACLASQFQSSLETGSLPSFFTTGVTHLLHKSGSTTEPKNYRPITCLPTVYKVLTSILRAKIVRHIDSNSIMSVSQNGCRNGSRGTKELLLIDMAISQQVRRSRRDLSTCWIDYKKAYDSVPHTWLRRVLELYKIDATLRTFLVSCMGQWSTVLLYPGCRQVLGNDEPIRIERGIFQGDSLSPLWFCLALNPLSTLLEDSGLGYRLRRGGQVISHLLYMDDLKIFAPSNLQLMELLKVTETFSSAIRMEFGVDKCAVMYVKRGEIMESVGTQLSDSIYLRSLSSTETYKYLGMSEALGINAADMKQSLKERFFGRLSKVLKSLLSGGNKVRAFNGWVMPVLMYSYGILKWTQTELDALDRKVRTLLTANRMHHPRSSVMRLYIPRKCGGRGFLNAKTLHNREVCSLREYFLETDVGMHRDVVSVDKGLTPLSLANENWRKPVVLDTNDRKEVWQSKELHGRFFRALHGPDVDLLASVSWLRFGDLFGETEGFVCAIMDEVIMTNNYRKYIVKDGTVDICRACHRPGESIRHIVSGCSRLANGEYLHRHNLVARIIHQQLALQYNLVGTEVPYYKYVPDPVLENGHATLYWDRSIITDRTILANKPDIVVIDRRERRAMIVDITVPHDENLVKAENDKKIKYLDLAHEVVDMWDVDSAIIVPIVVTVNGLIAKSLDQHLRRLSLRGWVKGLIQKAVLLDTARIVRRFLSLEP

SEQ ID NO: 13735 - protein, 1197 aa, Noctua pronuba
MLTRAAARRARLSPPDPSLSSASPLPESSPIVSAVTPAVAVASSSSDEYFSPPTTPPPVRRRRGRRPPDGLGPRGPPASDRVPALGGSVQRMRWTQSINENVMRSYYGATEGGNNRTAYRVRMLSLFQVLEPAVNVSAQRLSDQVRVIQRNRMLDDTVLDRLRTEMQSSHVITPSAQAVVLPQSNTIPNRANDESNDMVTNVSTQCNEEIRSALEGAIREYRSMQPDLRPRIPRLPMHNKNRALVAVLDSQLSNYFDNCEDLTDAHSILYCAAVAACRVAHVKFSDDRATRPKPAVPAWQYRIERRIGGARALIGKLICFREGNTRPRVMRFVRRAFSGTDISPRDYLSCVTERIDFLKQKVYAWANRIRRYKRRVDRYTQNRTFQRDERWVYRAWERPDQGVADTRLPDDDAMCSFWRSIWSVPVSHTEDEWTREVERACDPVQEMGAITISPQDVVCAVRPLPNWKSPGPDGLHNFWIKWFTRSHARLATLFQSALESGSLPEFLTTGITHLLHKSGSTAEPKNYRPITCLPTVYKVLTSILRTKISKHINDNSIMSPSQNGCRNGSRGTKELLLIDMAISQQVRRFRRDLSTCWIDYKKAYDSVPHTWLMRVLELYKVDTTLRTFLMSCMGQWRTVLRYPGCRQIQRDSEPIRIERGIFQGDSLSPLWFCLALNPLSTLLEDSGLGYRLRRGGQVISHLLYMDDLKLFAPNDLQLMELLKVTETFSSAIRMEFGVDKCAVMHVKRGEIVESVRTQLSDSINLRSLSATETYKYLGMSEALGINVADMKQSLKERFFGRLKKVFNSLLSGGNKVRAFNGWVMPVLMYSFGILKWTQTELDALDRRVRTLLTAYRMHHPRSSVMRLYIPRRCGGRGFLNAKTLHNREICSLREYFLETDVGMHRDVVAVDKGLTPLSLAKENWRKPVVLDTNDRKEVWQSKELHGRFFRALHGPDVDLSASVAWLRSGDLFGETEGFVCAIMDEVMMTNNYRRFIVKDGTVDICRACHRPGESIRHIISGCSRLANGEYLHRHNLVARIIHQQLALKYNLVESEVPYYKYVPDPVLENGCVTLYWDRSIITDRTIVANKPDIVVVDRSERRAMIVDITVPHDENLVKAEKDKQIKYLDLAHEVVDLWDVDSAIIVPIVVSAHGLIAKSFDQHLRRLSLGSWIKGLIQKAVLLDTARIVRRFLSLEP

SEQ ID NO: 13736 - protein, 1200 aa, Tinea trinotella
MLTRSRARNQSAQLTSSGSSLSSASQPPGSTPTVSQVISVAAVASSSSDECFSPPTTPPSARRRGGGRPPASLEPRGPSASGGVPATSGRVQRMRWTQSINENVMRSYFGATEGGSSLTAYRGRMLTLFQVLEPAVNVSAQRLSDQVRVIQRNRMLDDVVLDRLRLESRSSHVSPVSPPVAVQLQPSALPRPNNIEENDDDVTISVSNQYNEQLRSALEDAFREYRSTPPGLRPRIPRLPMHKKNRALVCALDSQLVNHFKSSKDLADTHSILYCAAVAVCRVAHVKFPNNDRAARLAVPAWQCRIERRIGEARALIGKLISFREGNTRPRVMRFVRRAFSGTDISSRDYQTRVTERIDFLKQKIYAWANRIRRYKRRVERYTQNRTFQSNERWVYRAWERPDQDVSDMCLPDDDAMSLFWRNIWSVPVGHTEGEWTREVERACDFIPEMGAIIISPQDVACAVRPLSNWKSPGLDGLHNFWIKCFQRSHARLATQFQSALELGSLPQFLTTGITHLLHKSGSTAEPKNYRPITCLPTVYKVLTSILRAKIDKHIDTNCIMSASQNGCRSGSRGTKELLLIDVAISQQVRRSRRDLSTCWIDYKKAYDSVPHTWLMRVLELYKVDAALRTFLVSCMGQWRTVLHYPGCRRILGNGEPIKIERGIFQGDSLSPLWFCLALNPLSTLLDGSGQGYRLRRDGQVISHLLYMDDLKLFAPNNLQLMKLLKVTETFSSAISMEFGVDKCAIMHVKRGEIMESVGTQLSDSIHLRSLCSTETYKYLGMSEALGINAVDVKQSLRDRFFGRLNKVLNSLLSGGNKVRAFNGWVMPVLMYSFGILKWTQTELDALDRRVRTLLTANRMHHPRSSVMRLYIPRKCGGRGFLNAKTLHNREVCSLREYFLKTDVGMHRDVVAVDKGLTSLSLANENWRKPVVLDANDRREVWQSKELHGRFYRALHGPDVDFLASVSWLRFGDLFGETEGFVCAIMDEVMMTNNYRKYIVKDGTVDICRACHRPGESIRHIISGCSRLANGDYLHRHNLVARIIHQQLALKYNLVESEVPYYRYVPDPVLENGNITLYWDRSIITDRTIVANKPDIVVIDRLERCTIIVDVAVPHDENLVKAEKDKQIKYLDLARKVVDMWEVDTAIIVPIVVTANGLIAKSLDEHLKRLSLGSWIKRLIQKAVLLDTARIVRRFLSQEP

SEQ ID NO: 13737 - protein, 1196 aa, Spilosoma lubricipeda
MLTRARSRALLPSSDSSLRSALPSSDARTEVPTVAEASSSSSSDEFFSPPTSPTPVRRQGRDRPPTSLGSRGPLTSNRAPATGGDVRRMKWTQSINENVMRAYFRATELGTNLTAYRVRLVSLFQELEPAVNVSAQRLSDQVRAIQRCHLLDDTVLERICSDIRNSLTVPSSPHVVDVVTNSTPQNEDVSELVDSEIISVSTLYNDKIRSTLEDVIREYRCVNFINRPRLPRLPIHKRNLALVSALDSLLPDYFGNSEDLSDTHSILYCAAIAVCRVAGIKFAENITTTRPENTVPAWQCRIERRIAGARTLIGKLISFRSGNTRPKVMRFVKQAFFGTTISPQQYMSCVTERIDFLKQKVYAWANRIRRYRKRIDRYNQNRMFQRNEKWVYRKWENLSPCMSDGQVPDENATNSFWRSIWSVPVAHTEGDWYRDVERSCESLLPMELINIDKEDVSCAVRSLPNWKAPGPDGLHNFWLKWFRSSHACLASQFQTALDSGSLPQFLTTGITHLLYKSGSAMDPKNFRPITCLPTLYKLLTSILRLKITTHINQNSILSVSQNGCRSGTRGTKELLIIDMTISQQVRRNRKSLATCWIDYKKAFDSVPHIWLLKVLELYKIDTTLCTFLKSCMRQWRTVLRYPGCRQTAVNDVPIKIERGIFQGDSLSPLWFCLALNPLSTLLEGSGLGYRLQKEAPVISHLFYMDDLKLFAPTKLQLTALLRVTENFSNSIKMEFGIDKCAVMHVKKGVIVESEGIELSDSTRLRSLSATETYKYLGFSQSLGIPESDMKQSLRERFFGRLKKVLKSLLSGGNKVRAYNGWVMPVLMYSFGILRWTQTELDALDRRVRTLLTAFRMHHPRSSVMRLYIPRKFGGRGLLNVKTLHNREIYNLREYFLHTDVGVHRSVVAMDTGLTPLALAKENWRKPVVLGTNERREVWKGKALHGRFYRALNGSDIDFKASTSWLRYGDLFGETEGFVCAILDEVIMTNNYRKYILKDGTVDICRACHRPGESIRHIISGCSRLANGEYLHRHNQVARIVHQQLALKYKLVNSEVPYYRYVPDPVLENGRATLYWDRSIITDRTIVANKPDIVVIDRSERRAMIVDIAVPHDENLVKVEKEKQIKYLDLSHEIVDMWDVDSVIIVPIVVSVHGLIAKSLDQHLKRLTLDGWIKGLMQKAVLLDTARIVRRFLSLEP

SEQ ID NO: 13738 - protein, 868 aa, Spilosoma lubricipeda
MRFVKQAFLGTTVSPQQYMSCVTERIDFLKQKVYAWANRIRRYRKRTDRYNQNRTFQRNEKWVYQKWEKLSPCMSDEHLPDKNATNYFWRNIWSTPVTHTEGHWCRDVGRSCESITPMEPVRIDKEDVSCAVRSLANWKAPGPDGLHNFWLKWFRSSHAYLASQFQTALDSGSLPQFLTTGITHLLHKSGSTMDPKNFRPITCLPTLYKLLTSILRLKITTHINNNSIISVSQNGCRSGTRGTKELLIIDMTISQQVRRNRKSLATCWIDYKKAYDSVPHTWLLRVLELYKIDTTLCTFLKSCMGQWRTVLRYPGCRQSTMNDVLIKIERGIFQGDSLSPLWFCLALNPLSSLLEGSGIGYRLQKDDRVISHLLYMDDLKLLAPTKLQLTALLKVTENFSNSIKMEFGVDKCAVMYVQKGLIVESEGVELSDSTKLRSLSATETYKYLGFSQSLGIPESDVKQMLRERFFARLKKVLKSLLSGGNKVRAYNSWVMPVLMYSFGILRWTQTELDAFDRRVRTLLTAFRMHHPRSSVMRLYIPRKFGGRGLLNIKTLDNREIYNLREYFLHTDVEMHRNVVAVDTGLTPLALAKENWRKPVVLCTNDRREVWKGKELHGRFYRALNGPDIDFKASTSWLRYGDLFGETEGFVCAIMDEVIMTNNYRKYILKDGTVDICRACHRPGESIRHIISGCSRLANGEYLHRHNQVARIVHQQLALKYHLVNSEVPYYRYVPDPVLENGRATLYWDRSIITDRTIVANKPDIVVIDRLERRAMIVDIAVAHDENLVKAEKEKQIKYLDLSHEIVDMWNVDSAIIVPIVVSAHGLIARSLDQHLKRLTLDGWIKGLMQKAVLLDTARIVRRFLSLEP

SEQ ID NO: 13739 - protein, 1196 aa, Spilosoma lubricipeda
MLTRARARALLPSSDSSLRSALPSSDARTEVPTVAEASSSSSSDEFFSPPTSPIPVHRQGRDRPPTSLGPRGPLTSNRAPATGGDVRRMKWTQSINENVMRAYFRATELGTNLTAYRVRLVSLFQELEPAVNVSAQRLSDQVRAIQRCHLLDDTVLERICSDIRNSLTVPSSPHVVDVVTNSTPQNEDVSELVDSEIISVSTLYNDKIRSTLEDVIREYRCVNFNNRPRLPRLPIHKRNLALVSALDSLLPDYFGNSEDLSDTHSILYCAAIAVCRVAGIKFAENITTTRPENTAPAWQCRIERRIAGARTLIGKLISFRSGNTRPKVMRFVKQAFLGTTISPQQYMSCVTERIDFLKQKVYAWANRIRRYRKRIDRYNQNRMFQRNEKWVYRKWENLSPCMSDGQVPDENATNSFWRSIWSVPVAHTEGDWYRDVERSCESLLPMELISIDKEDVSCAVRSLPNWKAPGPDGLHNFWLKWFRSSHACLASQFQTALDSGSLPQFLTTGITHLLYKSGSAMDPKNFRPITCLPTLYKLLTSILRLKITTHINQNSILSVSQNGCRSGTRGTKELLIIDMTISQQVRRNRKSLATCWIDYKKAFDSVPHTWLLKVLELYKIDTTLCTFLKSCMRQWRTVLRYPGCRQTAVNDVPIKIERGIFQGDSLSPLWFCLALNPLSTLLEGSGLGYRLQKEAPVISHLFYMDDLKLFAPTKLQLTALLRVTENFSNSIKMEFGIDKCAVMHVKKGVIVESEGIELSDSTRLRSLSVTETYKYLGFSQSLGIPESDMKQSLRERFFGRLKKVLKSLLSGGNRVRAYNGWVMPVLMYSFGILRWTQTELDALDRRVRTLLTAFRMHHPRSSVMRLYIPRKFGGRGLLNVKTLHNREIYNLREYFLHTDVGVHRSVVAMDTGLTPLALAKENWRKPVVLGTNERREVWKGKELHGRFYRALNGPDIDFKASTSWLRYGDLFGETEGFVCAIMDEVIMTNNYRKYILKDGTVDICRACHRPGESIRHIISGCSRLANGEYLHRHNQVARIVHQQLALKYKLVNSEVPYYRYVPDPVLENGRATLYWDRSIITDRTIVANKPDIVVIDRSERRAMIVDIAVPHDENLVKVEKEKQIKYLDLSHEIVDMWDVDSVIIVPIVVSVHGLIAKSLDQHLKRLTLDGWIKGLMQKAVLLDTARIVRRFLSLEP

SEQ ID NO: 13740 - protein, 1194 aa, Autographa pulchrina
MLTRSRSRRPAPPPSPDSSPSSASQLPDHVPAPAPAVASSSSDEYYSPPTSPTPVRRQGRRRPPSSLAPAGQPASNRAPAPGGDVRRMKWTQGINENVMRAYYGATEGGTNLTAYRARMLSLFQGLEPDVNVSAQRLSDQVRVIQRNHRLDDATLDRLRSEVQRSPAASTPSPAVVPVIGSPPTNPADGEEEDGAITVSTQCSEHIRSTLEDTIREFRSTPPGLRPRLPRLPMHNRNKAIMGVLDSLLLVYFGSSEDLSDTHSILYCAALAACRVANVKINNINLDTRPKPAVPAWQCRIERRVAEARALIGKLIAFKDGNSRPRVMRFVRRAFTGTNISPSEYTARVTERIDFFKQKVCAWASRIRRYKCRVDRFHQNRMFQRDQRWVFRTWERPVLGMDDRRLPDEDATNSFWRNIWSVPVSHSEGVWMRDVEESCEPIQEMRAITIGPQDVANAIRPMSNWKAPGPDGLQNFWLKWFRSSHGCLASQFQYAIESDALPQFFTTGSTHLLHKTGSTTDPKNYRPITCLPTIYKLLTSILRVKINKHIDSHSIMSASQNGCRNGSRGTKELLLIDMTICQQVRRSKKNLSTCWIDYKKAYDSVPHSWLMRVLELYKINTTLRAFLSSCMRRWTTVLRYPGCRDIQQSGEPIRIERGIFQGDSLSPLWFCLALNPLSTLLENSRLGYSLRRGSQVISHLLYMDDLKLFASNELQLMGLLKITESFSNSIRMEFGVDKCAVMHVKQGGIVESQGIQLSDSINLRSLSAADTYKYLGMSEALGIDVADMKQSLLTRFFGRLNKVLKSLLSGGNRVRAFNGWVMPVLMYSFGILKWTQTELDALDRRVRTLLTANRMHHPRSSVMRLYIPRKCGGRGFLNAKTLHNREVCNLREYFLQVDVGMHRDVVVVDKGFTPLSLGKENWHKPAVLSVKDRRDVWQSKELHGRFYRSLHGPDVDFLASVAWLRFGDLFGETEGFVCAIMDEVIMTNNYRKYIIKDGTVDICRACHCPGESIRHIISGCSRLANGEYLHRHNQVARIIHQQLALRYKLVEAEVPYYRYVPDPVLDNGHVTLYWDRSIITDRTIVANKPDIVVIDRSERRAMIVDVTIPHDENLVKAEKEKQMKYLDLAHEVVDMWEVDSAIIVPIVITANGIIAKSLDQHLKRLSLGIWVKGLIQKAVLLDTARIVRRFLSLEP

SEQ ID NO: 13741 - protein, 1208 aa, Ochropleura plecta
MADIRHMRCQKICKCMKMITRSAARRDARLPPPGPSLSSASPPPEPSLVVSAVTPAVAVASSSSDEYFSPPTTPPPARRRGGRRLPDGLGLRGPPASDRVPAPGGNVQRMRWTSSINENVMRSYYGATEGGNNLTAYRVRMLSLFQVLEPAVNVSAQRLSNQVRVIQRNRMLDDTVLDRLLTEMQSSQVITSSSEAVVPPQSHQLVSRADEVSNDMATNVSTQCSEEMRSALEGAIREYRYISPELRPRLPRLPMHNKNRMLVAVLDLQLSNYFDNCENLTDAHSLLYCAAVAACRVAHVKFPDDRATRPKPAVPVWQYRIERRIGVARALIGKLNCFREGNTRPRVMRFVRRAFAETDISPSDYMSRITERIDFLKQKVYAWANRIRRYKRRVERYTLNRTFQSDERWVYRAWERPDQDVSDMRLPDDDAMCSFWRSIWSVPVSHTEGEWTREVERACDPIPEMGAITISPQDVAYAVRPLPNWKSPGPDGLHNFWLKWIQRSHARLATLFQTALESASLPKFLTTGITHLLHKSGSTAEPKNYRPITCLPTIYKVLTSILRAKITKHIDDNSIMSASQNGCRNGSRGTKELLLIDMAISQQVRRSRRDLSTCWIDYKKAYDSVPHTWLMRVLELYKVDATLRNFLSLCMRQWNTVLRYPGCRPIQRNSEPIRIERGIFQGNSLSPLWFCLALNPLSTLLEDSGLGYRLRRGGQVISHLLYMDDLKLFAPNDSQLMELLKVTETFSSAISMEFGVDKWAVMHVKRGEIVESVGTQLSDSIHLRSLSANETYKYLGMSEALGINVADMKQSLKERFFGRLRKVFNSLLSGGNKVRAFNGWVMPVLMYSFGILKWTQTELDALDRKVRTLLTTYRMHHPRSSVMRLYIPRSCGGRGFLNAKTLHNREICSLREYFLEIDVGMHRDVVTVDKGFTPLSLAKENWHKPVVLDTNDRKEVWQSKELHGRFFRALHGPDVDQSASVTWLRSGDLFGETEGFVCAIMDEVMMTNNYRRFIVKDGTVDIICRACHRPGESIRHIISGCSRLANGEYLHRHNLVARIIHQQLALKYSLVESEVPHYRYEPDPVLENGNITLYWDRSIITDRTVVANKPDIVVVDRSERRAMIIDITVPHDENLVKAEKDKQIKYIDLAREVVDMWDVDSAIIVPIVVSANGLIAKSLDQYLRRLSLGSWIKGIDTESGTPGHGSYC

SEQ ID NO: 13742 - protein, 1198 aa, Ochropleura plecta
MITRLAARQHARLPPPDSPLSSASPPPEPSLIVSAVTPAVAVASSSSDEYFSPPTTPPPACRRGGRRPPDGLGLRGPLASDRVPAPGGSVQRMRWTSSINENVMRSYYGATEGGNNLTAYRVRMLSLFQVLEPAVNVSAQRLSDQVRVIQRNRMLDDTVLDRLRTEMQSSQVITSSSQAVVPPQSHQLVSHADEVSNDMATNVSTQCNEEMRIALEGAIREYRYISPELRPRLPRLPMHNKNRALVAVLDSQLSNYFDNCENLTDAHSILYCAAVAACRVAHVKFPDDGATRPKPAVPFWQCRIERRIGVARALIGKLICFREGNTRPRVMRFVRRAFAGTDISPPDYMSHITERIDFLKQKVYAWANRIRRYKRRVERYTLNRTFQSDERWVYRAWERPDQGVSDTHLPDDDAMCLFWRNIWSVPVSHTEGEWTREVERACDPIPEMGALTISPQDVACAVRPLPNWKSPGPDGLHNFWLKWIQRSHARLATLFQTALESGSLPKFLTTGMTHLLHKSGSTTEPKNYRPITCLPTIYKVLTSILRAKITKHIDDNSIMSASQNGCRNGSRGTKELLLIDMAISQQVRRSRRHLSTCWIDYKKAYDSVPHTWLMRVLELYKVDATLCTFLSSCMRQWNTVLRYPGCRQIQRNSEPIRIERGIFQGDSLSPLWFCLALNPLSTLLEDSGLGYRLRRGGRVISHLLYMDDLKLFAPNDSQLMELLKVTETFSSAISMEFGVDKCAVMHVKRGEIVESVGTQLSDSIHLRSLSANETYKYLGMSEALGINVADMKQSLKERFFGRLRKVFNSLLSGGNKVRAFNGWVMPVLMYSFGILKWTQTELDALDRKVRTLLTAYRMHHPRSSVMRLYIPRSCGGRGFLNAKTLHNREICSLREYFLEADVGMHRDVVTVDKGFTPLSLAKENWRKPVVLDTNDRREVWQSKELHGRFFRALHGPDVDQPASVAWLRSGDLFGETEGFVCAIMDEVMMTNNYRRFIVKDGTVDICRACHRPGESIRHIISGCSRLANGEYLHRHNLVARIIHQQLALKYSLVESEVPYYRYEPDPVLEHGNITLYWDRSIITDRTIVANKPDIVVVDRSERRAMIVDITVPHDENLVKAEKDKQIKYIDLAREVVDMWDVDSAIIVPIVVSANGLIAKSLDQHLRRLSLGSWIKGLIQKAVLLDTARIVRRFLSLEP

SEQ ID NO: 13743 - protein, 1197 aa, Ochropleura plecta
MLTRSQARSARHPPPGSSLSSASPPPEPSLVVSAVTPAVAVASSSSDEYFSPPTTPPPVRRRGRHRPPDGLGPRGPPASDRVPAPGGSVQRMRWTQSINENVMRSYYGATEGGNNLTAYRVRMLSLFQVLEPAVNVSAQRLSDQVRVIQRNRMLDDTVLDRLRTEMQSSQVITSSSQAVAPPQPHQLVNRANEVSNDMATNVSTQCSEEMRSTLEGAIREYRYMSPELRPRLPRLPMHNKNRALVAALDSQLSSYFDNCENLTDTHSILYCAAVAVCRVAHVKFPDDRATRPKPAVPFWQCRIERRIGAARALIGKLICFREGNTRPRVMRFVRRAFSGTDITPPDYMSRIAERIDFLKQKVYAWANRIRRYKRRVERYTQNRTFQSDERWVYRAWERPDQGVSDTHLPDDNAMCLFWRSIWSVPVSHTEGEWTREVERACDPIPEMGALTISPQDVACAVRPLPNWKSPGPDGLHNFWIKWIQRSHVRLAALFQTALESGSLPKFLTTGITHLLHKSGSTAEPKNYRPITCLPTLYKVLTSILRAKITKHIDDNSIMSASQNGCRNGSRGTKELLLIDMAISQQVRRSRRHLSTCWIDYKKAYDSVPHTWLMRVLELYKIDATLRTFLISCMRQWSTVLRYPGCRQIQRNSEPIRIERGIFQGDSLSPLWFCLALNPLSTLLENSGLGYRLRRGGQVISHLLYMDDLKLFAPNDLQLMELLKVTETFSSSIRMEFGVDKCAVMHVKRGEIVESVGTQLSDSINLRSLSATETYKYLGMSEALGINVADMKQSLKERFFGRLRKVFNSLLSGGNKVRAFNGWVMPVLMYSFGILKWTQTELDALDRKVRTLLTTFRMHHPRSSVMRLYIPRSCGGRGFLNAKTLHNREICSLREYFLETDVGMHRDVVAVDKGFTPLSLAKENWRKPVVLDTNDRREVWQSKELHGRFFRALHGPDVDQPASVAWLRSGDLFGETEGFVCAIMDEVMMTNNYRRFIVKDGTVDICRACHRPGESIRHIISGCSRLANGEYLHRHNLVARIIHQQLALKYSLVESEVPYYRYEPDPVLEHGNITLYWDRSIITDRNIVANKPDIVVVDRSERRAMIVDITVPHDENLVKAEKDKQIKYIDLAREVVDMWDVDSAIIVPIVVSANGLIAKSLDQHLRRLSLGSWIKGLIQKAVLLDTARIVRRFLSPEP

SEQ ID NO: 13744 - protein, 1198 aa, Ochropleura plecta
MLTRAAQARNARHPPPGSSLSSASPPPEPSLVVSAVTPAVAVASSSSDEYFSPPTTPPPVRRRGRHRPPDGLGPRGPPASDRVPAPGGSVQRMRWTQSINENVMRSYYGATEGGNNLTAYRVRMLSLFQVLEPAVNVSAQRLSDQVRVIQRNRMLDDTVLDRLRTEMQSSQVITSSSQAVVPPQPHQLINRVNEVSNDVATNVSTQCSEEMRSTLEGAIREYRYISPELRPRLPRLPMHNKNRALVAALDSQLSSYFDNCENLTDAHSILYCAAVTVCRVAHVKFPDDRATRPKPAIPFWQCRIERRIGAARALIGKLTCFREGNTRPRVMRFVRRAFAGTDISPPDYISRIAERIDFLKQKVYAWANRIRRYKRRVERYTQNRTFQSDERWVYRAWERPDQGVSDTRLPDDDAMSLFWRSIWSVPVSHTEGEWTREVERACDPIPEMGALTISPQDVACAVRPLPNWKSPGPDGLHNFWIKWIQRSHVRLAALFQSALESGSLPKFLTTGITHLLHKSGSTAEPKNYRPITCLPTLYKVLTSILRAKITKHIDDNSIMSASQNGCRNGSRGTKELLLIDMAISQQVRRSRRHLSTCWIDYKKAYDSVPHTWLMRVLDLYKIDATLRTFLISCMRQWSTVLRYPGCRQIQRNSEPIRIERGIFQGDSLSPLWFCLALNPLSTLLENSGLGYRLKRGGQVISHLLYMDDLKLFAPNDLQLMELLKVTETFSSAIRMEFGVDKCAVMHVKRGEIVESVGTQLSDSINLRSLSATETYKYLGMSEALGINVADMKQLLKERFFGRLRKVFNSLLSGGNKVRAFNGWVMPVLMYSFGILKWTQTELDALDRKVRTLLTAFRMHHPRSSVMRLYIPRSCGGRGFLNAKTLHNREICSLREYFLETDVGMHRDVVAVDKGLTPLSLAKENWRKPVVLDTNDRREVWQSKELHGRFFRALHGPDVDQSASVAWLRSGDLFGETEGFVCAIMDEVMMTNNYRRFIVKDGTVDICRACHRPGESIRHIISGCSRLANGEYLHRHNLVARIIHQQLALKYNLVESEVPYYRYEPDPVLEHGYITLYWDRSIITDRTVVANKPDIVVVDRSERRAMIVDITVPHDENLVKAEKDKQIKYIDLAREVVDMWDVDSAIIVPIVVSANGLIAKSLDQNLRRLSLGSWIKGLIQKAVLLDTARIVRRFLSLEP

SEQ ID NO: 13745 - protein, 1200 aa, Hecatera dysodea
MLTRSRTRAQTTQSTSSGSSLSSASQPPGPTPAVSPEIPVAAVASSSSDEYFSPPTTPPPARRRGRGRPPTSLGPRGPPASDRVPAIGGSVQRMRWTQSINENVMRSYFGATEGGTNLTAYRGRMLSMFQVLEPAVNVSAQRLSDQVRVIQRNRMLDDAVLDRLRLESRSSRVSPASPPAAVQIQPSISPRPDHVSEDVDDGAITVSTQCNERLRSALEDAFREYRSTPPGLRPRLPRLPMHNKNRALVCALDSQLENCFNSSKDLADTHSILYCAAAAACRVAHVKFPNSDRAARPAVPAWQCRIERRIGEARALIGKLICFREGNTRRRVMRFVRRAFSGTDISPRDYLTRVTERIDFLKQKVYAWASRIRRYKRRVERYTQNRTFQSNERWVYRAWERPDQVVTDTHLPDEDAMCSFWRSIWSVPVSHTEGDWTREVERTCDPIPEMGAITISPQDVARAVRPLPNWKSPGPDELHNFWIKWFTRSHARLASQFQSALESRSLPQFLTTGITHLLHKSGSTAEPKNYRPITCLPTVYKVLTSILRAKINDHIESNSIMSTSQNGCRNGARGTKELLLIDVAISQQVRRSRKDLSTCWIDYKKAYDSVPHTWLMRVLELYKVDAVLRTFLMSCMGQWRTVLHYPGCRQTQANSEPIRIERGIFQGDSLSPLWFCLALNPLSTLLEGSGQGYRLRRGGQVISHLLYMDDLKLFAPNNLQLMKLLKVTETFSSDISMEFGVDKCAVMHVKRGEIMESVGTQLSDSIYLRSLCSTETYKYLGMSEALGINATSVKQSLKERFFGRLNKVLNSLLSGGNKVRAFNGWVMPVLMYSFGILKWTQTELDALDRRVRSLLTANRMHHPRSSVMRLYIPRKCGGRGFLNAKTLHNREVCSLREYFLEADVGMHRDVVAVDKGLTSLSLANENWRKPVVLDTNDRREVWQSKELHGRFYRVLHGPDVDFLASVAWLRFGDLFGETEGFICAITDEVMMTNNYRKYIVKDGTVDICRACHRPGESIRHIISGCSSLANGDYLHRHNLVARIIHQQLALKYNLVESEVPYYRYVPDPVLENGNCTLYWDRSIITDRTIVANKPDIVVIDRLERRAMIVDIAVPHDENLVKAEKDKQSKYLDLAREVVDMWNVNTAVIVPIIVTANGIIAKSLDQHLKRLSLGSWIKGLIQKAVLLDTARIVRRFLSREP

SEQ ID NO: 13746 - protein, 1110 aa, Hecatera dysodea
MRWTETINENVMRSYYGATEGGTNLTAYRGRMLSLFQVLEPAVNVSAQRLSDQVRVIQRNRMLDDAVLDRLRLESRNSRVSPASPPAAVQIQPSISPRPDHVSEDVDDGTISVSTQCNERLRSALEDAFREYRSTPPELRPRLPRLPMHKKNRALVCALDSQLSIYFDSSENLTDTHSILYCGAAAACRVAHVKFPNSDRVARPAVPAWQCRIERRIGEARALIGKLICFREGNTRRRVMRFVRRAFSGTDISPRDYLTRVTERIDFLKQKVYAWANRIRRYKRRVERYTQNRTFQGNERWVYRAWERPDQGVTDTRLPDDEAMLSFWRNIWSVPVSHTEGDWTREVERACDPIPEMGAINISPQDVARAVRPLPNWKSPGPDGLHNFWIKWFKGSHARLASQFQSALGSGSLPKFLTTGITHLLHKSGSTAEPKNYRPITCLPTVYKVLTSILRAKINNHIDSNSIMSASQNGCRNGSRGTKELLLIDVAISQQVRRSRRDLSTCWIDYKKAYDSVPHTWLMRVLELYKVDAVLRTFLMSCMGQWSTVLHYPGCRQTQANSEPIRIERGIFQGDSLSPLWFCLALNPLSTLLEGSGQGYRLRRGGQVISHLLYMDDLKLFAPNNFQLMKLLKVTETFSSDISMEFGVDKCAVMHVKRGEIMESVGTQLSDSILLRSLCSTETYKYLGMSEALGINATGVKQSLKERFFGRLNKVLNSLLSGGNKVRAFNGWVMPVLMYSFGILKWTQTELDALDRRVRSLLTANRMHHPRSSVMRLYIPRKCGGRGFLNAKTLHNREICSLREYFLEADVGMHRDVVAVDKGLTPLSLANENWRKPVVLDTNDRRVVWQSKELHGRFYRVLHGPDVDFLASVAWLRFGDLFGETEGFICAITDEVMMTNNYRKYIVKDGTVDICRACHRPGESIRHIISGCSSLANGDYLHRHNLVARIIHQQLALKHNLVESEVPYYRYAPDPVLENGNCTLYWDRSIITDRTIVANKPDIVVIDRLERRAMIVDIAVPHDENLVKAEKDKQSKYLDLAREVVDMWNVNTAVIVPIVVTANGIIAKSLDQHLKRLSLGSWIKGLIQKAVLLDTARIVRRFLSGSPDHR

SEQ ID NO: 13747 - protein, 1200 aa, Hecatera dysodea
MLTRSRTREQTAQATSSGSSLSSASQPPGPAPSVSPEIPVAAVASSSSDEYFSPPTTPPPARRRGRGRPPTSLGPRGPPASDRVPAIGGSVQRMRWTETINENVMRSYYGATEGGTNLTACRGRMLSLFQVLEPAVNVSAQRLSDQVRVIQRNRMLDDAVLDRLRLESRNSRVSPASPPAAVQIQPSISPRPDHVSEDVDDGTISVSTQCNERLRSALEDAFREHRSTPPELRPRLPRLPMHKKNRALVCALDSQLSIYFDSSENLTDTHSILYCGAAAACRVAHVKFPNSDRVARPAVPAWQCRIERRIGEARALIGKLICFREGNTRRRVMRFVRRAFSGTDISPRDYLTRVTERIDFLKQKVYAWANRIRRYKRRVERYTQNRTFQGNERWVYRAWERPDQGVTDTRLPDDEAMLSFWRNIWSVPVSHTEGDWTREVERACDPIPEMGAINISPQDVARAVRPLPNWKSPGPDGLHNFWIKWFKGSHARLASQFQSALGSGSLPKFLTTGITHLLHKSGSTAEPKNYRPITCLPTVYKVLTSILRAKINNHIDSNSIMSASQNGCRNGSRGTKELLLIDVAISQQVRRSRRDLSTCWIDYKKAYDSVPHTWLMRVLELYEVDAVLRTFLMSCMGQWSTVLHYPGCRQTQGNSEPIRIERGIFQGDSLSPLWFCLALNPLSTLLEGSGQGYRLRRGGQVISHLLYMDDLKLFAPNNLQLMKLLKVTETFSSDISMEFGVDKCAVMHVKRGEIMESVGTQLSDSILLRSLCSTETYKYLGMSEALGINATGVKQSLKERFFGRLNKVLNSLLSGGNKVRAFNGWVMPVLMYSFGILKWTQTELDALDRRVRSLLTANRMHHPRSSVMRLYIPRKCGGRGFLNAKTLHNREICSLREYFLEADVGMHRDVVAVDKGLTPLSLANENWRKPVVLDTNDRRVVWQSKELHGRFYRVLHGPDVDFLASVAWLRFGDLFGETEGFICAITDEVMMTNNYRKYIVKDGTVDICRACHRPGESIRHIISGCSSLANGDYLHRHNLVARIIHQQLALKYNLVESEVPYYRYAPDPVLENGNCTLYWDRSIITDRTIVANKPDIVVIDRLERRAMIVDIAVPHDENLVKAEKDKQSKYLDLAREVVDMWNVNTAVIVPIVVTANGIIAKSLDQHLKRLSLGSWIKGLIQKAVLLDTARIVRRFLSREP

SEQ ID NO: 13748 - protein, 1196 aa, Hecatera dysodea
MLTRAAARRARLPPPASSLSSASPPPEPSPTVSAATPAVAVASSSSDEYFSPPTSPPPARRRRGRRPPDGLGPRGPPVSDRVPAPGGSVQRMRWTQTINENVMRSYYGATEGGTNLTAYRGRMLSLFQVLEPAVNVSAQRLSDQVRVIQRNRMLDDSVLDRLRTEICSHVIVPSPQTVAPPQLTQIPCHADEENNDRVTNVSTQCNDELRSALESAIREYRYVSPELRPRIPRLPMHNKNRALVAALDSQLSNYFDNCEDLTDAHSIMYCAAVAACRVAHVKMPSDRVTRPKVAVPAWQCRIERRIGGARALIGKLICFREGNTRPRVMRFVRRAFSGTDISPSDYLSRVTERIDFLKQKVYAWANRIRRYKRRVERYTQNRTFRSNERWVYKAWERPDQDVTDMHPPDDDAMCSFWRNIWSVPVSHTEGDWIREVERACDPLPEMGAIIISPHDVARAVRPLPNWKSPGPDGLHNFWIKWFKGSHACLASRYQAALESGSLPEFFMTGVTHLLHKSGSTAEPKNYRPITCLPTVYKVLTSILRDKINQHINSNNIMSASQNGCRNGSRGTKELLLIDMVISQQVRRSRKDLSTCWIDYKKAYDSVPHSWLMRVLELYKIDTTLRTFLMSCMGQWRTVLRYPGCRNIQRNSEPVRIERGIFQGDSLSPLWFCLALNPLSTLLENSGLGYRLRRGGQVISHLLYMDDLKLFAPTNLQLMELLKVTETFSNAIRMEFGVDKCAVMHVKRGEIMESVGTQLSDSINLRSLSSTETYKYLGMSEALGINVTDMKQSLRERFFGRLKKVLNSLLSGGNKVRAFNGWVMPVLMYSFGVLKWTQTELDALDRRVRTLLTAYRMHHPRSSVMRLYIPRKCGGRGFLNAKTLHNREICSLREYFLAVDVGMHRDVVAVDKGLTPLSLANENWRKPAVLDTNDRRAVWQSKELHGRFFRALHGPDVDQLASVAWLRFGDLFGETEGFVCAIMDEVIMTRNYRRFIVKDGTVDICRACHRPGESIRHIVSGCSSLANGEYLHRHNLVARIIHQQLALKYSLVESEVPYYRYVPDPVLDNGNITLYWDRSIITDRTIVANKPDIVVVDRIVRRAMIVDITVPHDENLVKAEKDKQIKYLDLAREVVDMWDVDSAIIVPIVVSVNGLIAKSLDQHLRRLTLGGWIKGLIQKAVLLDTARIVRRFLSLEP

SEQ ID NO: 13749 - protein, 1200 aa, Mythimna impura
MLTRAAARRARLPPPASSLSSASPPPESSPTVSAVTPAVAVASSSSDEYFSPPTSPPPARRRRGRRPPSGLGPRGPPASDRVPAPGGSVQRMRWTQSINENVMRAYYGATEGGNNLTAYRVRMLSLFQVLEPAVNVSAQRLSDQVRVIQRNHMLDDTVLDRLRTEMSNHAIAPSSQPVVPVMVPPSYHLSDHADEEITDMVTHVSTQCNNELRSALECAIREYRNMPLELRPRLPRLPMHNKNKALVAALDLQLSNYFDDCEDLTDTHSIMYCAAVAACRVAHVKFPSCDVSTRPKPAVPAWQCRIERRIGGARALIGKLICFREGNTRPRVMRFVRRAFSGTDISPRDYMSRVTERIDFLKQKVYAWANRIRRYKRRVERYTQNRTFRSNERWVYRAWERPDQGVTDTRLPDDDAMSSFWRSIWSVPVSHTEGDWTREVERACDPIPQMGAIDISPQDVARAVRPLPNWKSPGPDGLHNFWIKWFTRSHARLAYQFQSALESGSLPQFLTTGITHLLHKSGSTAEPKNYRPITCLPTVYKVLTSILRSKINSHIDKNLIMSPSQNGCRNGSRGTKELLLIDMTISQQVRRFRKDLSTCWIDYKKAYDSVPHTWLMRVMELYKIDTTLRTFLMSCMRQWSTVLRYPGCRHIQRNSEPVRIERGIFQGDSLSPLWFCLALNPLSTLLENSGLGYRLKRGGQVISHLLYMDDLKLFAPNNLQLMELLKVTETFSSAIRMEFGVDKCAVMHVKRGEVVESVGTQLTDSINLRSLSPTETYKYLGMSEALGINITDMKQSLKERFFGRLKKVFNSLLSGGNKVRAFNGWVMPVLMYSFGVLKWTQTELDALDRRVRTLLTAYRMHHPRSSVMRLYIPRKCGGRGFLNAKTLHNREVCSLREYFLATDVGMHRDVVAVDKGLTPLSLANENWRKPVVLDTNDRREVWQSKELHGRFFRAFHGPDVDQLASVAWLRFGDLFGETEGFVCAIMDEVIMTNNYRRFIVKDGTVDICRACHRPGESIRHIISGCSRLANGEYLHRHNLVARIIHQQLALKYSLVESEVPYYRYEPDPVLDNGHITLYWDRSIITDRTIVANKPDIVVVDRSERRAMIVDISVPHDENLVKAEKDKQIKYIDLAREVVDMWDVDSAIIVPIVVSANGLIAKSLDQHLRRLALGGWIKALIQKAVLLDTARIVRRFLSLEP

SEQ ID NO: 13750 - protein, 1048 aa, Mythimna impura
MLDDTVLDRLRTEMSNHAIAPSSQPVVPVMVPPSYHLSDHADEEITDMVTHVSTQCNNELRSALECAIREYRNMPLELRPRLPRLPMHNKNKALVAALDLQLSNYFDDCEDLTDTHSIMYCAAVAACRVAHVKFPNCDVATRPKPAVPAWQCRIERRIGGARALIGKLICFREGNTRPRVMRFVRRAFSGTDISPRDYMSRVTERIDFLKQKVYAWANRIRRYKRRVERYTQNRTFRSNERWVYRAWERPDQGVTDARLPDDDAMSSFWHSIWSVPVSHTEGDWTREVERACDPIPQMGAIDISPQDVARAVRPLPNWKSPGPDGLHNFWIKWFTRSHARLAYQFQSALESGSLPQFLTTGITHLLHKSGSTAEPKNYRPITCLPTVYKVLTSILRSKINSHIDKNLIMSPSQNGCRNGSRGTKELLLIDMTISQQVRRFRKDLSTCWIDYKKAYDSVPHTWLMRVLELYKIDTTLRTFLMSCMRQWSTVLHYPGCRHIQRNSEPVRIERGIFQGDSLSPLWFCLALNPLSTLLENSGLGYRLKRGGQVISHLLYMDDLKLFAPNNLQLMELLKVTESFSSAIRMEFGVDKCAVMHVKRGEVVESVGTQLTNSINLRSLSPTETYKYLGMSEALGINITDMKQSLKERFFGRLKKVFNSLLSGGNKVRAFNGWVMPVLMYSFGVLKWTQTELDALDRRVRTLLTAYRMHHPRSSVMRLYIPRKCGGRGFLNAKTLHNREVCSLREYFLATDVGMHRDVVTVDKGLTPLSLANENWRKPVVLDTNDRREVWQSKELHGRFFRAFHGPDVDQLASVAWLRFGDLFGETEGFVCAIMDEVIMTNNYRRFIVKDGTVDICRACHRPGESIRHIISGCSRLANGEYLHRHNLVARIIHQQLALKYSLVESEVPYYRYEPGPVLDNGHTTLYWDRPIITDRTIVANKPDIVVVDRSERRAMIVDISVPHDENLVKAEKYKQIKYIDLAREVVDMWDVDSAIIVPIVVSANGLIAKSLDQHLRRLALGGWIKALIQKAVLLDTARIVRRFLSLEP

SEQ ID NO: 13751 - protein, 960 aa, Mythimna impura
MHKRNRALVCALDSQLSNCFDSSKDLTDTHSILYCAAVAACRVAHVKFPNCDRATRPGVPAWQCRIEHRIGEARALIGKLICFREGNTRPRVMRFVRRAFSGTDISPRDYLPCVTERIDFLKQKIYAWANRIRRYKRRVERYTRNRTFQSNERWVYRDWERSDQGVTDTRLPDDDAMCSFWHSIWSAPVSHTEGDWIREVERACDLLPEMGAITISPQDVARAVRPLPNWKSPGPDGLHNFWVKWFQRSHARLASQFQSALESGLLPQFLTTGITHLLHKSGSTAEPKNYRPITCLPTVYKVLTSILRAKINSHIETNSIMSASQNGCRNGSRGTKEVLLIDIAINQQVRRSRKNLSACWIDYKKAYDSVPHTWLMRVLELYKVDATLRTFLMSCMGQWRTVLHYPGCRQIQENNEPIRIERGIFQGDSLSPLWFCLALNPLSTLLEGSGLGYRLKRGGQVISHLLYIDDLKLFAPNDLQLEELLKVTETFSSAIRMEFGVDKCAVIHVKRGEIMESVGIQLSDSIHLRSLCSTETYKYLGMSESLGINTDDVKQSLKERFFGRLNKVLNSLLSGGNKVRAFNGWVMPVLMYSFGILKWTQTELDALDRRVRTLLTANRMHHPRSSVMRLYIPRKCGGRGFLNAKTLHNREVCSLREYFLKTDVGMHRDVVAVDKGLTPLSLADENWRKPIVLDTNDRREVWQSKELHGRFYRALHGPDVDLLASVSWLRFGDLFGETEGFVFAIMDEVMMTNNYRKYIVKDGTVDICRACHRPGESIRHIISGCSHLANGDYLHRHNLVARIIHQQLALKYNLVESEVPYYRYVPDPVLDNGNITLYWDRSIITDRTIVANKLDIVVIDRLERRTMIVDIAVPHDENLVKAEKDKQTKYLDLAREVLDMWEVDRAIIVPIVVTANGLIAKSLEQHLRRLSLGSWIKGLIQKAVLLDTARIVRRFLSQEP

SEQ ID NO: 13752 - protein, 1200 aa, Mythimna impura
MLTRAAARRARPPPPDSSLSSASPPPEPSPIVSAVTSAAAVASSSSDEYFSPPTTPPPARRRGGRRPPSGLGPRGPPASDRVPAPGGSVQRMRWTRSINENVMRSYYGATEGGNNLTAYRVRMLSLFQVLEPAVNVSAQRLSDQVRVIQRNHMLDDTVLDRLRTEMGSHAIASSSQTVAPSQVSPSNHLPNHADEESTDMVTHVSTQCSNELRSALECAIREYRNMPLELRPRLPRLPMCNKNKALVAALDSQLSNYFDDCEDLTDTHSIMYCAAVAACRVAHVKFPNSDVATRPKPAVPAWQCRIERRIGGARALIGKLICFREGNTRPRVMRFVRRAFSGTDISPRDYMSCVTERIDFLKQKVYAWANRIRRYKRRVERYTQNRTFRSNERWVYRAWEQPDQGGADTRLPDDDAMSSFWRNIWSVPVSQTEGGWTREVERACEPIPEMGAITISPQDVARAVRPLPNWKSPGPDGLHNFWIKWLQRSHARLASQYQTALESGSLPEFLTTGVTHLLHKSGSTAEPKNYRPITCLPTVYKVLTSILRAKINHHVDNNAIMSASQNGCRNGSRGTKELLLIDMAISQQVRRSRKDLSTCWIDYKKAYDSVPHTWLMRVLELYKIDATLRTFLMSCMRQWRTVLRYPGCRHIQRNSEPVRIERGIFQGDSLSPLWFCLALNPLSTLLENSGLGYRLKRGGQVISHLLYMDDLKLFAPNNLQLMELLKVTETFSSAIRMEFGVEKCAVMHVKRGEIVESVGTQLSDSINLRSLSPTETYKYLGMSEALGINATDMKQTLRERFFGRLKKVFNSLLSGGNKVRAFNGWVMPVLMYSFGVLKWTQTELDALDRRVRTLLTAYRMHHPRSSVMRLYIPRKCGGRGFLNAKTLHNREVCSLREYFLTADVGMHRDVVAVDKGLTPLSLANESWRKPVVLDTNDRREVWQSKELHGRFFRALHGPDVDQLASVAWLRVGDLFGETEGFVCAIMDEVIMTNNYRRFIVKDGTVDICRACHRPGESIRHIISGCSRLANGEYLHRHNLVARIIHQQLALNYSLVESEVPYYRYVPDPVLDNGDITLYWDRSIITDRTIVANKPDIVVVDRRERRTMIVDISVPHDENLVKAEKDKQIKYIDLAREVVDMWDVDSAIIVPIVVSANGLIAKSLDQHLRRLALGGWIKGLIQKAVLLDTARIVRRFLSLEP

SEQ ID NO: 13753 - protein, 1046 aa, Mythimna impura
MLDDAVLDRLRLESQSSRVSPATTPAAVQRLPTASPRPVQVGDADDDAAISVSTQCNDRLRGALKDAFREYRSTPPGLRPRLPRLPMHKRNRALVCALDSQLSNCFDCSKDLTDTHSILYCAAVAACRVAHVKFPNCDRATRPAVPAWQCRIEHRIGEARALIGKLICFREGNTRPRVMRFVRRAFSGTDISPRDYLPCVTERIDFLKQKIYAWANRIRRYKRRVERYTRNRTFQSNERWVYRDWERSDQGVTDTRLPDDDAMCSFWRSIWSAPVSHTEGDWIREVERACDLLPEMGAITISPQDVARAVRPLPNWKSPGPDGLHNFWVKWFQRSHARLASQFQSALESGSLPQFLTTGITHLLHKSGSTAEPKNYRPITCLPTVYKVLTSILRAKINSHIETNSIMSASQNGCRNGSRGTKELLLIDIAISQQVRRSRKNLSACWIDYKKAYDSVPHTWLMRVLELYKVDATLRTFLMSCMGQWRTVLHYPGCRQIQENNEPIRIERGIFQGDSLSPLWFCLALNPLSTLLEGSGLGYRLKRGGQVISHLLYMDDLKLFAPNNLQLVELLKVTETFSSAIRMEFGVDKCAVIHVNRGEIMESVGIQLSDSIHLRSLCSTETYKYLGMSESLGINTDDVKQSLKERFFGRLNKVLNSLLSGGNKVRAFNGWVMPVLKYSFGILKWTQTELDALDRRVRTLLTANRMHHPRSSVMRLYIPRKCGGRGFLNAKTLHNREVCSLREYFLKTDVGMHRDVVAVDKGLTPLSLANENWRKPIVLDTNDRREVWQSKELHGRFYRALHGPDVDLLASVSWLRFGDLFGETEGFVFAIMDEVMMTNNYRKYIVKDGTVDICRACHRPGESIRHIISGCSHLANGDYLHRHNLVARIIHQQLALKYNLVESEVPYYRYVPDPVLDNGNITLYWDRSIITDRTIVANKPDIVVIDRLERRTMIVDIAVPHDENLVKAEKDKQTKYLDLAREVVDMWEVDRAIIVPIVVTANGLIAKSLEQHLRRLSLGSWIKGLIQKAVLLDTARIVRRFLSQEP

SEQ ID NO: 13754 - protein, 1200 aa, Mythimna impura
MLTRAAARRARLPPPASSLSSASPPPESSPTVSAVTPAVAVASSSSDEYFSPPTSPPPARRRRGRRPPSGLGPRGPPASDRVPAPGGSVQRMRWTQSINENVMRAYYGATEGGNNLTAYRVRMLSLFQVLEPAVNVSVQRLSDQVRVIQRNHMLDDTVLDRLRTEMSNHAIAPSSQPVVPVMVPPSYHLSDHADEEITDMVTHVSTQCNNELRSALECAIREYRNMPLELRPRLPRLPMHNKNKALVAALDLQLSNYFDDCEDLTDTHSIMYCAAVAACRVAHVKFPSCDVSTRPKPAVPAWQCRIERRIGGARALIGKLICFREGNTRPRVMRFVRRAFSGTDISPRDYMSRVTERIDFLKQKVYAWANRIRRYKRRVERYTQNRTFRSNERWVYRAWERPDQGVTDTRLPDDDAMSSFWRSIWSVPVSHTEGDWTREVERACDPIPQMGAIDISPQDVARAVRPLPNWKSPGPDGLHNFWIKWFTRSHARLAYQFQSALESGSLPQFLTTGITHLLHKSGSTAEPKNYRPITCLPTVYKVLTSILRSKINSHIDKNLIMSPSQNGCRNGSRGTKELLLIDMTISQQVRRFRKDLSTCWIDYKKAYDSVPHTWLMRVLELYKIDTTLRTFLMSCMRQWSTVLRYPGCRHIQRNSEPVRIERGIFQGDSLSPLWFCLALNPLSTLLENSGLGYRLKRGGQVISHLLYMDDLKLFAPNNLQLMELLKVTETFSSAIRMEFGVDKCAVMHVKRGEVVESVGTQLTDSINLRSLSPTETYKYLGMSEALGINITDMKQSLKERFFGRLKKVFNSLLSGGNKVRAFNGWVMPVLMYSFGVLKWTQTELDALDRRVRTLLTAYRMHHPRSSVMRLYIPRKCGGRGFLNAKTLHNREVCSLREYFLATDVGMHRDVVAVDKGLTPLSLANENWRKPVVLDTNDRREVWQSKELHGRFFRAFHGPDVDQLASVAWLRFGDLFGETEGFVCAIMDEVIMTNNYRRFIVKDGTVDICRACHRPGESIRHIISGCSRLANGEYLHRHNLVARIIHQQLALKYSLVESEVPYYRYEPDPVLDNGHITLYWDRSIITDRTIVANKPDIVVVDRSERRAMIVDISVPHDENLVKAEKDKQIKYIDLAREVVDMWDVDSAIIVPIVVSANGLIAKSLDQHLRRLALGGWIKALIQKAVLLDTARIVRRFLSLEP

SEQ ID NO: 13755 - protein, 1200 aa, Mythimna impura
MLTRSRAQKLHTHPTSSGSSLSSASQPPGPAPTVSPEIPVAAVASSSSDEYFSPPTTPPPARRRGRGRPPASLGPRGPPASDRVPAAGGSVQRMRWTSSINENVMRSYFGATEGGINLTAYRGRMLSLFQVLEPAVNVSVQRLSDQVRVIQRNRMLDDAVLDRLRLESQSSRVSPATTPAAVQRLPTASPRPDQVGDADDDAAISVSTQCNDRLRGALEDAFREYRSTPPGLRPRLPRLPMHKRNRALVCALDSQLSNCFDSSKDLTDTHSILYCAAVAACRVAHVKFPNCDRATRPAVPAWQCRIEHRIGEARALIGKLICFREGNTRPRVMRFVRRAFSGTDISPRDYLPCVTERIDFLKQKIYAWANRIRRYKRRVERYTRNRTFQSNERWVYRDWERSDQGVTDTRLPDDDAMCSFWRSIWSAPVSHTKGDWIREVERACDLLPEMGAITISPQDVARAVRPLPNWKSPGPDGLHNFWVKWFKRSHARLASQFQSALESGSLPQFLTTGITHLLHKSGSTAEPKNYRPITCLPTVYKVLTSILRAKINSHIETNSIMSASQNGCRNGSRGTKELLLIDIAISQQVRRSRKNLSACWIDYKKAYDSVPHTWLMRVLELYKVDATLRTFLMSCMGQWRTVLHYPGCRQIQENNEPIRIERGIFQGDSLSPLWFCLALNPLSTLLEGSGLGYRLKRGGQVISHLLYMDDLKLFAPNNLQLVELLKVTETFSNAIRMEFGVDKCAVIHVKRGEIMESVGIQLSDSIHLRSLCSTETYKYLGMSESLGINTDDVKQSLKERFFGRLNKVLNSLLSGGNKVRAFNGWVMPVLMYSFGILKWTQTELDALDRRVRTLLTANRMHHPRSSVMRLYIPRKCGGRGFLNAKTLHNREVCSLREYFLKTDVGMHRDVVAVDKGLTPLSLANENWRKPIVLDTNDRREVWQSKELHGRFYRALHGPDVDLLASVSWLRFGDLFGETEGFVFAIMDEVMMTNNYRKYIVKDGTVDICRACHRPGESIRHIISGCSHLANGDYLHRHNLVARIIHQQLALKYNLVESEVPYYRYVPDPVLDNGNITLYWDRSIITDRTIVANKPDIVVIDRLERRTMIVDIAVPHDENLVKAEKDKQTKYLDLAREVVDMWEVDRAIIVPIVVTANGLIAKSLEQHLRRLSLGSWIKGLIQKAVLLDTARIVRRFLSQEP

SEQ ID NO: 13756 - protein, 1200 aa, Mythimna impura
MLTRSRALKLNTHPTSSGSSLSSASQPPGPAPTVSPEIPVAAVASSSSDEYFSPPTTPPPARRRGRGRPPASLGPRGPPASDRVPAASGSVQRMRWTSSINENVMRSYFGATEGGINLTAYRGRMLSLFQVLEPAVNVSVQRLSDQVRVIQRNRMLDDAVLDRLRLESQSSRVSPATTPAAVQRLPTASPRPVQVGDADDDAAISVSTQCNDRLRGALEDAFREYRSTPPGLRPRLPRLPMHKRNRALVCALDSQLSNCFDSSKDLTDTHSILYCAAVAACRVAHVKFPNCDRATRPAVPAWQCRIEHRIGEARALIGKLICFREGNTRPRVMRFVRRAFSGTDISPRDYLSCVTERIDFLKQKIYAWANRIRRYKRRVERYTRNRTFQSNERWVYRDWERPDQGVTDTRLPDDDAMCSFWRSIWSAPVSHTEGDWIREVERACDLLPEMGAITISPQDVARAVRPLPNWKSPGPDGLHNFWVKWFQRSHARLASQFQSALESGSLPQFLTTGITHLLHKSGSTAEPKNYRPITCLPTVYKVLTSILRAKINSHIETNSIMSASQNGCRNGSRGTKELLLMDIAISQQVRRSRKNLSACWIDYKKAYDSVPHTWLKRVLELYKVDATLRTFLMSCMGQWRTVLHYPGCRQIQENNEPIRIERGIFQGDSLSPLWFCLALNPLSTLLEGSGLGYRLKRGGQVISHLLYMDDLKLFAPNNLQLVELLKVTETFSSAIRMEFGVEKCAVIHVKRGEIMESVGIQLSDSIHLRSLCSTETYKYLGMSESLGINTDDVKQLLKERFFGRLNKVLNSLLSGGNKVRAFNGWVMPVLMYSFGILKWTQTELDALDRRVRTLLTANRMHHPRSSVMRLYIPRKCGGRGFLNAKTLHNREVCSLREYFLKTDVGMHRDMVAVDKGLTPLSLANENWRKPIVLDTNDRREVWQSKELHGRFYRALHGPDVDLLASVSWLRFGDLFGETEGFVFAIMDEVMMTNNYRKYIVKDGTVDICRACHRPGESIRHIISGCSHLANGDYLHRHNLVARIIHQQLALKYNLVESEVPYYRYVPDPVLDNGNITLYWDRSIITDRTIVANKPDIVVIDRLERRTMIVDIAVPHDENLVKAEKDKQTKYLDLAREVVDMWEVDRAIIVPIVVTANGLIAKSFEQHLRRLSLGSWIKGLIQKAVLLDTARIVRRFLSQEP

SEQ ID NO: 13757 - protein, 1107 aa, Mythimna impura
MRWTSSINENVMRSYFGATEGGINLTAYRSRMLSLFQVLEPAVNVSVQRLSDQVRVIQRNRMLDDAVLDRLRLESQSSRVSPATTPAAVQRLPTASPRPVQVGDADDDAAISVSTQCNDRLRGALEDAFREYRSTPPGLRPRLPRLPMHKRNRALVCALDSQLSNCFDSSKDLTDTHSILYCAAVAACRVAHVKFPNCDRATRPAVPAWQCRIEHRIGEARALIGKLICFREGNTRPRVMRFVRRAFSGTDISPRDYLPCVTERIDFLKQKIYAWANRIRRYKRRVERYTRNRTFQSNERWVYRDWERSDQGVTDTRLPDDDAMCSFWRSIWSAPVSHTEGDWIREVERACDLLPEMGAITIGPQDVARAVRPLPNWKSPGPDGLHNFWVKWFQRSHARLASQFQSALESGSLPQFLTTGITHLLHKSGSTAEPKNYRPITCLPTVYKVLTSILRAKINSHIETNSIMSASQNGCRNGSRGTKELLLIDIAISQQVRRSRKNLSACWIDYKKAYDSVPHTWLMRVLELYKVDATLRTFLMSCMGQWRTVLHYPGCRQIHENNEPIRIERGIFQGDSLSPLWFCLALNPLSTLLEGSGLGYRLKRGGQVISHLLYMDDLKLFAPNNLQLVELLKVTETFSSAIRMEFGVDKCAVIHVKRGEIMESVGIQLSDSIHLRSLCSTETYKYLGMSESLGINTDDVKQSLKERFFGRLNKVLNSLLSGGNKVRAFNGWVMPVLMYSFGILKWTQTELDALDRRVRTLLTANRMHHPRSSVMRLYIPRKCGGRGFLNAKTLHNREVCSLREYFLKTDVGMHRDVVAVDKGLTPLSLANENWRKPIVLDTNDRREVWQSKELHGRFYRALHGPDVDLLASVSWLRFGDLFGETEGFVFAIMDEVMMTNNYRKYIVKDGTVDICRACHRPGESIRHIISGCSHLANGDYLHRHNLVARIIHQQLALKYNLVESEVPYYRYVPDPVLDNGNITLYWDRSIITDRTIVANKPDIVVIDRLERRTMIVDIAVPHDENLVKAEKDKQTKYLDLAREVVDMWEVDKAIIVPIVVTANGLIAKSLEQHLRRLSLGSWIKGLIQKAVLLDTARIVRRFLSQEP

SEQ ID NO: 13758 - protein, 1200 aa, Mythimna impura
MLTRAAARRARPPPPASSLSSASPPPESSPTVSAVTPAVAVASSSSDEYFSPPTSPPPARRRRGRRPPSGLGPRGPPVSDRVPAPGGSVQRMRWTQSINENVMRAYYGATEGGNNLTAYRVRMLSLFQVLEPAVNVSAQRLSDQVRVIQRNHMLDDTVLDRLRTEMSNHAIAPSSQSVVPVMVPPSYHLSDHADEAITDMVTHVSTQCNNELRSALECAIREYRNMPLELRPRLPRLPMHNKNKALVAALDLQLSNYFDDCKDLTDTHSIMYCAAVAACRVAHVKFPNCDVATRPKPAVPAWQCRIERRIGGARALIGKLICFREGNTRPRVMRFVRRAFSGTDISPRDYMSRVTERINFLKQKVYAWANRIRRYKRRVERYTQNRTFRSNERWVYRAWERPDQGVTDACLPDDDAMSSFWRSIWSVPVSHTEGDWTREVERACDPIPQMGAIDISPQDVARAVRPLPNWKSPGPDGLHNFWIKWFTRSHARLAYQFQSALESGSLPQFLTTGITHLLHKSGSTAEPKNYRPITCLPTVYKVLTSILRSKINSHIDKNLIMSPSQNGCRNGSRGTKELLLIDITISQQVRRSRKDLSTCWIDYKKAYDSVPHTWLMRVLELYKIDTTLRTFLMSCMRQWSTVLRYPGCRHTQRNSEPVRIERGIFQGDSLSPLWFCLALNPLSTLLENSGLGYRLKRGGQVISHLLYMDDLKLFAPNNLQLMELLKVTETFSSAIRMEFGVDKCAVMHVKRGEVVESVGTQLTDSINLRSLSPTETYKYLGMSEALGINITDMKQSLKERFFGRLKKVLNSLLSGGNKVRAFNGWVMPVLMYSFGVLKWTQTELDALDRRVRTLLTAYRMHHPRSSVMRLYIPRKCGGRGFLNAKTLHNREVCSLREYFLAADVGMHRDVVAVDKGLTPLSLANENWRKPVVLDTNDRREVWQSKELHGRFFRALHGPDVDQLASVTWLRFGDLFGETEGFVCAIMDEVIMTNNYRRFIVKDGTVDICRACHRPGESIRHIISGCSRLANGEYLHRHNLVARIIHQQLALKYSLVESEVPYYRYEPDPVLDNGHITLYWDRSIITDRTIVANKPDIVVVDRSERRAMIVDISVPHDENLVKAEKDKQIKYIDLAHEVVDMWDVDSAIIVPIVVSANGLIAKSLDQHLRRLALGGWIKGLIQKVVLLDTARIVRRFLSLEP

SEQ ID NO: 13759 - protein, 1197 aa, Xestia xanthographa
MLTRSAAARRARLPPPDSSLSSASPPPEPSPIVSAVTPAVAVASSSSDEYFSPPTTPPPARRRGGHRPPDGLGPRGPPASDRVPAPGGSVQRMRWTQSINENVMRAYYGATEGGNNLTAYRVRMLSLFQVLEPAVNVSAQRLSDQVRVIQRNRMLDDTVLDRLRTEIQSNHVIVTPSQAVVPPQSSIIPCDNDVSNDMVTNVSNQCNVEMRSALEGAIREYRFMQPDLRPRIPRLPMHNRNRALVAVLDSQLSNYFDNCEDLTDVHSILYCAAVAACRVAHVKFPSDRATRPKPAVPAWQYRIERRIGGARALIGKLVCFREGNTRPRVMRFVRQAFSGTDISPRDYMSRVTERIDFLKQKVYAWANRIRRYKRRVDRYTQNRTFQKDERWVYRAWERPDQGVADTHLPDDDAMCSFWRSIWSVPVSHAEGEWTRVIERACDPISEMGAINISPQDVARAVRPLPNWKSPGPDGLHNFWIKWFTRLHARLATLFQSALESGSLPEFLTTGITHLLHKSGSTAEPKNYRPITCLPTVYKVLTSILRTKISKHIDDNSVMSASQNGCRNGSRGTKELLLIDMAISHQVRRSRKDLSTCWIDYKKAYDSVPHTWLMRVLELYKVDATLRTFLMSCMGQWRTVLRYPGCRQIQRNSEPIRIERGIFQGDSLSPLWFCLALNPLSTLLEDSGLGYRLRKDGQVISHLLYMDDLKLFAPNDLRLMELLKVTETFSNAIRMEFGVDKCAVMHVKRGEIVESVGTQLSDSITLRSLSATETYKYLGMSEALGVNVADMKQSLKERFFGRLKKVLNSLLSGGNKVRAFNGWVMPVLMYSFGILKWTQTELDALDTKVRKLLTAYRMHHPRSSVMRLYIPRKCGGRGFINAKTLHNREICSLREYFLGTDVGMHRDVVTMDKGFTPLSLAKENWRKPPVLDTNDRREVWQSKELHGRFFRALHGPDVDLSASVAWLRSGDLFGETEGFVCAIMDEVMMTNNYRRFIVKDGTVDICRACHRPGESIRHIISGCSRLANGEYLHRHNLVARIIHQQLALKYNLVESEVPYYRYVPDPVLDNGCITLYWDQSIITDRTIVANKPDIVVVDRSERRAMIVDITVPHDENLVKAEKDKQIKYLDLAREVVDMWEVDSAIIVPIVVSAHGLIAKSLDQYLRRLSLGSWIKGLIQKAVLLDTARIVRRFLSLEP

SEQ ID NO: 13760 - protein, 868 aa, Xestia xanthographa
MRFVRRAFSGTDISFRDYLARVTERIDSLKQKICAWASRIRRYKRRVERCTQNRTFQSDERWVYRAWERPDQGVTDTRLPDDSAMYSFWRNIWSVPVSHTEGDWTREVEQACDPIPEMGAIIISPQDVARAVRPLPNWKSPGPDGLHNFWIKWFQRSHARLASQFQSALESGSLPQFLTTGITHLLHKSGSAAEPKNYRPITCLPTVYKVLTSILRAKINQHIDSNSIMSASQNGCRNGSRGTKELLLIDMAISQQVRRSRKNLSTCWIDYKKAYDSVPHTWLMRVLELYKIDATLRTFLMSCMGHWRTVLRYPGCRQIQGNSEPIRIERGIFQGDSLSPLWFCLALNPLSTLLERSGLGYLLRRDGQVISHLLYMDDLKLFAPNNFQLMKLLKVTETFSSAIRMEFGVDKCAVMHVKRGEIMESEGTQLSDSIHLRSLSSTETYKYLGMSEALGINIADMKQSLRERFFGRLNKVLGSLLSGGNKVRAFNGWVMPVLMYSFGILKWTQTELDALDRRVRTLLTANRMHHPRSSVMRLYIPRKCGGRGFLNAKTLHNREVCSLREYFLEADGEMHRDVVSVDKGLTPLSLANENWRKPKVLDTNDRKVEWQSKELHGRFYRALHGPDVDFLPSVSWLRFGDLFGETEGFICAIMDEVMMTNNYRKYIVKDGTVDICRACHRPGESIRHIISGCSSLANGEYLHRHNLVARIIHQQLALKYNLVESEVPYYKYAPDPVLDNGHITLYWDRPITTDRTVVANRPDIVVIDRLERRTMIVDITIPHDENLVKAEKDKQFKYLDLAREVVDMWDVGTAVIVPIVVSANGLIAKSLDQHLRRLSLGSWIKGLIQKAVLLDTARIVRRFLSQEP

SEQ ID NO: 13761 - protein, 1205 aa, Cosmia trapezina
MLTRSRAQHLRNTHPTSSGSSLSSASQLPEPAPDVSQVIPAAAVASSSSDEYFSPPTTPPPVRRRGRGRPPASLGPRGPPASDRVPAPGGSVQRMRWTQTVNENVMRAYFGATEGGSNLTAYRGRMLSLFQVLEPAVNVSAQRLSDQVRVIQRNHMLDDVVLDRLRLESRNSRVTSDSPMVAVQLQNLPSASPRPDRVGEEDDSGAIPVSSQCNVQLRSALEDAFREYRSAPPGLRPRLPRLPMHKKNKALVCALDSQLSNCFDGSKDLADTHSILYCAAVAACRVAHVKFHNNDRVTRPKPAVPTWQCRIERRIGEARALIGKLICFREGNTRRRVMRFVRRAFSGMDISPRDYLTCVTERIDFLKQKICAWANRIRRYRRRVERYTQNRTFQSDERWVYKAWERPDQGVADTRLPDDDAMCSFWRSIWSVPVSHTEGDWTREVERACDHIPQMGALTISPQDVARAVRPLPNWKSPGPDGLHNFWIKWFQRSHARLASQFQSALQSGSLPQFLTTGITHLLHKSGSTAEPRNYRPITCLPTVYKVLTSILRAKINKHIDTNSIMSASQNGCGNGSRGTKELLLIDMTISQQVRRSRKDLSTCWIDYKKAYDSVPHTWLMRVLELYKIDATLRTFLMSCMGQWRTVLRYPGCRNIQRNSEPIRIERGIFQGDSLSPLWFCLALNPLSTLLEDSGLGYRLRRGGQVISHLLYMDDLKLFAPNNLQLMELLKVTETFSSAIRMEFGVDKCAVMHVKRGEIVESVRTQLSDSIHLRSLSSLETYKYLGMSEALGINAADMKQSLRERFFGRLNKVLNSLLSGGNKVRAFNGWVMPVLMYSFGILKWTQTELDALDRRVRTLLTANRMHHPRSSVMRLYIPRKCGGRGFLNAKTLHNREVCSLREYFLEADVGMHREVVSVDKGLTALSLANENWRKPIVLDTNDRREVWQSKELHGRFYRVLHGPDVDFLASVSWLRFGDLFGETEGFVFAIMDEVMMTNNYRKYIVKDGTVDICRACHRPGESIRHIISGCSRLANGDYLHRHNLVARIIHQQLALKYSLVESEVPYYRYVPDPVLENGNITLYWDRSIITDRTIVANKPDIVVIDRLERRTVIVDIAVPHDENLVKAEKDKQIKYLDLAREVVDMWDVDTAIIVPIVVTANGIIAKSLDQHLRRLSLGGWIKGLIQKAVLLDTARIVRRFLSQQP

SEQ ID NO: 13762 - protein, 991 aa, Cosmia trapezina
MRRRSALEDAFREYRSTPPGLRPRLPRLPMHKKNKALVCALDSQLSNCFDGSKDLADTHSILYCAAVAACRVAHVKFHNNDRVTRPKPAVPTWQCRIERRIGEARALIGKLICFREGNTRPRVMRFVRRAFSGMDISPRDYLTCVTERIDFLKQKICAWANRIRRYRRRVERYTQNRTFQSDERWVYRAWERPDQGVADTQLPDDDAMCSFWRSIWSVPVSHTEGDWTREVERACDHIPQMGALTISPQDVARAVRPLPNWKSPGPDGLHNFWIKWFQRSHARLASQFQSALQSGSLPQFLTTGITHLLHKSGSTAEPRNYRPITCLPTVYKVLTSILRAKINKHIDTNSIMSASQNGCGNGSRGTKELLLIDMTISQQVRRSRKDLSTCWIDYKKAYDSVPHTWLMRVLELYKIDATLRTFLMSCMGQWRTVLRYPGCRNIQRNSEPIRIERGIFQGDSLSPLWFCLALNPLSTLLEDSGLGYRLRRGGQVISHLLYMDDLKLFAPNNLQLMELLKVTETFSSAIRMEFGVDKCAVMHVKRGEIVESVRTQLSDSIHLRSLSSLETYKYLGMSEALGINAADMKQSLRERFFGRLNKVLNSLLSGGNKVRAFNGWVMPVLMYSFGILKWTQTELDALDRRVRTLLTANRMHHPRSSVMRLYIPRKCGGRGFLNAKTLHNREVCSLREYFLEADVGMHREVVSVDKGLTPLSLANENWRKPIVLDTNDRREVWQSKELHGRFYRVLHGPDVDFLASVSWLRFGDLFGETEGFVFAIMDEVMMTNNYRKYIVKDGTVDICRACHRPGESIRHIISGCSRLANGDYLHRHNLVARIIHQQLALKYSLVESEVPYYRYVPDPVLENGNITLYWDRSIITDRTIVANKPDIVVIDRLERRTVIVDIAVPHDENLVKAEKDKQIKYLDLAREVVDMWDVDTAIIVPIVVTANGIIAKSLDQHLRRLSLGGWIKGLIQKAVLLDTARIVRRFLSQQP

SEQ ID NO: 13763 - protein, 1193 aa, Cosmia trapezina
MLTRSRAQHLRNTHPTSSGSSLSSASQLPEPAPDVSQVIPAAAVASSSSDEYFSPPTTPPPVRRRGRGRPPASLGPRGPTASDRVPAPGGSVQRMRWTQTVNENVMRAYFGATEGGSNLTAYRGRMFSLFQVLEPAVNVSAQRLSDQVRVIQRNHMLDDVVLDRLRLESRNSRVTSDSPMVAVQLQNLPSASPRPDRVGEEDDSGAISVSSQCNVQLRSALEDAFREYRSTPPGLRPRLPRLPMHKKNKALVCALDSQLSNCFDGSKDLADTHSILYCAAVAACRVAHVKFHNNDRVTRPKPAVPTWQCRIQRRIGEARALIGKLICFREGNTRPRVMRFVRRAFSGMDISPRDYLTCVTERIDFLKQKICAWANRIRRYRRRVERYTQNRTFQSDERWVYRAWERPDQGVADTQLPDDDAMCSFWRSIWSVPVSHTEGDWTREVERACDHIPQMGALTISPQDVARAVRPLPNWKSPGPDGLHNFWIKWFQRSHARLASQFQSALQSGSLPQFLTTGITHLLHKSGSTAEPRNYRPITCLPTVYKVLTSILRAKINKHIDTNSIMSASQNGCGNGSRGTKELLLIDMTISQQVRRSRKDLSTCWIDYKKAYDSVPHTWLMRVLELYKIDATLRTFLMSCMGQWRTVLRYPGCRNIQRNSEPIRIERGIFQGDSLSPLWFCLALNPLSTLLEDSGLGYRLRRGGQVISHLLYMDDLKLFAPNNLQLMELLKVTETFSSAIRMEFGVDKCAVMHVKRGEIVESVRTQLSDSIHLRSLSSLETYKYLGMSEALGINAADMKQSLRERFFGRLNKVLNSLLSGGNKVRAFNGWVMPVLMYSFGILKWTQTELDALDRRVRTLLTANRMHHPRSSVMRLYIPRKCGGRGFLNAKTLHNREVCSLREYFLEADVGMHREVVSVDKGLTPLSLANENWRKPIVLDTNDRREVWQSKELHGRFYRVLHGPDVDFLASVSWLRFGDLFGETEGFVFAIMDEVMMTNNYRKYIVKDGTVDICRACHRPGESIRHIISGCSRLANGDYLHRHNLVARIIHQQLALKYSLVESEVPYYRYVPDPVLENGNITLYWDRSIITDRTIVANKPDIVVIDRLERRTVIVDIAVPHDENLVKAEKDKQIKYLDLAREVVDMWDVDTAIIVPIVVTANGIIAKSLDQHLRRLSLGGWIKGLIQKAVLLVQ

SEQ ID NO: 13764 - protein, 1205 aa, Cosmia trapezina
MLTRSRAQHLRNTHPTSSGSSLSSASQLPEPAPDVSQVIPAAAVASSSSDEYFSPPTTPPPVRRRGRGRPPASLGPRGPPASDRVPAPGGSVQRMRWTQTVNENVMRAYFGATEGGSNLTAYRGRMLSLFQVLEPAVNVSAQRLSDQVRVIQRNHMLDDVVLDRLRLESRNSRVTSDSPMVAVQLQNLPSASPRPDRVGEEDDSGAISVSSQCNVQLRSALEDAFREYRSTPPGLRPRLPRLPMHKKNKALVCALDSQLSNCFDGSKDLADTHSILYCAAVAACRVAHVKFHNNDRVTRPKPAVPTWQCRIERRIGEARALIGKLICFREGNTRPRVMRFVRRAFSGMDISPRDYLTCVTERIDFLKQKICAWANRIRRYRRRVERYTQNRTFQSDERWVYRAWERPDQGVADTQLPDDDAMCSFWRSIWSVPVSHTEGDWTREVERACDHIPQMGALTISPQDVARAVRPLPNWKSPGPDGLHNFWIKWFQRSHARLASQFQSALQSGSLPQFLTTGITHLLHKSGSTAEPRNYRPITCLPTVYKVLTSILRAKINKHIDTNSIMSASQNGCGNGSRGTKELLLIDMTISQQVRRSRKDLSTCWIDYKKAYDSVPHTWLMRVLELYKIDATLRTFLMSCMGQWRTVLRYPGCRNIQRNSEPIRIERGIFQGDSLSPLWFCLALNPLSTLLEDSGLGFRLRRGGQVISHLLYMDDLKLFAPNNLQLMELLKVTETFSSAIRMEFGVDKCAVMHVKRGEIVESVRTQLSDSIHLRSLSSLETYKYLGMSEALGINAADMKQSLMERFFGRLNKVLNSLLSGGNKVRAFNGWVMPVLMYSFGILKWTQTELDALDRRVRTLLTANRMHHPRSSVMRLYIPRKCGGRGFLNAKTLHNREVCSLREYFLEADVGMHREVVSVDKGLTPLSLANENWRKPIVLDTNDRREVWQSKELHGRFYRVLHGPDVDFLASVSWLRFGDLFGETEGFVFAIMDEVMMTNNYRKYIVKDGTVDICRACHRPGESIRHIISGCSRLANGDYLHRHNLVARIIHQQLALKYSLVESEVPYYRYVPDPVLENGNITLYWDRSIITDRTIVANKPDIVVIDRLERRTVIVDIAVPHDENLVKAEKDKQIKYLDLAREVVDMWDVDTAIIVPIVVTANGIIAKSLDQHLRRLSLGGWIKGLIQKAVLLDTARIVRRFLSQQP

SEQ ID NO: 13765 - protein, 1205 aa, Cosmia trapezina
MLTRSRAQQLRNTQPTSSGSSLSSASQLPEPAPDVSQVIPAAAVASSSSDEYFSPPTTPPPVRRRGRGRPPASLGPRGPSASDRVPAPGGSVQRMRWTQTVNENVMRAYFGATEGGSNLTAYRGRMLSLFQVLEPAVNVSAQRLSDQVRVIQRNHMLDDVVLDRLRLESRNSRVTSVSPMVAVQLQNLPSASPRPDCVGEEGDSGAISVSSQCNVQLRSALEDAFREYRSAPPGLRPRLPRLPMHKKNKALVGALNSQLSNCFDGSKDLADTHSILYCAAVAACRVAHVKFPNSDRVPRPKPAVPAWQCRIERRIGEARALIGKLICFREGNTRPRVMRFVRRAFSGTDISPRDYFTCVTERIDFLKQKICAWANRIRRYRRRVERYTQNRTFQSDERWVYRAWERPDQGVADTQLPDDDAMCSFWRSIWSVPVGHTEGDWTRGVERACDHIPQMGALTISPQDVARAVRPLPNWKSPGPDGLHNFWIKWFQRSHARLASQFQSALQSGSLPQFLTTGITHLLHKSGSTAEPRNYRPITCLPTVYKVLTSILRAKINKHIDTNSIMSASQNGCGNGSRGTKELLLIDMTINQQVRRSRKDLSTCWIDYKKAYDSVPHTWLMRVLELYKIDATLRTFLMSCMGQWRTVLRYPGCRNIQRNSEPIRIERGIFQGDSLSPLWFCLALNPLSTLLEDSGLGYRLRRGGQVISHLLYMDDLKLFAPNNLQLMELLKVTETFSRAIRMEFGVDKCAVMHVKRGEIVESVRTQLSDSIYLRSLSSLETYKYLGMSEALGINAADMKQSLRERFFGRLNKVLNSLLSGGNKVRAFNGWVMPVLMYSFGILKWTQTELDALDRRVRTLLTANRMHHPRSSVMRLYIPRKCGGRGFLNAKTLHNREVCSLREYFLEADVGMHRDVVSVDKGLTPLSLANENWRKPVVLDTNDCREVWQSKELHGRFYRVLHGPDVDFLASVSWLRFGDLFGETEGFVFAIMDEVMMTNNYRKYIVKDGTVDICRACHRPGESIRHIICGCSRLANGDYLHRHNLVARIIHQQLALKYSLVESEVPYYRYVPDPVLENGNITLYWDRSIITDRTIVANKPDIVVTDRLERRTMIVDIAVPHDENLVKAEKDKQIKYLDLAREVVDMWDVDTAIIVPIVVTANGIIAKSLDQHLRRLSLGGWIKGLIQKAVLLDTARIVRRFLSQQP

SEQ ID NO: 13766 - protein, 1197 aa, Mamestra brassicae
MLTRSRARHLATHPSPSASSLSSASPPPEPSPTVSAVTPAVAVASSSSDEYFSPPTTPPPARRRRGRRPPDGLGPRGPPASDRVPAPGGSVQRMRWTQSINENVMRSYFGATEGGTNLTAYRGRMLSLFQVLEPAVNVSAQRLSDQVRVIQRNRMLDDSVLDRLRMEICGHVITPPSQTVAPPQSQMSSPADEESNDRVTNVSTQCNEELRSALECAIREYRYVPPELRPRLPRLPVHNKNRALVAALDSQLSNYFDDCEDLTDTHSIMYCAAVAACRVAHVKMSNDRVTRPKPAVPAWQCRIERRIGGARALIGKLICFREGNTRPRVMRFVRRAFSGTDISPRDYMSRVTERIDFLKQKVYAWANRIRRYRRRVERYTQNRTFRSNERWVYRVWEQPDQGVTDTRLPDDDAMCSFWRNIWSVPVSHTEGDWIRGVERACDPLPEMGAITISPQDVARAVRPLPNWKSPGPDGLHNFWIKWLQRSHARLASQYQTVLESGSLPEFLTTGVTHLLHKSGSTAEPKNYRPITCLPTVYKVLTSILRAKINNHINSNNIMSVSQNGCRNGSRGTKELLLIDMAISQQVRRSRKDLSTCWIDYKKAYDSVPHTWLMRVLELYKIDTMLRTFLMSCMGQWRTVLRYPGCRNIQRNSEPVKIERGIFQGDSLSPLWFCLALNPLSTLLENSGLGYRLKRGGQVLSHLLYMDDLKLFASSNLQLMELLKVTETFSSAIRMEFGVDKCAVMHVKRGEIMESVGTQLSDSINLRSLSSTETYKYLGMSEALGINVTDMKQSLKERFFGRLKKVFNSLLSGGNKVRAFNGWVMPVLMHSFGVLKWTQTELDALDRRVHTLLTAYRMHHPRSSVMRLYIPRKCGGRGFLNAKTLHNREICSLREYFLAVDVGMHRDVVAVDKGLTPLSLANENWRKPAVLDTNDRRAVWQSKELHGRYFRALHGSDVDQLASVAWLRFGDLFGETEGFVCAIMDEVIMTNNYRRFIVKDGTVDICRACHRPGESIRHIVSGCSRLANGEYLHRHNLVARIIHQQLALKYSLVESEVPYYRYAPDPVLDNGNITLYWDRSIITDRTIVANKPDIVVVDRIERRAMIVDITVPHDENLVKAEKDKQIKYIDLAREVVDMWDVDSAIIVPIVVSANGLIATSLDQHLRRLSLGSWIKGLIQKAVLLDTARIVRRFLSLEP

SEQ ID NO: 13767 - protein, 868 aa, Mamestra brassicae
MRFVRRAFSGTDTSPRDYLTRVTERIDFLKQKIYAWANRIRRYKRRVERYTQNRTFQSNERWVYRAWERPDQGVTDTRLPDDDVMCSFWRNIWSVPVSHTEGDWIREVERACDPILEMGATTISPQDVARAVRPLPNWKSPGPDGLHNFWIKWFTGSHARLASQFQSALESGSLPQFLTTGITHLLHKSGSTAEPKNYRPITCLPTVYKVLTSILRAKINHHIESNSIMSASQNGCRNGSRGTKELLLMDIAISQQVRRSRKDLSTCWIDYKKAYDAVPHTWLMRVLELYKVDAVLRTFLMSCMGQWRTVLHYPGCRQIQVNGDPIRIERGIFQGDSLSPLWFCLALNPLSTLLEGSGQGYRLRRGGQVISHLLYMDDLKLFAPNNLQLMELLKVTETFSSAISMEFGVDKCAVMHVKRGEIMESVGTQLSDSIHLRSLSSTETYKYLGMSEALGINANDMKQSLKERFFGRLNKVLNSLLSGGNKVRAFNGWVMPVLMYSFGILKWTQTELDALDRRVRSLLTANRMHHPRSSVMRLYIPRKCGGRGFLNAKTLHNREICSLREFFLEADVGMHRDVVAVDKGLTALSLANENWRKPVVLDTNDRREVWQSKELHGRFYRVLHGPDVDFLASVAWLRFGDLFGETEGFVCAIMDEVMMTNNYRKYIVKDGTVDICRACHRPGESIRHIISGCSSLANGDYLHRHNLVARIIHQQLALKYNLVESEVPYYRYVPDPVLENGNCTLYWDRSIITDRTIVANKPDIVVIDRLERRAMIVDIAVPHDENLVKTEKDKQTKYLDLACEVVDMWDVNTAVIVPIVVTANGIIAKSLDQHLKRLSLGSWIKGLIQKAVLLDTARIVRRFLSQGP

SEQ ID NO: 13768 - protein, 1200 aa, Mamestra brassicae
MLTRSRARAQTAQPTSSGSSLSSASQPPGPAPAVSPEIPVAAVASSSSDEYFSPPTTPPPARRRGRGRPPTSLGPRGPPASDRVPAIGGSVQRMRWTQTINENVMRSYYGATEGGTNLTAYRGRMLSLFQVLEPAVNVSAQRLSDQVRVILRNRMLDDAVLDRLRLESRSGRVSPASPPAAVQIQSSISPRSNNVGEDDDDGAISVSTQCNERLRSALEDAFREYRSTPPELRPRLPRLPMHNKNRALVCALDSQLTNCFDSSEDLADTHSILYCAAAAACRVAHVKFLNSDRATRPAVPAWQCRIERRIGEARALIGKLICFREGNTRRRVMRLVRRAFLGTDTSPRDYLTRVTERIDFLKQKIYAWANRIRRYKRRVQRYTQNRTFQSNERWVYRAWERPDQGVTDTRLPDDDIMCSFWRNIWSVPVSHTEGDWIREVERACDPILEMGATTISPQDVARAVRPLPNWKSPGPDGLHNFWIKWFTGSHARLASQFQSALESGSLPQFLTTGITHLLHKSGSTAEPKNYRPITCLPTVYKVLTSILRAKINHHIESNSIMSASQNGCRNGSRGTKELLLMDIAISQQVRRSRKDLSTCWIDYKKAYDSVPHTWLMRVLELYKVDAVLRTFLMSCMGQWRTVLRYPGCRQIQVNGDPIRIERGIFQGDSLSPLWFCLALNPLSTLLEGSGQGYRLRRGGQVISHLLYMDDLKLFAPNNLQLMELLKVTETFSSAISMEFGVDKCAVMHVKRGEIMESVGTQLSDSIHLRSLSSTETYKYLGMSEALGINANDMKQSLKERFFGRLNKVLNSLLSGGNKVRAFNGWVMPVLMYSFGILKWTQTELDALDRRVRSLLTANRMHHPRSSVMRLYIPRKCGGRGFLNAKTLHNREICSLREFFLEADVGMHRDVVAVDKGLTALSLANENWRKPVVLDTNDRRKVWQSKELHGRFYRVLHGPDVDFLASVAWLRFGDLFGETEGFVCAIMDEVMMTNNYRKYIVKDGTVDICRACHRPGESIRHIISGCSSLANGDYLHRHNLVARIIHQQLALKYNLVESEVPYYRYVPDPVLENGNCTLYWDRSIITDRTIVANKPDIVVIDRLERRAMIVDIAVPHDENLVKTEKDKQTKYLDLACEVVDMWDVNTAVIVPIVVTANGIIAKSLDQHLKRLSLGSWIKGLIQKAVLLDTARIVRRFLSQGP

SEQ ID NO: 13769 - protein, 961 aa, Mamestra brassicae
MHNKNRALVAALDSQLSNYFDDCEDLTDTHSIMYCAAVAACRVAHVKMTNDRVTRPKPAVPAWQCRIERRIGGARALIGKLICFREGNTRPRVMRFVRRAFSGTDISPRDYMSRVTERIDFLKQKVYAWANRIRRYRRRVERYTQNRTFRSNERWVYRVWEQPDQGVTDTRLPDDDAMCSFWRNIWSVPVSHTEGGWIREVERACDPLPEMGAITISPQDVARAVRPLPNWKSPGPDGLHNFWIKWLQRSHARLASQYQTALESGSLPEFLTTGVTHLLHKSGSTAEPKNYRPITCLPTVYKVLTSILRAKINNHINSNNIMSVSQNGCRNGSRGTKELLLIDMAISQQVRRSRKDLSTCWIDYKKAYDSVPHTWLMRVLELYKIDTMLRTFLMSCMGQWRTVLRYPGCRNIQRNSEPVRIERGIFQGDSLSPLWFCLALNPLSTLLENSGLGYRLKRGGQVISHLLYMDDLKLFAPSNLQLMELLKVTETFSSAIRMEFGVDKCAVMHVKRGEIMESVGTQLSDSINLRSLSSTETYKYLGMSEALGINVTDMKQSLKERFFGRLKKVFNSLLSGGNKVRAFNGWVMPVLMHSFGVLKWTQTELDALDRRVRTLLTAYRMHHPRSSVMRLYIPRKCGGRGFLNAKTLHNREICSLREYFLAVDVGMHRDVVAVDKGLTPLSLANENWRKPAVLDTNDRRAVWQSKELHGRYFRALHGPDVDQLASVAWLRFGDLFGETEGFVCAIMDEVIMTNNYRRFIVKDGTVDICRACHRPGESIRHIVSGCSRLANGEYLHRHNLVARIIHQQLALKYSLVESEVPYYRYAPDPVLDNGNITLYWDRSIITDRTIVANKPDIVVVDRIERRAMIVDITVPHDENLVKAEKDKQIKYIDLAREVVDMWDVDSAIIVPIVVSANGLIATSLDQHLRRLSLGSWIKGLIQKAVLLDTARIVRRFLSLEP

SEQ ID NO: 13770 - protein, 1198 aa, Mamestra brassicae
MLTRAAAQRARLPPPASSLSSASPPPEPSPTVSAVIPAVAVASSSSDEYFSPPTSPPPARRRRGRRPPDGLGPRGPPASDRVPAPGGSVQRMRWTQTINENVMRSYYGATEGGTNLTAYRGRMLSLFQVLEPAVNVSAQRLSDQVRVIQRNRMLDDAVLDRLRLESRNGRVSAASPPAAVQIQFSISPRPNIVGEDDDDGAISVSTQCNERLRSALEDAFREYRSTPPELRPRLPRLPMHNKNRALVCALDSQLANCFDSSEDLADTHSILYCAAAAACRVAHIKFPNSDRATRPAVPAWQCRIERRIGEARALIGKLICFREGNTRRRVMRFVRRAFSGTDTSPRDYLTRVTERIDFLKQKIYAWANRIRRYKRRVERYTQNRTFQSNERWVYRAWERPDQGVTDTRLPDDDVMCSFWRNIWSVPVSHTEGDWTREVERACDPIPEMGAITISPQDVARAVRPLPNWKSPGPDGLHNFWIKWFKRSHARLASQFQSALESGSLPQFLTTGITHLLHKSGSTAEPKNYRPITCLPTVYKVLTSILRAKINQHIETNSIMSASQNGCRNRSRGTKELLLIDVAISQQVRRSRRDLSTCWIDYKKAYDSVPHTWLMRVLELYKVDAVLRTFLMSCMGQWRTVLRYPGCRQIQANSDPIRIERGIFQGDSLSPLWFCLALNPLSTLLEGSGQGYRLRRGGQVISHLLYMDDLKLFAPNNLQLMKLLKVTETFSSAISMEFGVDKCAVMHVKRGEIMESVGTQLSDSIHLRSLSSTETYKYLGMSEALGINANDVKQSLKERFFGRLNKVLNSLLSGGNKVRAFNGWVMPVLMYSFGILKWTQTELDALDRRVRSLLTANRMHHPRSSVMRLYIPRKCGGRGFLNAKTLHNREICSLREFFLEADVGMHRDVVAVDKGLTALSLANENWRKPVVLDTNDRREVWQSKELHGRFYRDLHGPDVDFLASVAWLRFGDLFGETEGFVCAIMDEVMMTNNYRKYIVKDGTVDICRACHRPGESIRHIISGCSSLANGDYLHRHNLVARIIHQQLALKYNLVESEVPYYRYVPDPVLENGNCTLYWDRSIITDRTIIANKPDIVVIDRLERRAMIVDIAVPHDVNLVKTEKDKQTKYLDLAREVVDMWDVNTAVIVPIVVTANGIIAKSLDQHLKRLSLGSWIKGLIQKAVLLDTARIVRRFLSQGP

SEQ ID NO: 13771 - protein, 1191 aa, Noctua fimbriata
MKMLTRAAAKRARLSPPDPSLSSASPPPKSSPVVSAVTPAVAVASSSSDEYFSPPTTPPPVRRRGGRRPPDGLGPRGPPASDRVPAPGGSVQRMRWTQSINANVMRAYYGATEGGNNLTAYRVRMLSLFQVLEPAVNVSAQRLSDQVRVIQRNRMLDDTVLDRLRTEMQSSHVIDTPPPQAVVPPQSTIIPNRDNDVSNDIVTNVSTQCNEEMRSALEGAIREYRFMQPDLRPRIPRLPMHNKNRALVAVLDSQLSNYFDNCEDLTDAHSILYCAAVAACRVAHVKFSDDRATRPKPAVPPWQYRIERRIGGARALIGKLICFREGNTRPRVMRFVRRAFSGTDISPRDYMSRITERIDFLKQKVYAWANRIRRYKRRVDRYTQNRTFQRDERWVYRAWERPDQGVADTRLPDDDAMCSFWRSIWSVPDSHTEGEWTQGVERACDLVPEMGAITISPQDVVRAVRPLPNWKSPGPDGLHNFWIKWFTRSHARLAILFQSALESGSLPEFLTTGITHLLHKSGSTAEPKNYRPITCLPTVGKINKHIDDNSIMSASQNGCRNGSRGTKELLLIDMTISQQVRRSRSDLSTCWIDYKKAYDSVAHTLLMRVLELYKVDATLRTFLMSCMGQWRTVLRYPGCRQIQRNSEPIRIERGIFQGDSLSPLWFCLALNPLSTLLEDSGLGYRLRRGGQVISHLLYMDDLKLFAPNDLQLMELLKVTETFSSAIRMEFGVDKCAVMHVKRGEIVESVGTQLSDSINLRSLSATETYKYLGMSEALGINVADMKQSLKERFFGRLKKVFNSLLSGGNKVRAFNGWVMPVLMYSFGILKWTQTELDALDRRVRTLLTAYRMHHPRSSVMRLYIPRKCGGRGFLNAKTLHNREICSLREYFLETDVGMHRDVVAVDKGLTPLSLAKENWRKPLVLDTNDRMEVWQSKELHGRFFRALHGPDVDLSASVAWLRSGDLFGETEGFVCAIMDEVMMTNNYRRFIVKDGTVDICRACHRPGESIRHIISGCSRLANGEYLHRHNLVARIIHQQLALKYNLVESEVPYYKYVPDPVLENGSITLYWDQSIITDRTIVANKPDIVVVDRSERRTMIVDITVPHDENLVKAEKDKKIKYLDLAREVVDMWDVDSAIIVPIVVSAHGLIAKSLDQYLRRLSLGSWIKGLIQKAVLLDTARIVRRFLSLEP

SEQ ID NO: 13772 - protein, 1198 aa, Noctua fimbriata
MLTRAAAKRARLSPPDPSLSSASPPPESSPVMSAVTPAVAVASSSSDEYFSPPTTPPPVRRRGGRRPPDGLGPRGPPASDRVPAPGGSVQRMRWTQSINENVMRSYYGATEGGNNLTAYRVRMLSLFQVLEPAVNVSAQRLSDQVRVIQRNRMLDDTVLDRLQTEMQSSHVIATPPPQAVVPPQSTIIPNRDNDVSNDIVTNVSTQCNEEMRSALEGAIREYRFMQPDLRPRIPRLPMHNKNRALVAVLDSQLSNYFDNCEDLTDAHSILYCAAVAACRVAHVKFSNDRATRPKPAVPPWQYRIERRIGGARALIGKLICFREGNTRPRVMRFVRRAFSGTDISPRDYMSRITERIDFLKQKVYAWANRIRRYKRRVDRYTQNRTFQRDERWVYRAWERPDQGVADTRLPDDDAMCSFWRSIWSVPVSHTEGEWTQGVERACDLVPEMGAITISPQDVVRAVRPLPNWKSPGPDGLHNFWIKWFTRSHARLAILFQSALESGSLPEFLTTGITHLLHKSGSTAEPKNYRPITCLPTVYKVLTSILRAKINKHIDDNSIMSASQNGCRNGSRGTKELLLIDMAISQQVRRSRRDLSTCWIAFKKAYDSVPHTWLMRVLELYKVDATLRTFLMSCMGQWRTVLRYPGCRQIQRNSEPIRIERGIFQGDSLSPLWFCLALNPLSTLLEDSGLGYRLRRGGQVISHLLYMDDLKLFAPNDLQLMELLKVTETFSSAIRMEFGVDKCAVMHVKRGEIVESVGTQLSDSINLRSLSATETYKYLGMSEALGINVADMKQSLKERFFGRLKKVFNSLLSGGNKVRAFNGWVMPVLMYSFGILKWTQTELDALDRRVRTLLTAYRMHHPRSSVMRLYIPRKCGGRGFLNAKTLHNREICSLREYFLETDVGMHRDVVAVDKGLTPLSLAKENWRKPLVLDTNDRMEVWQSKELHGRFFRALHGPDVDLSASVAWLRSGDLFGETEGFVCAIMDEVMMTNNYRRFIVKDGTVDICRACHRPGESIRHIISGCSRLANGEYLHRHNLVARIIHQQLALKYNLVESEVPYYKYVPDPVLENGSITLYWDQSIITDRTIVANKPDIVMVDRSERRTMIVDITVPHDENLVKAEKDKKIKYLDLAREVVDMWDVDSAIIVPIVVSAHGLIAKSLDQYLRRLSLGSWIKGLIQKAVLLDTARIVRRFLSLEP

SEQ ID NO: 13773 - protein, 1198 aa, Noctua fimbriata
MLTRAAAKRARLSPPDPSLSSASPPPESSPVMSAVTPAVAVASSSSDEYFSPPTTPPPVRRRGGRRPPDGLGPRGPPASDRVPAPGGSVQRMRWTQSINENVMRSYYGATEGGNNLTAYRVRMLSLFQVLEPAVNVSAQRLSDQVRVIQRNRMLDDTVLDRLRTEMQSSHVIATPPPQAVVPPQSTIIPNRDNDVSNDIVTNVSTQCNEEMRSALEGAIREYRFMQPDLRPRIPRLPMHNKNRALVAVLDSQLSNYFDNCEDLTDAHSILYCAAVAACRVAHVKFSNDRATRPKPAVPPWQYRIERRIGGARALIGKLICFREGNTRPRVMRFVRRAFSGTDISPRDYMSRITERIDFLKQKVYAWANRIRRYKRRVDRYTQNRTFQRDERWLYRAWERPDQGVADTRLPDDDAMCSFWRSIWSVPVSHTEGEWTQGVERACDLVPEMGAITISPQDVVRAVRPLPNWKSPGPDGLHNFWIKWFTRSHARLAILFQSALESGSLPEFLTTGITHLLHKSGSTAEPKNYRPITCLPTVYKVLTSILKAKINKHIDDNSIMSASQNGCRNGSRGTKELLLIDMAISQQVRRSRRDLSTCWIDYKKAYDSVPHTWLMRVLELYKVDATLRTFLMSCMGQWRTVLRYPGCRQIQRNSEPIRIERGIFQGDSLSPLWFCLALNPLSTLLEDSGLGYRLRRGGQVISHLLYMDDLKLFAPNDLQLMELLKVTETFSSAIRMEFGVDKCAVMHVKRGEIVESVGTQLSDSINLRSLSATETYKYLGMSEALGINVADMKQSLKERFFGRLKKVFNSLLSGGNKVRAFNGWVMPVLMYSFGILKWTQTELDALDRRVRTLLTAYRMHHPRSSIMRLYIPRKCGGRGFLNAKTLHNREICSLREYFLETDVGMHRDVVAVDKGLTPLSLAKENWRKPLVLDTNDRMEVWQSKELHGRFFRALHGPDVDLSASVAWLRSGDLFGETEGFVCAIMDEVMMTNNYRRFIVKDGTVDICRACHRPGESIRHIISGCSRLANGEYLHRHNLVARIIHQQLALKYNLVESEVPYYKYVPDPVLENGSITLYWDPSIITDRTIVANKPDIVVVDRSERRTMIVDITVPHDENLLKAEKDKKIKYLDLAREVVDMWDVDSAIIVPIVVSAHGLIAKSLDQYLRRLSLGSWIKGLIQKAVLLDTARIVRRFLSLEP

SEQ ID NO: 13774 - protein, 1198 aa, Noctua fimbriata
MLTRAAAKRARLSPPDPSLSSASPPPESSPVMSAVTPAVAVASSSSDEYFSPPTTPPPVRRRGGRRPPDGLGPRGPPASDRVPAPGGSVQRMRWTQSINENVMRSYYGATEGGNNLTAYRVRMLSLFQVLEPAVNVSAQRLSDQVRVIQRNRMLDDTVLDRLRTEMQSSHVIATPPPQAVVSPQSTIIPNRDNDVSNDIVTNVSTQCNEEMRSALEGAIREYRFMQPDLRPRIPRLPMHNKNRALVAVLDSQLSNYFDNCEDLTDAHSILYCAAVAACRVAHVKFSNDRATRPKPAVPPWQYRIERRIGGARALIGKLICFREGNTRPRVMRFVRRAFSGTDISPRDYMSRITERIDFLKQKVYAWANRIRRYKRRVDRYTQNRTFQRDERWVYRAWERPDQGVTDTRLPDDDAMCSFWRSIWSVPVSHTEGEWTQGVERACDLVPEMGAITISPQDVVRAVRPLPNWKSPGPDGLHNFWIKWFTRSHARLAILFQSALESGSLPEFLTTGITHLLHKSGSTAEPKNYRPITCLPTVYKVLTSILRAKLNKHIDDNSIMSASQNGCRNGSRGTKELLLIDMAISQQVRRSRRDLSTCWIDYKKAYDSVPHTWLMRVLELYKVDATLRTFLMSCMGQWRTVLRYPGCRQIQRNSEPIRIERGIFQGDSLSPLWFCLALNPLSTLLEDSGLGYRLRRGGQVISHLLYMDDLKLFAPNDLQLMELLKVTETFSSAIRMEFGVDKCAVMHVKRGEIVESVGTQLSDSINLRSLSATETYKYLGMSEALGINVADMKQSLKERFFGRLKKVFNSLLSGGNRVRAFNGWVMPVLMYSFGILKWTQTELDALDRRVRTLLTAYRMHHPRSSIMRLYIPRKCGGRGFLNAKTLHNREICSLREYFLETDVGMHRDVVAVDKGLTPLSLAKENWRKPLVLDTNDRMEVWQSKELHGRFFRALHGPDVDLSASVAWLRSGDLFGETEGFVCAIMDEVMMTNNYRRFIVKDGTVDICRACHRPGESIRHITSGCSRLANGEYLHRHNLVARIIHQQLALKYNLVESEVPYYKYVPDPVLENGSITLYWDQSIITDRTIVANKPDIVVVDRSERRTMIVDITVPHDENLVKAEKDKKIKYLDLAREVVDMWDVDSAIIVPIVVSAHGLIAKSLDQYLRRLSLGSWIKGLIQKAVLLDTARIVRRFLSLEP

SEQ ID NO: 13775 - protein, 1199 aa, Atethmia centrago
MLTRAAAARRARLPPPDSSLSSASPPPVPSPTVSAVTTPAAVVASSSSDEYFSPPTTPPPVRRRGGRRPPDGLGPRGPPASDRVPAPGGSVQRMRWTRSINENVMRSYYGATEGGNNLTAYRVRMLSLFQVLEPAVNVSAQRLSDQVRVIQRNHMLDDTVLERLRSEIQSSHVIAPPSQTVVVLPQLDTHQADEGSDDKATNVSTQCNVELRSALEDAIREYRFMSPEVRPRLPRLPMHKKNRALVAVLDSQLSNYFDDCEELTDTHSILYCAAVAVCRVAHVIFPNDSRATRPKPTVPIWQCRIERRIGGARALIGKLICFREGNTRPRVMRFVRRAFSGTDISPQDYMSRVTERIDFLKQKVYAWANRIRRYKRRVDRYTQNSTFQSDERWVYRGWEQRDQGVTDTRLPDDDVMCSFWRSIWSVPVSHTEGDWARKVERACDPLPEMGAITICPQDVARAVRPLPNWKSPGPDGLHNFWLKWFLGSHARLATQYQTALESGSLPQFLTIGVTHLLHKSGSTAEPKNYRPITCLPTVYKVLTSILRAKINKHIDTNSIMSASQNGCRNGSRGTKELLLIDMTISQQVRRFRKDLSTCWIDYKKAYDSVPHTWLMRVLELYKVDATLRTFLMSCMGQWRTVLRYPGCRNIQRNSEPIRIERGIFQGDSLSPLWFCLALNPLSTLLEDSGLGYRLRRGGQVISHLLYMDDLKLFASNNLQLMELLKITETFSSAIRMEFGVDKCAVMHVKRGEIVESVGTQLSDSINLRALSASETYKYLGMSEALGINVTDMKQSLRQRFFDRLKKVFNSLLSGGNKMCAFNGWVMPVLMYSFGILKWTQTELDALDRRVRTLLTAYRMHHPRSSVMRLYIPRKCGGRGFLNAKTLHNREVCSLREYFLEADVGMHRDVVAVDKGLTPLSLAKENWRKLVMLDTNDRREVWQSKELHGRFFRALHEPDVDFQASVAWLRFGDLFGETEGFVCAIMDEVIMTKNYRRFIVKDGTVDMCRACHRPGESIRHIISGCSRLANEEYLHRHNLVARIIHQQLALKYSLVESEVPYYRYVPDPVLDNGNITLYWDRSIITDRTIVANKHDIVVVDRTERRAMIVDITVPHDGNLVKAEKDKQIKYLDLAREVVDMWDVDSAIIVPIVVSANGLIAKSLDQHLRRPTLDGWIKGLIQKAVLLDTARIVRRFLSLEP

SEQ ID NO: 13776 - protein, 1198 aa, Atethmia centrago
MLTRSAAVRARLPPPDSSLSSASPPPVPSPTVCAVTTPTAAVASSSSDEYFSPPTTPPPVRRRGGRRPPDGLGSRGPPASDRVPAPGGSVKRMRWTQSVNENVMRSYYGATEGGNNLTAYRVRMLSLFQVLEPAVNVSAQRLSDQVRVIQRNHMLDDTVLDRLRSEMQRSHVIVPPSQTVVHSPQLSTNQADEGSDDRATNVSTQCNVELRSALEDAIREYRLMSPELRPRLPRLPMHKKNRALVAALDSQLSNYFDDCEDLTDTHSILYCAAVAVCRVAHVKFAKDSRTTRPKPTVPAWQCRIESRIGGARALIGKLICFREGNTRPRVMRFVRRAFSGTDIGPHDYMTRVTERIDFLKQKVYAWANRIRRYKRRVERYTQNRTFQSDERWVYRGWERPDQDVTDTRLPDDDVMCSFWRSIWSVPVSHTEGDWARKVERACDPIPEMGAITICPQDVARAVRPLPNWKSPGPDGLHNFWLKWFLRSHARLAAQYQTALESGSLPQFLTTGVTHLLHKSGSTAEPKNYRPITCLPTVYILLTSILRAKINKHIDTNSIMSASQNGCRNGSRGTKELLLIDMTISQQVRRSRKDLSTCWIDYKKAYDSVPHTWLMRVLELYKVDATLRTFLISCMGQWRTVLRYPGCRNIQRNSEPIRIERGIFQGDSLSPLWFCLALNPLSTLLEDSGLGYRMRRGGQVISHLLYMDDLKLFASNNLQLMELLKITESFSSAIRMEFGVDKCAVMHVKRGKIVESVGTQLSDSINLRTLSASETYKYLGMSEALGINVTDMKQSLKERFFGRLKKVFNSLLSGGNKVRAFNGWVMPVLMYSFGILKWTQTELDALDRRVRTLLTAYRMHHPRSSVMRLYIPRKCGGRGFLNAKILHNREVCSLREYFLEADVGMHRDVVAVDKGLTPLSLAKENWRKLVVLDTNDRREVWQSKELHGRFFRALHEPDVDFQASVAWLRFGDLFGETEGFVCAIMDEVIMTKNYRRFIVKDGTVDVCRACHRPGESIRHIISGCSRLANEEYLHRHNLVARIIHQQLALKYSLVESEVPYYRYVPDPVLDNGNITLYWDRSIITDRTIVANKPDIVVVDRTERRAMIVDITVPHDGNLVKAEKDKQIKYLDLAREVVDMWDVDSAIIVPIVVSANGLIAKSLDQHLKRLTLDGWIKGLIQKAVLLDTARIVRRFLSLEP

SEQ ID NO: 13777 - protein, 1045 aa, Atethmia centrago
MLDDTVLDRLRSEMQRSHVIVPPSQTVVHSPQLSTNQADEGSDDRATNVSTQCNVELRSALEDAIREYRLMSPELRPRLPRLPMHKKNRALVAALDSQLSNYFDDCEDLTDTHSILYCAAVAVCRVAHVKFAKDSRTTRPKPTVPAWQCRIESRIGGARALIGKLICFREGNTRPRVMRFVRRAFSGTDIGPQDYMTRVTERIDFLKQKVYAWANRIRRYKRRVERYTQNRTFQSDERWVYRGWERPDQDVTDTRLPDDDVMCSFWRSIWSVPVSHTEGDWARKVERACDPIPEMGAITIYPQDVARAVRPLPNWKSPGPDGLHNFWLKWFLGSHARLAAQYQTALESGSLPQFLTTGVTHLLHKSGSTAEPKNYRPITCLPTVYKLLTSILRAKINKHIDTNSIMSASQNGCRNGSRGTKELLLIDMTISQQVRRSRKDLSTCWIDYKKAYDSVPHTWLMRVLELYKVDATLRTFLISCMGQWRTVLRYPGCRNIQRNSEPIRIERGIFQGDSLSPLWFCLALNPLSTLQEDSGLGYRMRRGGQVISHLLYMDDLKLFASNNLQLMELLKITESFSSAIRMEFGVDKCAVMHVKRGKIVESVGTQLSDSINLRTLSASETYKYLGMSEALGINVTDMKQSLKERFFGRLKKVFNSLLSGGNKVRAFNGWVMPVLMYSFGILKWTQTELDALDRRVRTLLTAYRMHHPRSSVVRLYIPRKCGGRGFLNAKILHNREVCSLREYFLEADVGMHRDVVAVDKGLTPLSLAKENWRKLVVLDTNDRREVWQSKELHGRFFRALHEPDVDFQASVAWLRFGDLFGETEGFVCAIMDEVIMTKNYRRFIVKDGTVDVCRACHRPGESIRHIISGCSRLANEEYLHRHNLVARIIHQQLALKYSLVESEVPYYRYVPDPVLDNGNITLYWDRSIITDRTIVANKPDIVVVDRTERRAMIVDITIPHDGNLVKAEKDKQIKYLDLAREVVDMWDVDSAIIVPIVVSANGLIAKSLDQHLKRLTLDGWIKGLIQKAVLLDTARIVRRFLSLEP

SEQ ID NO: 13778 - protein, 1207 aa, Atethmia centrago
MLTRSRARRLRQDTHPTSSVSSLSSASQLPEPAPDVSPVIPAAAVASSSSDEYFSPPTTPPPVRPRGRGRPPASLGLRGPPASDRVPAPGGSVQRMRWTQALNENVMRAYFGATEGGSNLTAYRGRMLSLFQVLEPAVNVSAQRLSDQVRVIQRKHMLDDVVLDRLRIESRNSHVSPASPLVAVQMQNLPGGSPRPDHADEEDDDEAISVSSQCNVRLRSALDDAFREYRSTPPGLRPRLPRLPMHKKNKALVCALDSQLSNYFDSSKDLTDTHSILNCAAVAACRVAQVKFPNSDRAPRPKPAVPAWQSRIERRIGKTRALIGKLICFREGNTRPRVMRFVKRAFAGTDILSSRDYLTRVTERIDFLKQKICAWANRIRRYRRRMERYTQNRTFQNDERWVYRTWERPDQGVADTRLPDDDAICSFWRNIWSVPVNHTEGDWTKRIERACDLIPEMGALTILPQDVAHAVRPLPNWKSPGPDGLHNFWIKWFQRSHARLASQFQSALESGSLPLFLTTGITHLLHKSGSTAEPKNYRPITCLPTVYKVLTSILRAKINKHIETNLIMSASQNGCKNGSRGTKELLLIDIAISQQVRRSRKDLSTCWIDYKKAYDSVPHTWLMRVLELYKVDATLRTFLMSCMGQWRTVLCYPGCRYIQRNSEPIRIKRGIFQGDSLSPLWFCLALIPLSTLLENSGLGYRLRRGGQVISHLLYMDDLKLFAPNNLQLMELLKVTKTFSSAIRMEFGVDKCAVMHVKRGGIVESVGTQLSDSIHLRSLSSTETYKYLGMSEALGINAADMKQSLRERFFVRLNKVLNSLLSGGNKVRAFNGWVMPVLMYSFGILKWTQTELDALDRRVRTLLTANRMHHPRSSVMRLYIPRKCGGRGFLNAKTLHNREICSLREYFLETDVVMHRDVVSVDKGLTPLSLADENWRKPIILDTNDRREVWQSKELHGRFYRVLHGPDVDLLASVSWLRFGDLFGETEGFVFAIMDEVIMTNNYRKYIVKDGTVDICRACHRPGESIRHIISGCSRLANGDYLHRHNLVAKIIHQQLALKYSLVESEVPYYRYVPDPVLENGNITLYWDRSIITDRTIVANKPDIVVIDRLTRRTMIIDISVPHDENLVKAEKDKQIKYLDLAHEVVDMWDVDTAIIVPIVVTANGIIPKSLDQHLKRLSLGSWIKGLIQRAVLLDTARIVRRFLSQEP

SEQ ID NO: 13779 - protein, 1198 aa, Mesoligia furuncula
MLTRSALRKARLPPPDSSLSSASPPPVPSLTVSAVTTPAAAVASSSSDEYFSPPTTPPPARRRGGRRPPDGLGPRGPPASDRVPAPGGSVQRMRWTQSINENVMRSYYGATEGGNNLTAYRVRMLSLFQVLEPTVNVSAQRLSDQVRVIQRNHMLDDTVLDRLRNEMQSSHVIAPQSQTAVVLPQSNTSHADEGSNDRATNVSTQCNEELRSTLEDAIQEYRFMSPELRPRLPRLPMHNKNRALVAVLDSQLSNYFDGCEDLTDTHSILYCAAVAACRVAHVKFANDSRATRPKPAVPAWQCRIERRIGEARALIGKLTCFREGNTRPRVMRFVRRAFLGTDISPQDYMSCVTERIDFLKQKVYAWANRIRRYKRRVERYTQNRTFQSDQRWVYRDWERPDQSVTDTCLPDDDAMCSFWRSIWSVPVSHTESDWTREVERACDPIPEMGAITICPQDVARAVRPLPNWKSPGPDGLHNFWIKWFTRSHARLASQFQTALESGSLPQFLMTGITHLLHKSGSTAEPKNYRPITCLPTVYKVLTSILRVKIDKHINTNSIMSASQNGCRNGSRGTKEILLIDMTISQQVRRFRKDLSTCWIDYKKAYDSVPHTWLMRVLGLYKVDTTLRTFLMSCMGQWRTVLRYPGCRNIQRNSEPIRIERGIFQGDSLSPLWFCLALNPLSTLLEDSGLGYRLRRGGQVISHLLYMDDLKLFAPNNLQLMELLKITETFSSAIRMEFGVDKCAVMHVKRGEIVESVGTQLSDSTNLRALCASETYKYLGMSEALGINVTDMKQSLKERFFGRLKKVFNGLLSGGNKVRAFNGWVMPVLMYSFGILKWTQTELDALDRKVRTLLTANRMHHPRSSVMRLYIPRKCGGRGFLNAKTLHNREICSLREYFLETDVGMHRDVVAVDKGLTPLSLGKENWRKPVVLDTNDRMEVWQSKELHGRFFRALHGPDVDLLASVAWLRFGDLFGETEGFVCAIMDEVMMTNNYRRFIVKDGTVDICRACHRPGESIRHIISGCSRLANGEYLHRHNLVARIIHQQLALKYSLVESEVPYYRYVPDLVLENGNITLYWDRSIITDRTIIANKPDIVVVDRSERRAMIVDITVPHDENLVKAEKDKLIKYLDLAHEVVDMWDVDSAIIVPIVVTANGLIAKSLDQHLKRLSLGSWIKGLIQKAVLLDTARIVRRFLSLEP

SEQ ID NO: 13780 - protein, 1208 aa, Mesoligia furuncula
MEMLTRSRARHLLKNTQPTSSGSSLSSASQLPDPAPDVSSVRPAAAVASSSSDEYFSPPTTPPPVCRRGRGRPPASLGLRGPRASDRVPAPGGSVQRMRWTQTVNENVMRAYFGATEGGSNLTAYRGRMLSLFQVLEPAVNVSAQRLSDQVRVIQRNHMLDNVVLDRLRLESRNSHVTPASSLIAVQLQNVPSVSPRPDHVYVEDDDEAITVSSQCNARLRSALEDAFREYRSIPPGLRPRLPRLPMHKKNKALVCALDLQLSNCFNNSKDLTDTHSILYCAAVAACRVAHVKFPNSDRAPRPKPAVPAWQCRIECRIGEARALIGKLICFREGNTRPRVMRFVRRAFSGTDISSRDYLSRVTERIDFLKQKIYAWANRIRRYRRRVERYTQNRTFQNDERWVYRAWERPDQGVTDTPLPDDDAMCSFWRNIWSVPVSHTEGDWTAKIERACDLIPEMGVLTISPQDVARAVRPLPNWKSPGPDGLHNFWIKWFQGSHARLASQFQSALESGSLPQFLTTGITHLLHKSGSTADPKNYRPITCLPTVYKVLTSILRAKINKHIDTNSIMSVSQNGCRNGSRGTKELLLIDMTISQQVRRFRKDLSTCWIDYKKAYDSVPHTWLMRVLELYKVDTTLRTFLMSCMGQWRTVLRYPGCRNIQRNSEPIRIERGIFQGDILSPLWFCLALNPLSTLLEDSGLGYRLRRGGQVISHLLYMDDLKLFAPNNLRLMELLRITETFSSAIRMEFGVDKCAVMHVKRGEIVESVGTQLSDSTNLRALSASETYKYLGMSEALGINVTDMKQSLKERFFGRLKKVFNSLLSGGNKVRAFNSWVMPVLMYSFGILKWTQTELDALDRKVRTLLTANRMHHPRSSVMRLYIPRKCGGRGFLNAKSLHNRKICSLREYFLETDVGMHRDVVTVDKGLTPLSLGKENWRKPVVLDTNDRMEVWQSKELHGRFFRALHGPDVDLLASVAWLRFGDLFGETEGFVYAIMDEVMMTNNYRRFIVKDGTVDICRACHRPGESIRHIISGCSRLANGEYLHRHNLVARIIHQQLALKYSLVESEVPYYRYVPDPVLENGNITLYWDRSIITDRTIVANKPDIVVVDRSERRAMIVDITVPHDENLVKAEKDKQVKYLDLAREVVDMWDVDSAIIVPIVVTANGLIAKSLDQHLKRLSLGSWIKGLIQKAVLLDTARIVRRFLSLEP

SEQ ID NO: 13781 - protein, 1198 aa, Mesoligia furuncula
MLTRLAAKRARLLPPDSSLSSASPPPVPSPTVSAVMTPAAAVASSSSDEYFSPPTTPPPARRRRGRRPPDCLGLRGPPASDRVPAPGGSVQRMRWTQSINENVMRSYYGATEGGNILTAYRVRMLSLFQVLEPAVNVSAQRLSDQVRVIQRNHMLDDTVLDRLRSEMQSSHVIAPQSQTAAILPQPNISHADEGSNDRAINVSTQCNEELRSALEDAIQEYRFMSPELRPRLPRLPMHNKNRALVAALDSQLSKYFDTCEDLIDTHSILYCAAVAACRVAHVKFANDSRATRPKQAVPAWQCRIERRIGGARTLIGKLICFREGNTRPRVMRFVRRAFSGTDISPQDYMSCVTERIDFLKQKVYAWANRIRRYRRRVERYTQNRTFQSDERWVYRGWERPDQGVAETCLPDDDAMCSFWRNIWSVPVSHTEGDWAREVERACDPIPEMGAITICPQDVARAVRPLPNWKSPGPDGLHNFWIKWFPRSHARLASQFQTALKSGSLPQFLTTGITHLLHKSGSTAEPKNYRPITCLPTVYKVLTSILRTKINKHIDTNSIMSASQNGCRNGSRGTKELLLIDMAISQQVRRFRKDLSTCWIDYKKAYDSVPHTWLMRVLELYKVDTTLRTFLMSCMGQWRTVLRYPGCRNIQRNSEPIRIERGIFQGDSLSPLWFCLALNPLSTLLEDSGLGYRLRRGGQVISHLLYMDDLKLFAPNNLQLMELLKITETFSSAIRMEFGVDKCAVMHVKRGEIVESVGTQLSDSTNLRALSASETYKYLGMSEALGINVTDMKQSVKERFFGRLKKVLNSLLSGGNKVRAFNGWVMPVLMYSFGILKWTQTELDALDRRVRTLLTANRMHHPRSSVMRLYIPRKCGGRGFLNAKTLHNREICSLREYFLETDVGMHRDVVIVDKGLTPLSLDKENWRKPVVLDTNDRMEVWQSKELHGRFLRALRGPDVDLQASVAWLRFGNLFGETEGFVCAIMDEVMMTNNYRRFIVKDGTVDICRACHRPGESIRHIISGCSRLANGEYLHRHNLVARIIHQQLALKYNLVESEVPYYRYVPDPVLENGNITLYWDRSIITDRTIVANKPDIVVVDRSERRAMIVDITVPHDENLVKAEKDKQIKYLDLAREVVDMWDVDTAIIVPIVVTANGLIAKSLDQHLRRLSLGSWIKGLIQRAVLLDTARIVRRFLSLEP

SEQ ID NO: 13782 - protein, 1206 aa, Mesoligia furuncula
MLTRSRARHLLKNTHPTSSGSSLSSASQLPDPAPDVSSVRPAAAVASSSSDEYFSPPTTPPPVCRRGRGRPPASLGLRGPPASDRVPAPGGSVQRMRWTQTVNENVMRAYFGATEGGSNLTAYRGRMLSLFQVLEPAVNVSAQRLSDQVRVIQRNHMLDNVVLDRLRLESRNSHVTPASSLIAVQLQNVPSVSPRPDHVYVEDDDEAITVSSQCNARLRSALEDAFREYRSIPPGLRPRLPRLPLHKKNKALVCALDSQLSNCFNNSKDLTDTHSILYCAAVAACRVAHVKFPNSDRAPRPKPAVPAWQCRIECRIGEARALIGKLICFREGNTRPRVMRFVRRAFSGTDISSRDYLSRVTERIDFLKQKIYAWANRIRRYRRRVERYTQNRTFQNDERWVYRAWERPDQGVTDTPLPDDDAMCSFWRNIWSVPVSHTEGDWTAKIERACDLIPEMGVLTISPQDVARAVRPLPNWKSPGPDGLHNFWIKWFQGSHARLASQFQSALESGSLPQFLTTGITHLLHKSGSTADPKNYRPITCLPTVYKVLTSILRAKINKHIDTNSIMSVSQNGCRNGSRGTKELLLIDMTISQQVRRFRKDLSTCWIDYKKAYDSVPHTWLMRVLELYKVDTTLRTFLMSCMGQWRTVLRYPGCRNIQRNSEPIRIERGIFQGDSLSPLWFCLALNPLSTLLEDSGLGYRLRRGGQVISHLLYMDDLKLFAPNNLRLMELLKITETFSSAIRMEFGVDKCAVMHVKRGEIVESVGTQLSDSTNLRTLSASETYKYLGMSEALGINVTDMKQSLKERFFGRLKKVFNSLLSGGNKVRAFNGWVMPVLMYSFGILKWTQTELDALDRKVRTLLTANRIHHPRSSVMRLYIPRKSGGRGFLNAKTLHNREICSLREYFLETDVGMHRDVVAVDKGLTPLSLGKENWRKPVVLDTNDRMEVWQSKELHGRFFRALHGPDVDLLASVAWLRFGDHFGETEGFVYAIMDEVMMTNNYRRFIVKDGTVDICRACHRPGESIRHIISGCSRLANGEYLHRHNLVARIIHQQLALKYSLVESEVPYYRYVPDPVLENGNITLYWDRSIITDRTIVANKPDIVVVDRSERRAMIVDITVPHDENLVKAEKDKQVKYLDLAREVVDMWDVDSAIIVPIVVTANGLIAKSLDQHLKRLSLGSWIKGLIQKAVLLDTARIVRRFLSLEP

SEQ ID NO: 13783 - protein, 962 aa, Mesoligia furuncula
MHKKNKALVCALDSQLSNCFNNSKDLTDTHSILYCAAVAACRVAHVKFPNSDRAPRPKPAVPAWQCRIECRIGEARALIGKLICFREGNTRPRVMRFVRRAFSGTDISSRDYLSRVTERIDFLKQKIYAWANRIRRYRRRVERYTQNRTFQNDERWVYRAWERPDQGVTDTPLPDDDAMCSFWRNIWSVPVSHTEGDWTAKIERACDLIPEMGVLTISPQDVARAVRPLPNWKSPGPDGLHNFWIKWFQGSHARLASQFQSALESGSLPQFLTTGITHLLHKSGSTADPKNYRPITCLPTVYKVLTSILRAKINKHIDTNSIMSVSQNGCRNGSRGTKELLLIDMTISQQVRRFRKDLSTCWIDYKKAYDSVPHTWLMRVLELYKVDTTLRNFLMSCMGQWRTVLRYPGCRNILRNSEPIRIERGIFQGDSLSPLWFCLALNPLSTLLEDSGLGYRLRRGGQVISHLLYMDDLKLFAPNNLRLMELLKITETFSSAIRMEFGVDKCAVMHVKRGEIVESVETQLSDSTNLRALSASETYKYLGMSEALGINVTDMKQSLKERFFGRLKKVFNSLLSGGNKVRAFNSWVMPLLMYSFGILKWTQTELDALDRKVRTLLTANRMHHPRSSVMRLYIPRKCGGRGFLNAKTLHNREICSLREYFLETDVGMHRDVVAVDKGLTPLSLGKENWRKPVVLDTNDRMEVWQSKELHGRFFRALHGPDVDLLASVAWLRFGDLFGETEGFVYAIMDEVMMTNNYRRFIVKDGTVDICRACHRPGESIRHIISGCSRLANGEYLHRHNLVARIIHQQLALKYSLVESEVPYYRYVPDPVLENGNITLYWDRSIITDRTIVANKPDIVVVDRSERRAMIVDITVPHDENLVKAEKDKQVKYLDLAREVVDMWDVDSAIIVPIVVTANGLIAKSLDQHLKRLSLGSWIKGLIQKAVLLDTARIVRRFLSLEP

SEQ ID NO: 13784 - protein, 1198 aa, Mesoligia furuncula
MLTRSALRKARLPPPDSSLSSASPPPVPSLTVSAVTTPAVAVASSSSDEYFSPPTTPPPARRRGGRRPPDGLGPRGPPASDRVPAPGGSVQRMRWTRSINENVMRSYYGATEGGNNLTAYRVRMLSLFQVLEPAVNVSAQRLSDQVRVIQRNHMLDDTVLDRLRNEMQSSHVIAPQPQTAVLLPQCNTNHADEGSNDRATNVSTQCNEELRSALEDAIREYRFMSPEHRPRLPRLPMHNKNRALVAALDSQLSNYFDDCEDLTDTHSILYCAAVAVCRVAHVKFANDSRATRPKPAIPAWQCRIERRIGGARALIGKLICFREGNSRPRVMRFVRRAFLGTDISPQDYMSCVTERIDFLKQKVYAWANRIRRYKRRVERYTQNRTFQSDERWVYRSWERPDQSVADTCLPDDEAMCSFWRNIWSVPVSHTEGDWAREVERACDPIPEMGAITICPQDVARAVRPLPNWKSPGPDGLHNFWIKWFLRSHARLASQFQTALESGSLPQFLTTGITHLLHKSGRTTEPKNYRPITCLPTVYKVLTSILRAKIDKHINTNSIMSVSQNGCKNGSRGTKELLLIDMAISQQVCRSRKDLSTCWIDYKKAYDSVPHTWLMRVLELYKIDATLRTFLMSCMGQWRTVLRYPGCRNIQRNSEPIRIERGIFQGDSLSPLWFCLALNPLSTLLEDSGLGYRLRRGGQVISHLLYMDDLKLFAPNNLQLMELLKVTQTFSSAIRMEFGVDKCAVMHVKRGEIVESVGTQLSDSTNLRALSASETYKYLGMSEALGINVTDMKQSLKERFFGRLKKVLNSLLSGGNKVRAFNGWVMPVLMYSFGILKWTQTELDALDRRVRTLLTANRMHHPRSSVMRLYIPRKCGGRGFLNAKTLHNREICSLREYFLETDVGMHRDVVAVDKGLTPLSLAKENWRKPVVLDTNDRMEVWQSKELHGRFFRALHGPDVDLLASVAWLRFGNLFGETEGFVCAIMDEVMMTNNYRRFIVKDGTVDICRACHRPGESIRHIISGCSRLANGEYLHRHNLVARIIHQQLALKYSLVESEVPYYRYVPDPVLENGNISLYWDRSIITDRTIVANKPDIVVVDRSERRAMIVDITVPHDENLVKAEKDKQIKYLDLAREVVDMWDVDSAIIVPIVVTANGLIAKSLDQHLRRLSLGSWIKGLIQKAVLLDTARIVRRFLSLEP

SEQ ID NO: 13785 - protein, 868 aa, Spilarctia lutea
MRFVKQAFLGTTISPQQYMSSVTERIDFLKQKVCAWANRIRRYKKRGDRFNQNRMFQTNEKWVYRKWEAPNPCDRDGHLPDENATNTFWRNIWSVPVTHTDGDWMRDVKRSCESITNMEPVRINKEDVSCAVRSLPNWKAPGPDGLHNFWLKWFRSSHACLASQFQAALDSGSLPQFLTTGITHLLYKSGGTMDPKNFRPITCLPTLYKLLSSILRIKITTHINHNSILSISQNGCRSGTRGTKELLIIDMTISQQVRRNRRNLATCWIDYKKAYDSVPHTWLLKVLELYKIDKTLCTFLKSCMGQWRTVLRYPGCRQSPMTDVLIKIERGIFQGDSLSPLWFCLALNPLSTLLEGSELGYGLRKDDRVISHLLYMDDLKLLAPTKLQLTALLKITENFSNSIKMEFGVDKCAVMYVKKGLIVESEGVELSDSTKLRSLSVTEGYKYLGFTQSLGIPESDMKQALRERFFGRLKKVLKSLLSGGNKVRAYNGWVMPVLMYSFGILRWTQTELDALDRGVRTLLTAFRMHHPRSSVMRLYIPRKLGGRGLLNIKTLHNREIYNLREYFLHTDVGMHRSVVAVDTGLTPLALAKENWRKPVVLSTDDRREVWKGKELHGRFYRALHGPDIDFKTSTSWLRYGDLFGETEGFVCAIMDEVIMTNNYRKYILKDGTVDICRACHRPGESIRHIISGCSRLANGEYLHRHNQVARIVHQQLALKYNLVISEVPYYRYVPDPVLENGRATLYWDRSIITDRTIVANKPDIVVIDRLERRAIIIDIAVPHDENLVKVEKEKQIKYLDLSHEIVDMWNVDSVIIVPIVVSVHGLIARSLDQHLKRLTLDGWIKGLIQKAVLLDTARIVRRFLSLEP

SEQ ID NO: 13786 - protein, 1197 aa, Spilarctia lutea
MLTRARRRALITSPDSSLRSALPSPEEAIEVPAGAEVSSSSSSDEFFSPPTSPIPVRRQGRDRPPTSLGSRGPLTSNRAPATGGDVRRMKWTHSINENVMRAYFRATELGTNLTAYRVRLVSLFQELEPAVNVSAQRLSDQVRAIQRCHLLDDAVLERIRSDVRNTLTIPSSSHTVDVVVNTPQLPDNHDVDEQRESEIISVSTQCNDRIRSALEDAIQEYRYVNYNNRPRLPRLPIHKRNLALVGALNSLLPDYFGNSEDLSDTHSILYCAAIAVCRVVGVKFIERITTRTKNTVPAWQYRIERRIAETRTLIGKLISFKSGNTRPRVMRFVKQAFLGTTISPQQYMSSVTERIDFLKQKVCAWANRIRRYKKRVDRFNQNRMFQTNEKWVYRKWEAPNPCDRDGHLPDENATNTFWRNIWSVPVTHTDGDWMRDVKRSCESITNMEPVRINKEDVSCAVRSLPNWKAPGPDGLHNFWLKWFRSSHACLASQFQAALDSGSLPQFLTTGITYLLYKSGGTMDPKNFRPITCLPTLYKLLSSILRIKITTHINHNSILSISQNGCRSGTRGTKELLIIDMTISQQVRRNRRNLATCWIDYKKAYDSVPHTWLLKVLELYKIDKTLCTFLKSCMGQWRTVLRYPGCRQSPMTDVLIKIERGIFQGDSLSPLWFCLALNPLSTLLEGSELGYGLRKDDRVISHLLYMDDLKLLAPTKLQLTALLKITENFSNSIKMEFGVDKCAVMYVKKGLIVESEGVELSDSTKLRSLSVTEGYKYLGFTQSLGIPESDMKQALRERFFGRLKKVLKSLLSGGNKVRAYNGWVMPVLMYSFGILRWTQTELDALDRGVRTLLTAFRMHHPRSSVMRLYIPRKLGGRGLLNIKTLHNREIYNLREYFLHTDVGMHRSVVAVDTGLTPLALAKENWRKPVVLSTDDRREVWKGKELHGRFYRALHGPDIDFKTSTSWLRYGDLFGETEGFVCAIMDEVIMTNNYRKYILKDGTVDICRACHRPGESIRHIISGCSRLANGEYLHRHNQVARIVHQQLALKYNLVISEVPYYRYVPDPVLENGRATLYWDRSIITDRTIVANKPDIVVIDRLERRAIIIDIAVPHDENLVKVEKEKQIKYLDLSHEIVDMWNVDSVIIVPIVVSVHGLIARSLDQHLKRLTLDGWIKGLIQKAVLLDTARIVRRFLSLEP

SEQ ID NO: 13787 - protein, 1199 aa, Spilarctia lutea
MLTRARRRAQLSPPDSSLRSALPSPEEAIEVPAGAEASSSSSSDEFFSPPTSPIPVRRQGRGRPPTSLGSRGPLTSNRAPAAGGDVRRMKWTHSINENVMRAYFRATELGTNLTAYRVRLVSLFQELEPAVNVSAQRLSDQVRAIQRCHLLDDAALERIRSDIRNTLTVPSSSHVLNVVTNSTPQVPQNDDISELVDSEIISVSTQYNDRIRSTLEDAIREYRYVNLNNRPRLSRLPIHKRNLALVSALDSLLPKYFSNSEDLSDTHSILYCAAIAVCRVAGVKFAEYTTTTRQENTLPAWQYRIERRIAEARTLIGKLMSFRSGNTRPRVMRFVKRAFLGTTISPQEYMSCVTERIDFLKQKVYAWANRIRRYRKRVDRYNQNRMFQRNEKWVYRKWENLSPCMSDGQVPDENATNSFWRNMWSVPVTHTEGDWYRDVERSCESLLPMEPISIDEEDVSCAVRSLPNWKAPGPDGLHNFWLKWFRSSHACLASQFQTALDSGSLPQFLTTGITHLLYKSGDAMDPKNFRPITCLPTLYKLLTSILRLKITTHINHNSILSISQNGCRSGTRGTKELLIIDMTISQQVRRNRKSLATCWIDYKKAFDSVPHTWLLKVLELYKIDTTLCTFLKVCMGQWRTALRYPGCRQSAMNDVLIKIERGIFQGDSLSPLWFCLALNPLSTLLEGSGLGYRLQKDDRVISHLFYMDDLKLLAPTKLQLTALLKVTENFSNSIKMEFGVDKCAVMYVKKGEIVESEGIELSDSTKLRSLSATETYKYLGFSQSLGMPESDMKQTLRERFFSRLKKVLKSLLSGGNKVRACNGWVMPVLMYSFGVFRWTQTELDAIDRRVRTLLTAFRMHHPRSSVMRLYIPRRLGGRGLLNIKTLHNREVYNLREYFLQTDVGVHRSVVAVDTGLTPLALAKENWRKPVVLSTNDRREVWKGKELHGRFYRALHGPDIDFKTSTSWLRYGDLFGETEGFVCAIMDEVIMTNNYRKYILKDGTVDICRACHRPGESIRHIISGCSRLANGEYLHRHNQVARIVHQQLALKYHLVNSEVPYYRYVPDPVLENGRATLYWDRSIITDRTIVANKPDIVVIDRLERRAIIIDIAVPHDENLVKVEKEKQIKYLDLSHEIVDMWNLDSVIIVPIVVSAHGLIAKSLDQHLKRLTLEGWIKGLIQKAVLLGTARIVRRFLSLEP

SEQ ID NO: 13788 - protein, 868 aa, Xestia c-nigrum
MRFVRRAFSGTDINPRDYMSRVTERIDFLKQKVYAWASRIRRYKRRVDRYTQNRTFQRDERWVYRAWERPDQSVADTRLPDDDAMCSFWRSIWSVPVSHAEGEWTRVIERACDPVPEMGAITISPQDVACAVRPLPNWKSPGPDGLHNFWIKWFTRSHARLATLFQSALESGSLPEFLTTGITHLLHKSGSTAEPKNYRPITCLPTVYKVLTSILRTKICKHVDDNSVMSASQNGCRNGSRGTKELLLIDMAISQQVRRSRKDLSTCWIDYKKAYDSVPHTWLMRVLELYKVDATLRTFLMSCMRQWRTVLRYPGCRQIQRNSEPIRIERGIFQGDSLSPLWFCLALNPLSTLLEDSGLGYQLRKDGRVISHLLYMDDLKLFAPNDLQLMELLKVTETFSSAIRMEFGVDKCAVMHVKRGEIVESVGTQLSDSINLRSLSATETYKYLGMSEALGINVADMKQSLKERFFGRLKKVFNSLLSGGNKVRAFNGWVMPVLMYSFGILKWTQTELDALDTKVRKLLTAFRMHHPRSSVMRLYIPRKCGGRGFLNAKTLHNREICSLRDYFLEADVGMHRDVVTMDKGLTPLSLAKENWRKPIILTTDDRRKEWQGKELHGRFYRALHGPDVDFLASVSWLRSGDLFGETEGFVCAIMDEVMMTNNYRRFIVKDGTVDICRACHRPGESIRHIISGCSRLANGEYLHRHNLVARIIHQQLALKYNLVESEVPYYRYVPDPVLVNGSITLYWDQSIITDRTVIANRPDIVVMDRSERRAMIVDITVPHDENLVKAEKDKQIKYLDLAREVVDMWEVDSAIIVPIVVSAHGLIAKSLDQHLRRLSLGSWIKGLIQKAVLLDTARLVRRFLSLEP

SEQ ID NO: 13789 - protein, 1198 aa, Xestia c-nigrum
MLTRAAARRARLPPPDPSLSSASPPPEPSPIVSAVTPAVAVASSSSDEYFSPPTTPPPVRRRGGRRPPDGLGPRGPPASDRVPAPGGSVQRMRWTQSNNENVMRAYYGATEGGNNLTAYRVRMLSLFQVLEPAVNVSAQRLSDQVRVIQRNRMLDDTVLDRLRTEMHSSHVIATPPSQAVVPPQSTTITNRDDDVSSDMITNVGTQYSEDMRSALEGAIREYRFMTPELRPRLPRLPMHNKNRMLVAVLDSQLSNYFDNCEDLTDVHSVLYCAAVAACRVARVKFPDDRATRPKPAVPAWQYRIEQRIGGARALIGKLICFREGNTRPRVMRFVRRAFSGTDINPRDYMSRVTERIDFLKQKVYAWASRIRRYKRRVDRYTQNRTFQRDERWVYRAWERPDQGVADTRLSDDDAMCSFWRSIWSVPVNHAEGEWTRVVERACDPVSEMGAITISPQDVACAVRPLPNWKSPGPDGLHNFWIKWFTRSHARLATLFQSALESGSLPEFLTTGITHLLHKSGSTAEPKNYRPITCLPTVYKVLTSILRAKITKHIDENSVMSASQNGCRNGSRGTKELLLIDMAISQQVRRSRKDLSTCWIDYKKAYDSVPHTWLMRVLELYKVDATLRTFLMSCMGQWRTVLRYPGCRQIQRNSEPIRIERGIFQGDSLSPLWFCLALNPLSTLLEDSGLGYQLRKDGRVISHLLYMDDLKLFAPNDFQLMELLKVTETFSSAIRMEFGVDKCAVMHVKRGEIVESVGTQLSDSINLRSLSATETYKYLGMSEALGINVADMKQSLKERFFGRLKKVFNSLLSGGNKVRAFNGWVMPVLMYSFGILKWTQTELDALDTKVRKLLTAFRMHHPRSSVMRLYIPRKCGGRGFLNAKTLHNREICSLRDYFLEADVGMHRDVVAMDKGLTPLSLAKENWRKPIILTTDDRRKEWQGKELHGRFYRALHGPDVDFLASVSWLRSGDLFGETEGFVCAIMDEVMMTNNYRRFIVKDGTVDICRACHRPGESIRHIISGCSRLANGEYLHRHNLVARIIHQQLALKYNLVESEVPYYRYVPDPVLVNGSITLYWDQSIITDRTVIANRPDIVVMDRSERRAMIVDITVPHDENLVKAEKDKQIKYLDLACEVVDMWEVDSAIIVPIVVSAHGLIAKSLDQHLRRLSLGSWIKGLIQKAVLLDTARIVRRFLSLEP

SEQ ID NO: 13790 - protein, 904 aa, Xestia c-nigrum
MSSDIYLFIYLFIIGGARALIGKLICFREGNTRPRVMRFVRRAFSGTDISPRDYMFRVTERIDFLKQKVYAWASRIRRYKRRVDRYTQNRTFQRDERWVYRAWERPDQGVADTRLPDDDAMCSFWRSIWSVPVSHAEGEWTRVVERACDPVPEMGAITISPQDVACAVRPLPNWKSPGPDGLHNFWIKWFTRSHARLATLFQSALESGSLPEFLTTGITHLLHKSGSTAEPKNYRPITCLPTVYKVLTSILRAKITKHIDENSVMSASQNGCRNGSRGTKELLLIDMAISQQVRRSRKDLSTCWIDYKKAYDSVPHTWLRRVLELYKVDATLRTFLMSCMGQWRTVLRYPGCRQIQRNSEPIRIERGIFQGDSLSPLWFCLALNPLSTLLEDSGLGYQLRKDGRVISHLLYMDDLKLFAPNDLQLMELLKVTETFSSAIRMEFGVDKCAVMHVKRGGIVESVGTQLSDSINLRSLSATETYKYLGMSEALGISVADMKQLLKERFFGRLKKVFNSLLSGGNKVRAFNGWVMPVLMYSFGILKWTQTELDALDTKVRKLLTAYRMHHPRSSVMRLYIPRKCGGRGFLNAKTLHNREICSLREYFLAADVGMHRDVVAMDKGLTPLSLAKENWRIPVVFTTDDRRKEWQSKELHGRFYRALHGPDVDFQASVSWLRSGDLFGETEGFVCAIMDEVMMTNNYRRFIVKDGTVDICRACHRPGESIRHIISGCSRLANGEYLHRHNLVARIIHQQLALKYNLVESEVPYYRYVPDPVLNSGSITLYWDQSIITDRTVIANRPDIVVMDQSERRAMIVDITVPHDENLVKAEKDKQIKYIDLAREVVDMWEVDSAIIVPIVVSAHGLIAKSLDQYLRRLSLGSWIKGLIQKAVLLDTARIVRRFLSLEP

SEQ ID NO: 13791 - protein, 962 aa, Griposia aprilina
MHNKNRVLVAALDAQLSNYFDDCVDLTDTHSILYCAAVAACRVAHVKFANDSRATRPKPAVPAWQCRIERRIGGARALIGKLICFREGNTRPRVMRFVRRAFAGTNISPQDYMSCVTERIDFLKQKVYAWANRIRRYKRRVERYTQNRTFQRDERWVYRGWERPDQGVADTCLPDDDAMCSFWRNIWSVPVSHTEGDWAREVERACDPIPEMGAISICPQDVTRAVRPLPNWKSPGPDRLHNFWIKWFCRSHARLAAQYQVALESGSLPQFLTTGVTHLLHKSGSTAEPKNYRPITCLPTVYKVLTSILRAKINKHIDTNSIMSASQNGCRNGSRGTKELLLIDMAISQQVRRSQKDLSTCWIDYKKAYDSVPHTWLMRVLELYKVDATLRTFLKSCMGQWRTVLRYPTCRNTQRNSEPIRIERGIFQGDSLSPLWFCLALNPLSTLLEDSGLGYRLRRGGRVISHLLYMDDLKLFAPNNLQLIELLKVTETFSSAIRMEFGLDKCAVMHVKRGEIVESVGTQLSDSMNLRALSASETYKYLGMSEALGVNNTDMKQSLKERFFGRLKKVFNSLLSGGNKVRAFNGWVMPVLMYSFGILKWTQTELDTLDRRVRTLLTANRMHHPRSSVMRLYIPRKCGGRGFLNAKTLHNREICSLREYFLEADVGMHRDVVAVDKGLTPLSLAKENWRKPVVLDTNDRMEVWQSKELHGRFFRALHGPDVDVQASVAWLRFGDLFGETEGFVCAIMDEVMMTNNYRRFIVKDGTVDICRACHRPGESIRHIISGCSRLANEEYLHRHNLVARIIHQQLALKYSFVESEVPYYRYVPDPVLENGTITLYWDRSIITDRTIIANKPDIVLVDRRERRAMIVDITIPHDGNLVKAEKDKQIKYLDLAREVVDIWDVDSAIIVPIVVTANGLIAKSLDQHLRRLTLSSWIKGLIQKAVLLDTARIVRRFLSLEP

SEQ ID NO: 13792 - protein, 1115 aa, Griposia aprilina
MTDVGSVQRMRWTRSINENVMRSYYGATERGNNLTAYRVRMLSLFQVLEPAVNVSAQRLSDQVRVIQRNHMLDDTVLDRLRNEMQSSHVIAPPSQTVVVLPQSNTSQADEESDDRATNVSTQCNDELRSALEDAIREYRFISPELRPRLPRLPMHNKNRVLVAALDAQLSNYFDDCVDLTDTHSILYCAAVAACRVAHVKFANDSRATRPKPAVPAWQCRIERRIGGARALIGKLICFREGNTRPRVMRFVRRAFAGIDISPQDYMSCVTERIDFLKQKVYAWANRIRRYKRRVERYTQNRTFQRDERWVYRDWERPDQGVADTCLPDDDAMCSFWRNIWSVPVSHTEGDWAREVERACDPIPEMGAISICPQDVTRAVRPLPNWKSPGPDGLHNFWIKWFGRSHARLAAQYQVALESGSLPQFLTTGVTHLLHKSGSTAEPKNYRPITCLPTVYKVLTSILRAKINKHIDTNSIMSPSQNGCRNGSRGTKELLLIDMAISQQVRRSRKDLSTCWIDYKKAYDSVPHTWLVRVLELYKVDATLRTFLKSCMGQWRTVLHYPGCRNIQRNNEPIRIERGIFQGDSLSPLWFCLALNPLSTLLEDSGLGYRLRRGGQVISHLLYMDDLKLFAPNNLQLMELLKVTETFSSTIRMEFGVDKCAVMHVKRGEIVESVGTQLSDSINLRALSAFETYKYLGMSEALGINGTDMKQLLKERFFGRLKKVFNSLLSGGNKVRAFNGWVMPVLMYSFGILKWTQTELDALDRKVRTLLTANRMHHPRSSVMRLYIPRKCGGRGFLNAKTLHNREICSLREYFLEADVGMHRDVVTVDKGLTPLSLAKENWRKPVVLDTNDRMEVWQSKELHGRFFRALHGPDVDQLASVAWLRFGDLFGETEGFVCAIMDEVILTNNYRRHIMKDGTVDVCRACHRPGESIRHIISGCSRLANEEYLHRHNLVARIIHQQLALKYSLVESEVPYYRYVPDPVLENGHITLYWDRSIITDRTIVANKPDIVVVDRLERRAMIVDITVPHDGNLVKAEKDKQIKYLDLAREVVDMWDVDSAIIVPIVVTANGLIAKSLDQHLRRLSLGSWIKGLIQKAVLLDTARIVRRFLSLEP

SEQ ID NO: 13793 - protein, 962 aa, Griposia aprilina
MHNKNRVLVAALDAQLSNYFDDCVDLTDTHSILYCAAVAACRVAHVKFANDSRATRPKPAVPAWQCRIERRIGEARALIGKLICFREGNTRPRVMRFVRRAFAGTNISPQDYMSCVTERIDFLKQKVYAWANRIRRYKRRVERYTQNRTFQRDERWVYRGWERPDQGVADTCLPDDDAMCSFWRNIWSVPVSHTEGDWTREVERACDPIPEMGAITICPQDVTRAVRPLPNWKSPGPDGLHNFWIKWFGRSHARLAAQYQVALESGSLPQFLTTGVTHLLHKSGSTAEPKNYRPIACLPTVYKVLTSILRDKINKHIDTNYIMSPSQNGCRNGSRGTKELLLIDMAISQQVRRSRKDLSTCWIDYKKAYDSVPHTWLMRVLELYKVEATLRTFLMSCMGQWRTVLHYPACRNTQRNSEPIRIERGIFQGDSLSPLWFCLALNPLSTLLEDSGLGYRLRRGGQVISHLLYMDDLKLFAPNNSQLMDLLKVTETFSSAIRMEFGVDKCAVMHVKRGEIVESVGTQLSDSINLRALSASETYKYLGMSEALGINGTDMKQSLKDRFFGRLKKVFNSLLSGGNKVRAFNGWVMPVLMYSFGILKWTQTELDALDRKVRTLLTANRMHHPRSSVMRLYIPRKCGGRGFLNAKTLHNREICSLREYFLEADVGVHRDVVTVDKGLTPLSLAKENWRKPVVLDTNDRMEVWQSKELHGRFFRALHGPDVDQLASVAWLRFGDLFGETEGFVCAIMDEVMMTNNYRRFIVKDGTVDICRACHRPGESIRHIISGCSRLANEEYLHRHNLVARIIHQQLALKYSLVESEVPYYRYVPDPVLENGHITLYWDRSIITDRTIVANKPDIVMVDRLERRAIIVDITVPHDGNLVKAEKDKQIKYLDLAREVVDMWDVDSAIIVPIVVTANGLIAKSLDQHLRRLSLGSWIKGLIQKAVLLDTARIVRRFLSLEP

SEQ ID NO: 13794 - protein, 1198 aa, Griposia aprilina
MLTRSAARQARPPPPDSSLSSALLPPVSSPTVSAVTTPAAVVASSSSDEYFSPPTTPPPARRRGGHRPPGGLGPRGPPASDRVPAPGGSVQRMRWTRSINENVMRSYYGATEGGNNLTAYRVRMLSLFQVLEPAVNVTAQRLSDQVRVIQRNHMLDDTVLDRLRNEMQSSHVIAPPSQTVVVLPQSKTSQADEESDDRATNVSTQCNDELRSALEDAIREYRFISPKLRPRLPRLPMHNKNRALVVALDAQLSNYFDDCVDLTDTHSILYCAAVAACRVAHVKFANDSRATRPKPAVPTWQCRIERRVGGARALIGKLICFREGNTRPRVMRFVRRAFAGTDISPQDYMSCVTERIDFLKQKVYAWANRIRRYKRRVERYIQNRTFQRDERWVYRGWERPDQGVADTCLPDDDAMCSFWRNIWSVPVSHTEGDWTREVERACDPIPEMGAITICPQDVARAVRPLPNWKSPGPDGLHNFWIKWFGRSHARLAAQYQVALESGSLPQFLTTGVTHLLHKSGSTAEPKNYRPIACLPTVYKVLTSILRDKINKHIDTNYIMSPSQNGCRNGSRGTKELLLIDMAISQQVRRSRKDLSTCWIDYKKAYDSVPHTWLMRVLELYKVEATLRTFLMSCMGQWRTVLRYPACRNTQRNSEPIRIERGIFQGDSLSPLWFCLALNPLSTLLEDSGLGYRLRRGGQVISHLLYMDDLKLFAPNNSQLMDLLKVTETFSSAIRMEFGVDKCAVMHVKRGEIVESVGTQLSDSINLRALSASETYKYLGMSEAFGINGTDMKQSLKDRFFGRLKKVFNSLLSGGNKVRAFNGWVMPVLMYSFGILKWTQTELDALDRKVRTLLTANRMHHPRSSVMRLYIPRKCGGRGFLNAKTLHNRKICSLREYFLEADVGMHRDVVTVDKGLTPLSLAKENWRKPVVLDTNDRMEVWQSKELHGRFFRALHGPDVDQLASVAWLRFGDLFGETEGFVCAIMDEVMMTNNYRRFIVKDGTVDICRACHRLGESIRHIISGCSRLANEEYLHRHNLVARIIHQQLALKYSLVESEVPYYRYVPDPVLENGHITLYWDRSIITDRTIVANKPDIVMVDRLERRAMIVDITVPHDGNLVKAVKDKQIKYLDLARKVVDMWDVDSAIIVPIVVTANGLIAKSLDQHLRRLSLGSWIKGLIQKAVLLDTARIVRRFLSLEP

SEQ ID NO: 13795 - protein, 1198 aa, Griposia aprilina
MLTRSAARRARPPPPDSSLSSASLPPVSSPTVSAVTTPAAVVASSSSDEYFSPPTTPPPVRRRGGHRPPDGLGPRGPPASDRVPAPGGSVQRMRWTRSINENVMRSYYGATEGGNNLTAYRVRMLSLFQVLEPAVNVSAQRLSDQVRVIQRNHMLDDTVLDRLRNEMQSSHVIAPPSQTVVVLPQSNTSQADKESDDRATNVSTQCNDELRSALEDAIREYRFISPELRPRLPRLPMHNKNRVLVAALDAQLSNYFDDCVDLTDTHSILYCAAVAACRVAHVKFANDSRATRPKPAVPAWQCRIQRRIGGARALIGKLICFREGNTRPRVMRFVRRAFAGTNISPQDYMSCVTERIDFLKQKVYAWANRIRRYKRRVERYTQNRTFQRDERWVYRGWERPDQSVADTCLPDDDAMCSFWRNIWSVPVSHTEGDWTREVERACDSIPEMGAITICPQDVTRAVRPLPNWKSPGPDGLHNFWIKWFGRSHARLAAQYQVALESGSLPQFLTTGVTHLLHKSGSTAEPKNYRPIACLPTVYKVLTSILRDKINKHIDTNYIMSPSQNGCRNGSRGTKELLLIDMAISQQVRRSRKDLSTCWIDYKKAYDSVPHTWLMRVLELYKVEATLRTFLMSYMGQWRTVLHYPACRNTQRNSEPIRIERGIFQGDSLSPLWFCLALNPLSTLLEDSGLGYRLRRGGQVISHLLYMDDLKLFAPNNSQLMDLLKVTETFSSAIRMEFGVDKCAVMHVKRGEIVESVGTQLSDSINLRALSASETYKYLGMSEALGINGTDMKQSLKDRFFGRLKKVFNSLLSGGNKVRAFNGWVMPVLMYSFGILKWTQTELDALDRKVRTLLTANRMHHPRSSVMRLYIPRKCGGRGFLNAKTLHNREICSLREYFLEADVGMHRDVVTVDKGLTPLSLAKENWRKPVVLDTNDRMEVWQSKELHGRFFRALHGPDVDQLASVAWLRFGDLFGETEGFVCAIMDEVMMTNNYRRFIVKDGTVDICRACHRPGESIRHIISGCSRLANEEYLHRHNLVARIIHQQLALKYSLVESEVPYYRYVPDPVLENGHITLYWDRSIITDRTIVANKPDIVMVDRLERRAMIVDITVPHDGNLVKAEKDKQIKYLDLAREVVDMWDVDSAIIVPIVVTANGLIAKSLDQHLRRLSLGSWIKGLIQKAVLLDTARIVRRFLSLEP

SEQ ID NO: 13796 - protein, 1162 aa, Griposia aprilina
MLTRSAARQARPPPPDSSLSSASLPPVSSPIVSAVTTPAAVVASSSSDECFSPPTTPPPARRRGGHRPPDGLGPRGPPASDRVPAPGGSVQRMRWTRSINENVMRSYYGATEGGNNLTAYRVRMLSLFQVLEPAVNVSAQRLSDQVRVIQRNHMLDDTVLDRLRNEMQSSHVIAPPSQTVVVLPQSNTSQADKESDDRATNVSTQCNDELRSALEDAIREYRFISPELRPRLPRLPMHNKNRVLVAALDAQLSNYFDDCVDLTDTHSILYCAAVAACRVAHVKFANDSRATRPKPAVPAWQCRIERRIGGARALIGKLICFREGNTRPRVMRFVRRTFAGSNISPQDYMSCVTERIDFLKQKVYAWGNRIRRYKRRVERYTQNRTFQRDERWVYRGWERPDQGVADTCLPDDDAMCSFWRNIWSVPVSHTEGDWAREVERACDPIPEMGAISICPQDVTRAVRPLPNWKSPGPDGLHNFWIKWFGRSHARLAAQYQVALESGSLPQFLTTGVTHLLHKSGSTAEPKNYRPITCLPTVYKVLTSILRAKINKHIDTNFIMSPSQNGCRNGSRGTKELLLIDMAISQQVRRSRKDLSTCWIDYKKAYDSVPHTWLVRVLELYKVDATLRTFLKSCMGQWKTVLHYPGCRNIQRNNEPIRIERGIFQGDSLSPLWFCLALNPLSTLLEDSGLGYRLRRGGQLISHLLYMDDLKLFAPNNLQLMELLKVTETFSSAIRMEFGVDKCAVMHVKRGEIVESVGTQLSDSINLRALSAFETYKYLGMSEALGINGTDMKQSLKERFFGRLKKVFNSLLSGGNKVRAFNGWVMPVLMYSFGILKWTQTELDALDRKVRTLLTANRMHHPRSSVMRLYIPRKCGGRGFLNAKTLHNREICSLREYFLEADVGMHRDVVTVDKGLTPLSLAKENWRKPVVLDTNDRMEVWQSKELHGRFFRALHGPDVNQLASVAWLRFGDLFGETEGFVCAIMDEVILTNNYRRHIMKDGTVDVCRACHRPGESIRHIISGCSRLANEEYLHRHNLVARIIHQQLALKYSLVESEVPYYRYVPDPVLENGHITLYWDRSIITDRTIVANKPDIVVVDRLERRAMIVDITVPHDGNLVKAEKDKQIKYLDLAREVVDMWDVDSAIIVPIVVTANGLIAKSLD

SEQ ID NO: 13797 - protein, 1106 aa, Griposia aprilina
MRWTRSINENVMRSYYGATEGGNNLTAYRVRMLSLFQVLEPAVNVSAQRLSDQVRVIQRNHMLDDTVLDRLRNEMQSSHVIAPPSQTVVVLPQSNTSQADKESDDRATNVSTQCNDELRSALEDAIREYRFISPELRPRLPRLPMHNKNRVLVAALDAQLSNYFDDCVDLTDTHSILYCAAVAACRVAHVKFANDSRATRPKPAVPAWQCRIERRIGGARALIGKLICFREGNTRPRVMRFVRRTFAGTNISPQDYMSCVTERIDFLKQKVYAWANRIRRYKRRVERYTQNRTFQRDERWVYRGWERPDQGVADTCLPDDDAMCSFWRNIWSVPVSHTEGDWTREVERACDPIPEMGAITICPQDVTRAVRPLPNWKSPGPDGLHNFWIKWFGRSHARLAAQYQVALESGSLPQFLTTGVTHLLHKSGSTAEPKNYRPIACLPTVYKVLTSILRDKINKHIDTNYIMSPSQNGCRNGSRGTKELLLIDMAISQQVRRSRKDLSTCWIDYKKAYDSVPHTWLMRVLELYKVEATLRTFLMSCMGQWRTVLRYPACRNTQRNSEPIRIERGIFQGDSLSPLWFCLALNPLSTLLEDSGLGYRLRRGGQVISHLLYMDDLKLFAPNNSQLMDLLKVTETFSSAIRMEFGVDKCAVMHVKRGEIVESVGTQLSDSINLRALSASETYKYLGMSEALGINGTDMKQSLKDRFFGRLKKVFNSLLSGGNKVRAFNGWVMPVLMYSFGILKWTQTELDALDRKVRTLLTANRMHHPRSSVMRLYIPRKCGGRGFLNAKTLHNREICSLREYFLEADVGTHRDVVTVDKGLTPLSLGKENWRKPVVLDTNDRMEVWQSKELHGRFFRALHGPDVDQLASVAWLRFGDLFGETEGFVCAIMDEVMMTNNYRRFIVKDGTVDICRACHRPGESIRHIISGCSRLANEEYLHRHNLVARIIHQQLALKYSLVESEVPYYRYVPDPVLENGHITLYWDRSIITDRTIVANKPDIVMVDRLERRAMIVDITVPHDGNLVKAEKDKQIKYLDLAREVVDMWDVDSAIIVPIVVTANGLIAKSLDQHLRRLSLGSWIKGLIQKAVLLDTARIVRRFLSLEP

SEQ ID NO: 13798 - protein, 1111 aa, Omphaloscelis lunosa
MRWTQTVNENVMRAYFGATEGGSNLTAYRGRMLSLFQVLEPAVNVSAQRLSDQVRVIQRNHMLDDVVLDRLRLESRNNHVTPASPLVTVQLQNLPSSSPRSDRVGEEDDDGVISVSSQCNVRLRSALEDAFREYRSIPPGLRPKLPRLPMHKKNKALMCTLDSLLSNCFDGSKDLADTHSILYCAAVAACRVAHVKFPNSDRAPRPKPAVPAWQCRIERRIGEARVLIGKLICFREGNTRPRVMRFVKRSFSGTDISFQDYLTRVTERIDFLKQKIYAWANRIRRYRRRVERYTQNRTFQSDERWVYRVWERPDQGVIDTRLPDDDAMCSFWRSIWSAPVSHTEGDWTREIERACEQIPEMEALTISPQDIARAVRPLPNWKSPGPDGLHNFWIKWFQRSHARLASQFQSALESGSLPQFLTTGITHLLHKSGSTAEPKNYRPITCLPTVYKVFTSILRTKINKHIDTNSIMSASQNGCRNGSRGTKELLLIDMAINQQVRRSRRDLSTCWIDYKKAYDSVPHTWLMRVLELYKVNATLRTFLMSCMGQWRTVLRYPGCRQILRNSEPIRIERGIFQGDSLSPLWFCLALNPLSTLLEDSGLGYRLRRGGQVISHLLYMDDLKLFAPNNLQLLELLKVTETFSSAIRMEFGVDKCAVMHVKRGEIVESVGTQLSDSIQLRSLSSIETYKYLGMSEALGVNAADMKQSLKERFFNRLNKVLNSLLSGGNKVRAFNGWVMPVLMYSFGILKWTQTELDALDRRVRTLLTANRMHHPRSSVMRLYIPRKCGGRGFLNAKTLHNREVCSLREYFLEADVGMHRDVVTVDKGLTPLSLANENWRKPIVLDTNDRREVWQSKELHGRFYRALHGPDVDLLASVSWLRFGDLFGETEGFVFAIMDEVMMTNNYRKYIVKDGTVDICRACHRPGESIRHIISGCSRLANGDYLHRHNLVARIIHQQLALKYILVESEVPYYRYVPDPVLENGNITLYWDRSIITDRTIVANKPDIVVIDRLERRTMIIDIAVPHDENLVKAEKDKQIKYLDLAREVVDMWDVDTAIIVPIVVTANGIIAKSLDQHLKRLSLGSWIKGLIQKAVLLDTARIVRRFLSQEP

SEQ ID NO: 13799 - protein, 1045 aa, Omphaloscelis lunosa
MLDDTVLDRLRSEMQSSHVIAPPVRSVIIPSQIITSQADERIDDRATNVSTQCNEELRSALEGAIQEYRFMSPELRPRLPRLPMHNKNKALVAVLDSQLSNYFDDCEDLTDTHSILYCAAVAACRVAHVKFANDFRATRPKPAAPAWQCRIERRIGGARTLIGKLICFREGNTRPRVMRFVRRAFLGTDISPQDYLTRVTERIDFLKQKVYAWANRIRRYKRRVERYTQNRTFQSDERWVYRAWERPDQGVADTHRPDDDAMCSFWRSIWSVPVNHTEGDWTREVERACDPIPEMGAITICPQDVARAVRPLPNWKSPGPDGLHNFWIKWFLRSHARLAAQYQTALESGSLPQFLTTGVTHLIHKSGSTAEPKNYRPITCLPTVYKVLTSILRAKINKHIDTNSIMSASQNGCRNGSRGTKELLLIDMAINQQVRRSRKDLSTCWIDYKKAYDSVPHTWLMRVLELYKVDTTLRTFLMSCMGQWRTVLRYPGCRNIQRNSEPIRIERGIFQGDSLSPLWFCLALNPLSTLLEASGLGYRLRRGGQVISHLLYMDDLKLFAPNNLQLMELLKVTETFSNAIRMEFGVDKCAVMHVKRGEIVESVGTQLSDSINLRALSASETYKYLGMSEALGINVTDMKQSLKERFFGHLKKVLNSLLSGGHKVRAFNGWVMPVLIYSFGILKWTQTELDALDRRVRTLLTAYRMHHPRSSVMRLYIPRKCGGRGFLNAKTLHNREICSLREYFLGVDVGMHRDVVVVDKGLTPLSLAKENWRKPVVLDTKDRMEIWQSKELHGRYFRALHGPDVDLPASVTWLRFGDLFGETEGFVCAIMDEVMMTNNYRRFIVKDGTVDICRACHRPGESIRHIISGCSRLANEEYLHRHNLVARIIHQQLALKYSLVESEVPYYRYVPDPVLENGNITLYWDRSIITDRTIVANKPDIVVVDRGERRTMIIDITVPHDENLVKAEKDKQIKYLDLAREVVDMWDVDSAIIVPIVVTANGLIAKSLDQHLRRLSLGSWIKGLIQRAVLLDTARIVRRFLSLEP

SEQ ID NO: 13800 - protein, 1198 aa, Omphaloscelis lunosa
MLTRSAARRARLPPPDSPLSSASSPPVLSPTVNAVMTPAAAVASSSSDEYFSPPTTPPPARRRGRRRPPDGLGPRGPPASDRVPAPGGSVQRMRWTRSINENVMRSYYGATEGGNNLTAYRVRMLSLFQVLEPAVNVSAQRLSDQVRVIQRNHMLDDTVLDRLRSEMQSSHVIAPPVRSVIVPSQIITSQADERIDDRATNVSTQCNEELRSALEGAIHEYRFMSPELRPRLPRLPMHNKNRALVAALDSQLSNYFDDCEDLTDTHSILYCAAVAVCRVAHVKFSNDSRATRPKPAVPTWQCRIERRICGARTLIGKLICFREGNTRPRVMRFVRRAFLGTDISPQDYMTRVTERIDFLKQKVYAWANRIRRYKRRVERYTQNRTFQSDERWVYRAWERPNQGVTDTHLPDEDAMCSFWRSIWSVPVSHTEGDWTREVERACDSIPEMGAITICPQDVARAVRPLPNWKSPGPDGLHNFWIKWFVRSHARLAAQYQTALESGSLPQFLTTGVTHLLHKSGSTAEPKNYRPITCLPTVYKVLTSVLRAKINKHIDTNSIMSASQNGCRNGSRGTKELLLIDMAISQQVRRSRKDLSTCWIDYKKAYDSVPHTWLMRVLELYKVDITLRTFLMSCMGQWRTVLRYPGCRNIQRNSEPIRIERGIFQGDSLSPLWFCLALNPLSTLLEDSGLGYRLRRGGQVISHLLYMDDLKLFAPNNLQLMELLKVTETFSSAIRMEFGVDKCAVMHVKRGKIMESVGTQLSDSINLRALSASETYKYLGMSEALGINVTDMKQSLKERFFGRLKKVLNSLLSGGNKVRAFNGWVMPVLMYSFGILKWSQTELDALDRRVRTLLTAYRMHHPRSSVMRLYIPRKCGGRGFLNAKTLHNREICSLREYFLEADVGMHRDVVVVDKGLTPLSLAKENWRKPVVLDTKNRMEIWQSKELHGRYFRALHGPDVDLPASVAWLRCGDLFGETEGFVCAIMDEVMMTNNYRRFIVKDGTVDICRACHRPGESIRHIISGCSRLANEEYLHRHNLVARIIHQQLALKYSLVESEVPYYRYVPDPVLENGNITLYWDRSIITDRTIVANKPDIVVVDRGERSAMIIDITVPHDENLVKAEKDKQIKYLDLAREVVDMWDVDSAIIVPIVVTANGLIAKSLDQHLRRLSLGSWIKGLVQKAVLLDTARIVRRFLSLDP

SEQ ID NO: 13801 - protein, 1228 aa, Omphaloscelis lunosa
MLVPRNVRISLDLFEHKLLIIIINNSLTRLAARRARLPPPDSPLSSASSPPVRSPTVNAVMTPAAAVASSSSDEYFSPPTTPPPARRRGRRRPPDGLGPRGPPASDRVPAPGGSVQRMRWTRSINENVMRSYYGATEGGNNLTAYRVRMLSLFQVLEPAVNVSAQRLSDQVRVIQRNHMLDDTVLDRLRSEMQSSHVIAPPLRSVIIPSQMSSVITSQADERIDDRATNVSTHCNEDLRSALEGAIQEYRFMSPELRPRLPRLPMHNKNKALVAVLDSQLSNYFDDCEDLTDTHSILYCAAVAVCRVAHLKFSNDSRATRPKPAAPAWQCRIERRISGARTLIGKLICFREGNTRPRVMRFVRRAFLGTDISPQDYMTRVTERIDFLKQKVYAWANRIRRYKRRVERYTQNRTFQSDERWVYRAWERPDQGVADTHLLDDDAMCSFWRSIWSVPVSHTEGDWTREVERACDPIPEMGAITICPQDVARAVRPLPNWKSPGPDGLHNFWIKWFVRSHARLAAQYQTALESGSLPQFLTTGVTHLLHKSGSTAEPKNYRPITCLPTVYKVLTSILRAKINKHIDTNSIMSVSQNGCRNGSRGTKELLLIDMAISQQVRRSRKDLSTCWIDYKKAYDSVPHTWLMRVLELYKVHTTLRTFLMSCMGQWRTVLRYPGCRNIQRNSEPIRIERGIFQGDSLSPLWFCLALNPLSTLLEDSGLGYRLRRGGQVISHLLYMDDLKLFAPNNLQLMELLKVTETFSSAIRMEFGVDKCAVMHVKRGEIMESVGTQLSDSINLRALSASETYKYLGMSEALGINVTDMKQSLKERFFGRLKKVLNSLLSGGNKVRAFNGWVMPVLMYSFGILKWTQTELDALDRRVRTLLTAYRMHHPRSSVMRLYIPRKCGGRGFLNAKTLHNREICSLREYFLGVDVGMHRDVVVVDKGLTPLSLAKENWRKPVMLDTKDRMEIWQSKELHGRYFRALHGPDVDLPASVTWLRFGDLFGETEGFVCAIMDEVMMTNNYRRFIVKDGTVDICRACHRPGESIRHNNIISGCSRLANEEYLHRHNLVARIIHQQLALKYSLVESEMPYYRYVPDPVLENGNITLYWDRSIITDRTIVANKPDIVVVDRGERRTMIIDITVPHDKNFVKAEKDKQIKYLDLAREVVDMWDVDSAIIVPIVVTANGLIAKSLDQHLRRLSLGSWIKGLIQRAVLLDTARIVRRFLSLEP

SEQ ID NO: 13802 - protein, 1105 aa, Sesamia nonagrioides
MRWTQSINENVMRSYYGATEGGNNLTAYRVRMLSLFQVLEPAVNVSAQRLSDQVRVIQRNRMLDDTVLDRLRNEMQSSRVITHQSQSAEIPPQPTNYADEGSNDRATNVSTQCNEELRNALEAAIREYRFMSAELRPRLPRLPMHNRNRALMAALDAQLSNYFDTCENLTDTHSILYCAAVAACRVAHVKFSSDSRATRPKPVVPAWQHRIERRIGGARALIGKLICFREGNTRPRVMRFVRRAFSGTNTSPPNYMARITERIDFLKQKVYAWANRIRRYKRRVERYAQNRTFQSNQRCVYRDWERPEQGVADTCLPDDDAMCSFWRSIWSVPVSHTEGDWARDVERACDPIPEMGAITICPQDVARAVRPLPNWKSPGPDGLHNFWIKWFPRSHASLASQFQTALVSGSLPQFLTTGITHLLHKSGSTAEPKNYRPITCLPTVYKVLTSILKAKINNHIDSNSIMSVSQNGCRSGSRGTKELLLIDMAISQQVRRSRKDLSTCWIDYKKAYDSVPHTWLMRVLELYKVDTTLRTSLMTCMGQWRTVLRYPGCRNIQRNSEPIRIERGIFQGDSLSPLWFCLALNPLSTLLEDSGLGYRLRRGGQVISHLLYMDDLKLFAPNNLQLKELLKITETFSSAIRMEFGVDKCAVMHIKRGEIVESVGTQLTSSINLRALSASETYKYLGMSEALGINVTVMKQSLKERFFGRLKKVLNSLLSGGNKVRAFNGWVMPVLMYSFGILKWTQTELDALDQRVRTLLTANRLHHPRSSVMRLYIPRKCGGRGFLNAKTLHNREICSLREYFLETDVGMHRDVVVVDKGLTPLSLAKENWRKPVVLDTNDRMEVWKSKELHGRFFRALHGPDVDLQASVAWLRFGDLFWETEGFVCAIMDEVMMTNNYRRFIVKDGTVDICRACHRPGESIRHIISGCSRLANGEYLHRHNLVARIIHQQLALKYNLVESEVPYYRYMPDPVLENGHITLYWDRSIITDRTIVANKPDIVMVDRSERRAMIVDITIPHDENLVKAEKDKQIKYLDLAHEVVDMWEVDSAIIVPIVVTANGLIAKSLDQHLRRLSLGSWIKGLIQKAVLLDTARIVRKFLSLEP

SEQ ID NO: 13803 - protein, 1197 aa, Sesamia nonagrioides
MLTRSAARRARPPSPDSLLSSASPPPASSTTVSAVTTPAAAVALSSSDEYFSPPTTPPPARRRGGRRPPDRLGPRGPSASDRVPAPGGSVQRMRWTQSINENVMRSYYGATEGGNNLTAYRVRMLSLFQVLEPAVNVSAQRLSDQVRVIQRNHMLDDTVLDRLRNEMQSSRIIAHQSQTAEIPPQPTNYADEGSNDRATNVSTQCNEELINALEAAIREYRFTPAEQRPRLPRLPMHNRNRALMAALDAQLSDYFDTCEDLTDTHSILYCAAVAACRVAHVKFPSDSRATRPKPVVPAWQRRIERRIGGARALIGKLICFREGNTRPRVMRFVRRAFAGTNISPQNYMARVTERIDFLKQKVYAWANRIRRYKRRVERYTQNRTFQSNERWVYRDWERPEQGVTDTCLPDDDAMCSFWRSIWSVPVSHTEGDWARDVERACDPIPEMGAITICPQDVACAVRPLPNWKSPGPDGLHNFWIKWFPRSHARLASQFQTALVSGSLPQFLTTGITHLLHKSGSTAEPKNYRPITCLPTVYKVLTSILKTKINKHIDSNSIMSASQNGCKSGSRGTKELLLIDMAISQQVRRSRKDLSTYWIDYRKAYDSVPHTWLMRVLELYKVDATLRTFLMSCMKTWRTVLRYPGCRNIQRNSEPIRIERGIFQGDSLSPLWFCLALNPLSTLLEDSGLGYRLRRGGQVISHLLYMDDLKLFAPNNSQLRELLKITETFSSSIRMEFGVDKCAVMHVKRGEIMESVGTQLTDSINLRALSASETYKYLGMSEALGINVTDMKQSLKERFFGRLKKVLNSLLSGGNKVRAFNGWVMPVLMYSFGILKWTQTELDALDQRVRTLLTANRLHHPRSSVMRLYIPRKCGGRGFLNAKTLHNREVCSLRDYFLVTDVGMHRDVVAADKGLTPLSLAKENWRKPVVLDTNDRMEVWKNKELHGRFFRALHGPDVDFQASVAWLRFGDLFGETEGFVFAIMDDVMMTNNYRRFIVKDGTVDICRACHRPGESIRHIISGCSRLANGEYLHRHNLVARIIHQQLALKYNLVESEVPYYRYTPDPVLENGYITLYWDRSIITDRTIVANKPDIVMVDRSERRAMIVDITIPHDENLVKAEKDKQIKYLDLAHEVVDMWEVDSAIIVPIVVTANGLIAKSLDQHLRRLSLGSWIKGLIQKAVLLDTARIVRKFLSLEP

SEQ ID NO: 13804 - protein, 1197 aa, Sesamia nonagrioides
MLTRSAARRARPPSPDSLLSSASPPPASSATVSAVTTPAAAVASSSSDEYFSPPTTPPPARRRGGRRPPDRLGPRGPSASDRVPAPGGSVQRMRWTQSINENVMRSYYGATEGGNNLTAYRVRMLSLFQVLEPAVNVSAQRLSDQVRVIQRNHMLDDTVLDRLRNEMQSSRIIAHQSQTAEIPPQPTNYADEGSNDRATNVSTQCNEELINALEAAIREYRFTPAELRPRLPRLPMHNRNRALMAALDAQLSDYFDTCEDLTDTHSILYCAAVAACRVAHVKFPSDSRATRPKPVVPAWQHRIERRIGGARALIGKLICFREGNTRPRVMRFVRRAFAGTNISPQNYMARVTERIDFLKQKVYAWANRIRRYKRRVERYIQNRTFQNNERWVYRDWERPEQGVTDTCLPDDDAMCSFWRSIWSVPVSHTEGDWARDVERACDPIPEMGAITICPQDVACAVRPLPNWKSPGPDGLHNFWIKWFPRSHARLASQFQTALVSGSLPQFLTTGITHLLHKSGSTAEPKNYRPITCLPTVYKVLTSILKTKINKHIDSNSIMSASQNGCKSGSRGTKELLLIDMAISQQVRRSRKDLSTCWIDYRKAYDSVPHTWLMRVLELYKVDATLRTFLMSCMRTWRTVLRYPGCRNIQRNSEPIRIERGIFQGDSLSPLWFCLALNPLSTLLEDSGLGYRLRRGGQVISHLLYMDDLKLFAPNNSQLRELLKITETFSSSIRMEFGVDKCAVMHVKRGEIMESVGTQLTDSINLRALSASETYKYLGMSEALGINVTDMKQSLKERFFGRLKKVLNSLLSGGNKVRAFNGWVMPVLMYSFGILKWTQTELDALDQRVRTLLTANRLHHPRSSVMRLYIPRKCGGRGFLNAKTLHNREVCSLRDYFLVNDVGMHRDVVAADKGLTPLSLAKENWRKPVVLDTNDRMEVWKSKELHGRFFRALHGPDVDLQASVAWLRFGDLFGETEGFVFAIMDEVMMTNNYRRFIVKNGTVDICRACHRPGESIRHIISGCSRLANGEYLHRHNLVARIIHQQLALKYNLVESEVPYYRYTPDPVLENGYITLYWDRSIITDRTIVANKPDIVMVDRSERRAMIVDITIPHDENLVKAEKDKQIKYLDLAHEVVDMWEVDSAIIVPIVVTANGLIAKSLDQHLRRLSLGSWIKGLIQKAVLLDTARIVRKFLSLEP

SEQ ID NO: 13805 - protein, 1044 aa, Sesamia nonagrioides
MLDDTVLDRLRNEMQSSRVIAHQSQSAEIPPQPTNYADEGSNDRATNVSTQCNEELRNALEAAIREYRSMSAELRPRLPRLPMHNRNRALMAALDAQLSNYFDTCEDLTDTHSILYCAAVAACRVAHVKFPSDSRATRPKPVVPAWQHRIERRIGGARALIGKLICFREGNTRPRVMRFVRRAFSGTNTSTQNYMARVTERIDFLKQKVYAWANRIRRYKRRVERYTQNRTFQSNERRVYRDWERPEQGVTDTCLPDDDAMCSFWRSIWSVPVSHTEGDWARDVERACDPIPEMGAITICPQDVAHAVRPLPNWKSPGPDGLHNFWIKWFPRSHARLASQFQTALVSGSLPQFLTTGITHLLHKSGSTAEPKNYRPITCLPTVYKVLTSILKTKINKHIDSNSILSASQNGCRSGSRGTKELLLIDMAISQQVRRSRKDLSTCWIDYKKAYDSVPHTWLMRVLELYKVDATLRTFLMTCMRTWRTVLRYPGCRNIQRNSEPIRIERGIFQGDSLSPLWFCLALNPLSTLLEDSGLGYRLRRGGQVISHLLYMDDLKLFAPNNSQLNELLKITEIFSSSIRMEFGVDKCAVMHVKRGEIMEPVGTQLTSSINLRALSASETYKYLGMSEALGINVTDMKQSLKERFFGRLKKVLNSLLSGGNKVRAFNGWVMPVLMYSFGILKWTQTELDALDQRVRTLLTANRLHHPRSSVMRLYIPRKCGGRGFLNAKTLHNREICSLRDYFLETNVGMHRDVVAADKGLTPLSLAKENWRKPVVLDTNDRMEVWKSKELHGRFFRALHGPDVDFQASVAWLRFGDLFGETEGFVFAIMDEVMMTNNYRRFIVKDGTVDICRACHRPGESIRHIISGCSRLANGEYLHRHNLVARIIHQQLALKYKLVESEVPYYRYMPDPVLENGLITLYWDRSIITDRTIIANKPDIVLVDRSERRAMIVDITIPHDENLVKAEKDKQTKYLDLAHEVVDMWEVDSAIIVPIVVTANGLIAKSLDQHLRRLSLGSWIKGLIQKAVLLDTARIVRKFLSLEP

SEQ ID NO: 13806 - protein, 1200 aa, Sesamia nonagrioides
MLTRSAARRARPPSPDSSPSSASPPPVSSPTVNAVMTPAAAVALSSSDEYFSPPTTPPPVRRRGGRRPPDCLGPRGPPASDRAPATGGNVQRMKWTQSINENVMRAYFGATEGGSNLTAYRGRMLSLFQVLEPAVNVSAQRLSDQVRVIQRNHMLDDVVLDRLRLESRNSYVTPASSLVAVQLNSVPSRPNLVDEEDDDEAISVTPQCNEKVRSALEDAFREYRSTPPELRPRLPRLPMHKKNKALVCALDSQLSNYLKDSKDLADTHSILYCGAVAICRVAHVKFPDSDRATRPKPAVPAWQCRIERRIGETRALIGKLMSFREGNTRPRVMRFVRRAFSGTDVSTRDYLLRVTERIDFLKQKIYAWANRIRRYRRRVERYSQNRNFQSDERWVYRAWERSDQGVTDTCLPDDDATRSFWRNIWSVPVSHTEGGWTRDVERACDPVPEMGAITICPQDVARAVRPLPNWKSPGPDGLHNFWIKWFSGSHACLASQFQTALESGSLPQFLTTGITHLLHKSGSTAEPKNYRPITCLPTVYKVLTSILKAKINTHIDSNSIMSASQNGCRNGSRGTKELLLIDMAISQQVHRSRKDLSTCWIDYKKAYDSVPHTWLMRVLELYKVDATLRTFLMTCMSQWRTVLRYPGCRNIQRNSEPIRIERGIFQGDSLSPLWFCLALNPLSTLLADSGLGYRLRRGGQVISHLLYMDDLKLFAHTNSQLKELLKITETFSSAIRMEFGVDKCAVMHVQRGEIVESVGTQLTGSINLRSLSASETYKYLGMSEALGINVTDMKQSLKERFFGRLKKVLNSLLSGGNKVRAFNGWVMPVLMYSFGILKWTQTELDALDQRVRTLLTANRLHHPRSSVMRLYIPRKCGGRGFLNAKTLHNREVCSLREYFLKTDVGMHRDVVAADKGLTPLSLAKENWRKPVVLDTIDRMEVWKSKELHGRFFRALHGPDVDFQASVAWLRFGDLFGETEGFVFAIMDEVMMTNNYRRFIVKDGTVDICRACHRPGESIRHIISGCSRLANGEYLHRHNLVARIIHQQLALKYNLVESEVPYYRYMPDPVLENGHITLYWDRSIITDRTIVANKPDIVLVDRSERRAMIVDITIPHDENLVKAEKDKQIKYLDLAHEVVDMWEVDSSIIVPIVVTANGLIAKSLDQHLRRLSLGCWIKGLIQKAVLLDTARIVRKFLSLEP

SEQ ID NO: 13807 - protein, 962 aa, Sesamia nonagrioides
MHKKNKALVCALDSQLSNYLKDSKDLNDTHSILYCGAVAICRVAHVKFPDNDRATRPKSAVPAWQCRIERRIGETRALIGKLVSFREGNTRPRVMRFVRRAFSGTDTSTRDYLFRVTERIDFFKQKIYAWANRIRRYRRRVERYSQNRNFQSDERRVYRAWERSDQGVTDTCLPDDDATCSFWRNIWSVPVSHTEGSWTRVVERACDPVPEMGAITICHQDVARAVRPLPNWKSPGPDGLHNFWIKWFSGSHARLASQFQTALESGSLPQFLTTGVTHLLHKSGSTAEPRNYRPITCLPTVYKVLTSILKSKINTHIDSNSIMSASQNGCRGGSRGTKELLLIDMAISQQVRRSRKDLSTCWIDYKKAYDSVPHTWLMRVLELYKVDATLRTFLMTCMRTWRTVLRYPGCRNIQRNSEPIRIERGIFQGDSLSPLWFCLALNPLSTLLEDSGLGYRLRRGGQVISHLLYMDDLKLFAHTDSQLKELLKITETFSSSIRMEFGVDKCAVMHVKRGEIMESVGTQLTSSINLRALSASETYKYLGMSEALGINVTDMKQSLKERFFGRLKKVLNSLLSGGNKVRAFNGWVMPVLMYSFGILKWTQTELDALDRRVRTLLTANRLHHPRSSVMRLYIPRKCGGRGFLNAKTLHNREICSLREYFLTTDVGMHRDVVAVDKGLTALSLAKENWRKPVVLDTNDRMEVWKSKELHGRFFKALHGPDVDLQASVAWLRFGDLFGETEGFVCAITDEVMMTNNYRRFIVKDGTVDICRACHRPGESIRHIISGCSRLANGEYLHRHNLVARIIHQQLALKYNLVESEVPYYRYTPDPVLENDHITLYWDRSIITDRTIVANKPDIVLVDRSERRAMIVDITIPHDENLVKAEKDKQIKYLDLAHEVVDMWEVDSAIIVPIVVTANGLIAKSLDQHLRRLSLGSWIKGLIQKAVLLDTARIVRKFLSLEP

SEQ ID NO: 13808 - protein, 1197 aa, Sesamia nonagrioides
MLTRSAARRARPPSPDSLLGSASPPPVSSPTVSAVTTPAAAVALSSSDEYFSPPTTPPPVRRRGGRRPPDRLGPRGPSASDRVPAPGGSVQRMRWTQSINENVMRSYYGATEGGNNLTAYRVRMLSLFQVLEPAVNVSAQRLSDQVRVIQRNHMLDDTVLDRLRNEMQSSRVIAHQSQTAEIPPQSTNYADEGSNDRATNVSTQCNEELINALEAAIREYRSTSAELRPRLPRLPMHNRNRALMAALDAQLSNYFDTCEDLTDTHSILYCAAVAACRVAHVKFPSDSRATRPKPVVPAWQHRIERRIGGARALIGKLICFREGNTRPRVMRFVRRAFAGTNISPQNYMARVTERIDFLKQKVYAWANRIRRYKRRVERYTQNRTFQNNERWVYRDWERPEQGVTDTCLPDDDVMCSFWRSIWSVPVSHTEGDWARDVERACDLIPEMGAITICPQDVACAVRPLPNWKSPGPDGLHNFWIKWFPRSHARLASQFQTALVSGSLPQFLTTGITHLLHKSGSTAEPKNYRPITCLPTVYKVLTSILKTKINKHIDSNSIMSASQNGCRSGSRGTKELLLIDMAISQQVRRSRRDLSTCWIDYRKAYDSVPHTWLMRVLELYKVDATLRTFLMSCMRTWRTVLRYPGCRNIQRNSEPIRIERGIFQGDSLSPLWFCLALNPLSTLLEDSGLGYRLRRGGQVISHLLYMDDLKLFAPNNSQLRELLKITETFSSSIRMEFGVDKCAVMHVKRGEIMESVGTQLTGSINLRALSASETYKYLGMSEALGINVTDMKQSLKERFFGRLKKVLNSLLSGGNKVRAFNGWVMPVLMYSFGILKWTQTELDALDQRVRTLLTANRLHHPRSSVMRLYIPRKCGGRGFLNAKTLHNREVCSLREYFLETDVGMHRDVVAADKGLTPLSLAKENWRKPVVLDTNDRLEVWKSKELHGRFFRALHGPDVDFQASVAWLRFGDLFGETEGFVFAIMDEVMMTNNYRRFIVKDGTVDICRACHRPGESIRHIISGCSRLANGEYLHRHNLVARIIHQQLALKYKLVESEVPYYRYMPDPVLENGHITLYWDRSIITDRTIVANKPDIVLVDRSERRAMIVDITIPHDENLVKAEKDKQIKYLDLAHEVVDMWEVDSAIIVPIIVTANGLIAKSLDQHLRRLSLGSWIKGLIQKAVLLDTARIVRKFLSLGP

SEQ ID NO: 13809 - protein, 1200 aa, Sesamia nonagrioides
MLTRSAARGARSPPPDSSPSSASPPPVSSPTVNAVMTPAAAVALSSSDEYFSPPTTPPPVRRRGGRRPPDCLGPRGPLASDRAPATDGNVQRMKWTQSINENVMRAYFGATEGGSNLTAYRGRMLSLFQVLEPAVNVSAQRLSDQVRVIQRNHMLDDVVLDRLRLESRNSHVTPASSLVAVQLNSVPSRPNLVAEEDDDEAISVTPQCNEKVRSALEDAFREYRSTPPELRPRLPRLPMHKKNKALVCALDSQLSNYLKDSKDLADTHSILYCGAVAICRVAHVKFPDSDRATRPKPAVPAWQCRIERRIGETRALIGKLISFREGNTRPRVMRFVRRAFSGTDVSTRDYLLRVTERIDFLKQKIYAWANRIRRYRRRVERYSQNRNFQSDERWVYRAWERSDQGVTDTCLPDDDATRSFWRNICSVPVSHTEGGWTRDVERACDPVPEMGAITICPQDVARAVRPLPNWKSPGPDGLHNFWIKWFSGSHACLASQFQTALESGSLPQFLTTGITHLLHKSGSTAEPKNYRPITCLPTVYKVLTSILKAKINTHIDSNSIMSASQNGYRNGSRGTKELLLIDMAISQQVRRSRKDLSTCWIDYKKAYDSVPHTWLMRVLELYKVDATLRTFLMTCMSQWRTVLRYPGCRNIQRNSEPIRIERGIFQGDSLSPLWFCLALNPLSTLLEDSGLGYRLRRGGQVISHLLYMDDLKLFAHTNSQLKELLKITETFSSAIRMEFGVDKCAVMHVQRGEIVESVGTQLTGSINLRALSASETYKYLGMSEALGINVTDMKQSLKERFFGRLKKVLNSLLSGGNKVRAFNGWVMPVLMYSFGILKWTQTELDALDRRVRTLLTANRLHHPRSSVMRLYIPRKCGGRGFLNAKTLHNREICSLREYFLTTDVGMHRDVVAVDKGLTPLSLAKENWRKPVVLDTNDRMEVWKSKELLGRFFKALHGPDVDLQASVAWLRLGDLFGETEGFVCAITDEVMMTNNYRRFIVKDGTVDICRACHRPGESIRHIISGCSRLANGEYLHRHNLVARIIHQQLALKYNLVESEVPYYRYTPDPVLENDHITLYWDRSIITDRTIIANKPDIVLVDRSERRAMIVDITIPHDENLVKAEKDKQIKYLDLAHEVIDMWEVDSAIIVPIVVTANGLIAKSLDQHLRRLLLGSWIKGLIQKAVLLDTASIVRKFLSLEP

SEQ ID NO: 13810 - protein, 1197 aa, Sesamia nonagrioides
MLTRSAARRARPPSPDSLLGSASPPPVSSPTVSAVTTPAAAVALSSSDEYFSPPTTPPPVRRRGGRRPPDRLGPRGPSASDRVPAPGGSVQRMRWTQSINENVMRSYYGATEGGNNLTAYRVRMLSLFQVLEPAVNVSAQRLSDQVRVIQRNHMLDDTVLDRLRNEMQSSRVIAHQSQTAEIPPQSTNYADVGSNDRATNVSTQCNEELINALEAAIREYRSTSAELRPRLPRLPMHNRNRALMAALDAQLSNYFDTCEDLTDTHSILYCAAVAACRVAHVKFPSDSRATRPKPVVPAWQHRIERRIGGARALIGKLICFREGNTRPRVMRFVRRAFAGTNISPQNYMARVTERIDFLKQKVYAWANRIRRYKRRVERYTQNRTFQNNERWVYRDWERPEQGVTDTCLPDDDVMCSFWRSIWSVPVSHTEGDWARDVERACDLIPEMGAITICPQDVACAVRPLPNWKSPGPDGLHNFWIKWFPRSHARLASQFQTALVSGSLPQFLTTGITHLLHKSGSTAEPKNYRPITCLPTVYKVLTSILKTKINKHIDSNSIMSASQNGCKSGSRGTKELLLIDMAISQQVRRSRKDLSTCWIDYRKAYDSVPHTWLMRVLELYKVDATLRTFLMSCMRTWRTVLRYPGCRNIQRNSEPIRIERGIFQGDSLSPLWFCLALNPLSTLLEDSGLGYRLRRGGQVISHLLYMDDLKLFAPNNSQLRELLKITETFSSSIRMEFGVDKCAVMHVKRGEIMESVGTQLTGSINLRALSASETYKYLGMSEALGINVTDMKQSLKERFFGRLKKVLNSLLSGGNKVRAFNGWVMPVLMYSFGILKWTQTELDALDQRVRTLLTANRLHHPRSSVMRLYIPRKCGGRGFLNAKTLHNREVCSLREYFLETDVGMHRDVVAADKGLTPLSLAKENWRKPVVLDTNDRLEVWKSKELHGRFFRALHGPDVDFQASVAWLRFGDLFGETEGFVFAIMDEVMMTNNYRRFIVKDGTVDICRACHRPGESIRHIISGCSRLANGEYLHRHNLVARIIHQQLALKYKLVESEVPYYRYMPDPVLENGHITLYWDRSIITDRTIVANKPDIVLVDRSERRAMIVDITIPHDENLVKAEKDKQIKYLDLAHEVVDMWEVDSAIIVPIVVTANGLIAKSLDQHLRRLSLGSWIKGLIQKAVLLDTARIVRKFLSLEP

SEQ ID NO: 13811 - protein, 1201 aa, Sesamia nonagrioides
MLTRSAARKCARPPSPDSLLSSASPPPVSSPTVSAVTTPAAAVASSSSDEYFSPPTTPPPVRRRGGRRPPDRLGPRGPSASDRVPAPGGSVQRMRWTQSINENVMRSYYGATEGGNNLTAYRVRMLSLFQVLEPAVNVSAQRLSDQVRVIQRNHMLDDVVLDRLRLESRNSHVTPASSLVAVQLNSVSPRPNRVDEEDDDRAISVSPQCIEKLRSALEDAFCEYRSTPPELRPRLPRLPMHKKNKALVCALDSQLSYYLKDSKDLTDTHSILYCGAVAICRVAHAKFPDSDRATRPKSAVPAWQCRIERRIGETRALIGKLTSFREGNTRPRVMRFVRRAFSGTDTSTRDYLFRVTERIDFFKQKIYAWANRIRRYKRRVERYSQNRNFQSDERRVYRAWERSDQGVTDTCLPDDDAMCSFWRNIWSVPVSHTEGSWTRVVERACDPVPKMGAITICPQDVARAVRPLPNWKSPGPDGLHNFWIKWFSGSHARLASQFQTALESGSLPQFLTTGVTHLLHKSGSTAEPKNYRPITCLPTVYKVLTSILKSKINTHIDSNSIMSASQNGCRSGSRGTKELLLIDMAIIQQVRRSRKDLSTCWIDYKKAYDSVPHTWLMRVLELYKVDATLRTFLMTCMGTWRTVLRYPGCRNIQRNSEPIRIERGIFQGDSLSPLWICLALNPLSTLLEDSGLGYRLRRGGQVISHLLYMDDLKLFAHTDSQLKELLKITETFSSSIRMEFGVDKCAVMHVKRGEIMESVGTQLMSSINLRALSASETYKYLGMSEALGINVTDMKQSLKERFFGRLKKVLNSLLSGGNKVRAFSGWVMPVLMYSFGILKWTQTELDALDQRVRTLLTANRLHHPRSSVMRLYIPRKCGGRGFLNAKTLHNREVCSLREYFLETDVGMHRDVVAADKGLTPLSLARENWRKPVVLDTNDRLEVWKSKELHGRFFRALHGPDVDFQASVAWLRFGDLFGETEGFVFAIMDEVMMTNNYRRFIVKDGTVDICRACNRPGESIRHIISGCSRLANGEYLHRHNLVARIIHQQLALKYNLVESEVPYYRYMPDPVLENGHITLYWDRSIITDRTIVANKPDIVLVDRSERRAMIVDITIPHDENLVKAEKDKQIKYLDLAHGVVDMWEVDSAIIVPIVVTANGLIAKSLDQHLRRLSLGSWIKGLIQKAVLLDTARIVRKFLSLEP

SEQ ID NO: 13812 - protein, 1197 aa, Sesamia nonagrioides
MLTRSAARRARPPSPDSLLSSALPPPVSSATVSAVTTPAAAVASSSSDEYFSPPTTPPPVRRRGGRRPPDCLGPRGPPASDRVPAPGGSVQRMRWTQSINENVMRSYYGATEGGTNLTAYRVRMLSLFQELEPAVNVSAQRLSDQVRVIQRNHMLDDTVLDRLRNEMQSSRIIAHQSQSAEIPPQPTIYADEGSNDRATNVSTQCNEELRNALEAAIREYRSISAELRPRLPRLPMHNRNRALMGALDAQLSNYFDTCEDLTDTHSILYCAAVAACRVAHVKFPSDSRATRPKPVIPAWQHRIERRIGGARALISKLICFREGNTRPRVMRFVRRAFSGTNTSPQNYMARVTERIDFLKQKVYAWANRIRRYKRRVERYTQNRTFQSNERRVYRDWERPEQGVTDTCLPDDDAMCSFWRSIWSVPVSHTEGDWAQDVERACDPIPEMGAITICPQDVAHAVRPLPNWKSPGPDGLHNFWIKWFPRSHARLASQFQTALVSGSLPQFLTTGITHLLHKSGSTAEPKNYRPITCLPTVYKVLTSILKTKINKHIDSNSILSASQNGCRSGSRGTKELLLIDMAISQQVRRSRKDLSTCWIDYKKAYDSVPHTWLMRVLELYKVDATLRTFLMTCMRTWRTVLRYPGCRNIQRNSEPIRMERGIFQGDSLSPLWFCLALNPLSTLLEDSGLGYRLRRGGQVISHLLYMDDLKLFAPNNSQLNELLKITEIFSSSIRMEFGVDKCAVMHVKRGEIMEPVGTQLTSSINLRALSASETYKYLGMSEALGINVTDMKQSLKERFFGRLKKVLNSLLSGGNKVRAFNGWVMPVLMYSFGILKWTQTELDALDQRVRTLLTANRLHHPRSSVMRLYIPRKCGGRGFLNAKTLHNREICSLRDYFLETDVGMHRDVVASDKGLTPLSLAKENWRKPVVLDTNDRMEVWKSKELHGRFFRALHGPDVDFQASVAWLRFGDLFGETEGFVFAIMDEVMMTNNYRRFIVKDGTVDICRACHRPGESIRHIISGCSRLANGEYLHRHNLVARIIHQQLALKYKLVESEVSYYRYMPDPVLENGHITLYWDRSIITDRTIVANKPDIVLVDRSERRAMIVDITIPHDENLVKAEKDKQIKYLDLAHEVVDMWEVDSAIIVPIVVTANGLIAKSLDQHLRRLSLGSWIKGLIQKAVLLDTARIVRKFLSLEP

SEQ ID NO: 13813 - protein, 1198 aa, Apamea monoglypha
MLTRAASRRARLPPPDSSLSSASPPPVPSLTVSAVTTPAAVVASSSSDEYFSPPTTPPPARRRGGRRPPDGLGPRGPPASDRVPAPGGSVQRMRWTQSINENVMRSYYGATEGGNNLTAYRVRMLSLFQVLEPAVNVTAQRLSDQVRVIQRNHMLDDTVLDRLRSEMQSSHVIAHQSQTAAVLPQSNTSHADEGSNDMATNVSIQYNEELRNALEGAIREYRFMSPELRPRLPRLPMHNKNRALVAVLDAQLSSYFDACEDLTDTHSILYCAAVAACRVAHVKFASDSEATRPKPAIPAWQCRIERRIGGARALIGKLICFREGNTRPRVMRFVRRAFLGTDISSQDYLSRVTERIDFLKQKVYAWANRIRRYKRRVERYTQNRTFQSDERWVYRGWERPDQGVADTCLPDDDAMCSFWRSIWSAPVSHTEGDWTGKIERACDLIPEMGALIISPQDVARAVRPLPNWKSPGLAGLHNFWIKWFQRSHAPLAAQFQSALESGLLPQFITTGITHLLHKSGSTADPKNYRPITCLPTIYKVLTSILRAKINKHIDSNSIMSVSQNGCRNGSRGTKELLLIDMAISQQVRRSRKDLSTCWIDYKKAYDSVPHTWLMRVLELYKVDTTLRTFLMTCMGQWRTVLRYPGCRNIQRNSEPIRINRGIFQGDSLSPLWFCLALNPLSTLLEDSGLGYRLRRGGQVISHLLYMDDLKLFAPNNLQLMKLLKITETFSSAIRMEFGVDKCAVMHVKRGEIVESVGTQLSDFTNLRALSAAETYKYLGMSEALGINVTDMKQSLKERFFGRLKKVFNSLLSGGNKVRAFNSWVMPVLMYSFGILKWTQTELEALDRRVRTLLTANRMHHPRSSVMRLYIPRKCGGRGFLNAKTLHNREICSLREYFLETDVGMHRDVVEVDKGLTPLSLAKENWRKPVVLDTNDRMEVWQSKELHGRFYRALHGPDVDLLASVAWLRFGDLFGETEGFVCAIMDEVMMTNNYRRYIVKDGTVDICRACHRPGESIRHIISGCSRLANGEYLHRHNLVARIIHQQLALKYSLVESEVPYYRYVPDPVLENGNITLYWDRSIITDRTIVANKPDIVVVDRSERRAMIVDITVPHDENLVKAEKDKQIKYLDLAREVVDMWDVDSAIIVPIVVSANGLIAKSLDQHLRRLSLGSWIKGLIQKAVLLDTARIVRRFLSLEP

SEQ ID NO: 13814 - protein, 1198 aa, Apamea monoglypha
MLTRSAARRARLPSPDSSLSSASPPPVSSPTVSAVTTPAAVVASSSSDEYFSPPTTPPPARRRGGRRPPDGLGPRGPLASDRVPAPGGSVQRMRWTRSINENVMRSYYGATEGGNNLTAYRVRMLSLFQVLEPAVNVSAQRLSDQVRVIQRNHMLDDTVLDRLRSEMQSSHVIAPQSQTAAVLPQSNTSHADEGSNDRATNVSIQCNEELRNALEGAIREYRFMSPELRPRLPRLPMHNKNRALVAVLDAQLSSHFDACEDLTDTHSILYCAAVAACRVAHVKFDSESRATRPKPAIPAWQCRIERRIGGARALIGKLICFREGNTRPRVMRFVRRAFLGTDISSQDYLSRVTERIDFLKQKVYAWANRIRRYKRRVERYTQNRTFQSDERWVYRGWERPDQSVADTCLPDDDAMCSFWRSIWSAPVSHTEGDWTGKIERACELIPEMGAITICPQDVARAVRPLPNWKSPGPDGLHNFWIKWFQRSHAPLAAQFQSALESGLLPQFITTGITHLLHKSGSTADPKNYRPITCLPTIYKVLTSILRAKINKHIDSNSIMSVSQNGCRNGSRGTKELLLIDMAISQQVRRSRKDLSTCWIDYKKAYDSVPHTWLMRVLELYKVDTTLRTFLMTCMGQWRTVLRYPGCRNIQRNSEPIRIERGIFQGDSLSPLWFCLALNPLSTLLDDSGLGYRLRRGGQVISHLLYMDDLKLFAPNNLQLMKLLKITETFSSAIRMEFGVDKCAVMHVKRGEIVESVGTQLSDFTNLRALSAAETYKYLGMSEALGINVTDMKQSLKERFFGRLKKVFNSLLSGGNKVRAFNSWVMPVLMYSFGILKWTQTELEALDRRVRTLLTANRMHHPRSSVMRLYIPRKCGGRGFLNAKTLHNREICSLREYFLETDVGMHRDVVAVDKGLTPLSLAKENWRKPVVLDTNDRMEVWQSKELHGRFYRALHGPDVDLLASVAWLRFGDLFGETEGFVCAIMDEVMMTNNYRRYIVKDGTVDICRACHRPGESIRHIISGCSRLANGEYLHRHNLVARIIHQQLALKYSLVESEVPYYRYVPDPVLENGNITLYWDRSIITDRTIVANKPDIVVVDRSERRAMIVDITVPHDENLVKAEKDKQIKYLDLAREVVDMWDVDSAIIVPIVVSANGLIAKSLDQHLRRLSLGSWIKGLIQKAVLLDTARIVRRFLSLEP

SEQ ID NO: 13815 - protein, 962 aa, Apamea monoglypha
MHNKNRALVAVLDAQLSSHFDVCEDLTDTHSILYCAAVAACRVAHVKFASDSEATRPKPAIPAWQCRIERRIGGARALIGKLICFREGNTRPRVMRFVRRAFLGTDISSQDYLSRVTERIDFLKQKVYAWANRIRRYKRRVERYTQNRTFQNDERWVYRGWERPDQSVADTCLPDDDAMCSFWRSIWSAPVSHTEGDWTGKIERACELIPEMGAITICPQDVARAVRPLPNWKSPGPDGLHNFWIKWFQRSHAPLAAQFQSALESGLLPQFITTGITHLLHKSGSTADPKNYRPITCLPTIYKVLTSILRAKINKHIDSNSIMSVSQNGCRNGSRGTKELLLIDMAISQQVRRSRKDLSTCWIDYKKAYDSVPHTWLMRVLELYKVDTTLRTFLMTCMGQWRTVLRYPGCRNIQRNSEPIRIERGIFQGDSLSPLWFCLALNPLSTLLDDSGLGYRLRRGGQVISHLLYMDDLKLFAPNNLQLMELLKITETFSSAIRMEFGVDKCAVMHVKRGEIVESVGTQLSDSTNLRALSASETYKYLGMSEALGINVTDMKQSLKERFFGRLKKVLNSLLSGGNKVRAFNSWVMPVLMYSFGILKWTQTELDALDRRVRTLLTANRLHHPRSSVMRLYIPRKCGGRGFLNAKTLHNREICSLREYFLETDVGMHRDVVAVDKGLTPLSLAKENWRKPVVLDTNDRMEVWQSKELHGRFYRALHGPDVDLLASVAWLRFGDLFGETEGFVCAIMDEVMMTNNYRRFIVKDGTVDICRACHRPGESIRHIISGCSRLANGEYLHRHNLVARIIHQQLALKYNLVESEVPYYRYVPDPVLENGNITLYWDRSIITDRTIVANKPDIVVVDRSERRAMIVDITVPHDENLVKAEKDKQIKYLDLAREVVDMWHVDSAIIVPIVVTANGLIAKSLDQHLRRLSLGSWIKGLIQKAVLLDTARIVRRFLSLEP

SEQ ID NO: 13816 - protein, 1196 aa, Furcula furcula
MLTRHKARLRPPDSSPRSASQPPAPSTGGAPAAVASSESDEYFSPPSSPPPVCRQRGRPPRNLGLLGQPAPNRVPVPGGVVRRMKWTPSINENVMRAYYKATEGGTNLTVYRDRMLSLFQTLEPAVNVSAQRLSDQVRAIQRGHMLDDAVLDRLRSEVQGGRVVACIPSSQAVAPAVNTAPAPRLAANSGDDRDDMSTNISTNVSTQLRSTLEDVVREYRTMPQGLRPRLPRLPMHKRNRALVCALDSLLSSYFDSSEDLADAHSLLYCAAMTACRVARVKFPNSDAATRPRPAVPAWQCRIERRIGEARVLIGKLTCFREGNTRPRVMRFVRCAFSGTGIDPREYLSRVTERIDFLKQKVCAWANRIRRYRARVDRYSQNNMFQRDQRWVYRSWERPSQIGGEVLRPDDDAMIRFWRNIWSVPVTHSEGDWIGDVRQVCEPIPEMGAITIRPQDVADAVRPLPNWKAPGPDGLHNFWLKWLRSSHACLASLFQSAVESGSLPEFLTTGITHLLHKTNSTADPKNYRPITCLPTVYKTLTSILRAKIYRHVESNSIMSASQNGCRSGARGTKELLLIDMAICQQARRNRKDLSTCWIDYKKAYDSVPHTWLMRVLELYKVNTTLRTFLASCMRQWRTVLLYPGSRQTLGDGEPIRIERGIFQGDSLSPLWFCLALNPLSTLLKSSGLGYRLRRGGQVISHLLYMDDLKLFAPTEVQLMGLLKVTETFSSSIRMEFGVDKCAVMHVKRGRLVESRSVQLSDSTDLRTLSATETYKYLGMSQALGINETDMKQSLRERFLGRLRKVLKSLLSGGNRVRAYNGWVMPVLMYSFGILKWTQTELDTLDRTVRTLLTAYRMHHPRSSVMRLYIPRKCGGRGFLNAKTLHNREIYNLREYFLHCGGEMHTDVVAVDSGLTPLSLAKGNWRKPVVHTTGDREAVWQSKELHGRFYRALHGPDVDFSASVAWLRFGDLFGETEGSVCAIMDEVVMTNNYRKYILRDGTIDICRACHRPGESLRHIISGCSRLANGEYLHRHNQVARIIHQQLALKYRLVMSEVPYYRYVPEPVLEDGHITLYWDRSIITDRTIVANRPDIVLIDRTERRAMIVDVTVPHDENLVKAEKDKECKYLDLAHEVVDLWDIDKAIIVPIVVSAHGLMAKSLDKHLKRLTLDGWIKGQMQKAVLLETARIVRKFLSLEP

SEQ ID NO: 13817 - protein, 1202 aa, Spodoptera exigua
MLTRAAARRARPPPPASLLSSASPPPESSPTGSDVTPAVAAASSSSDEYYSPPTTPPPTRRRGGRRPPARLGPRGPPASDRVPAVGGSVQRMRWTQAINENVMRAYYGATEGGNNLTAYRVRMLSLFQVLEPAVNVSAQRLSDQVRVIQRNRMLDDTVLDRLQTEMGSRASASSARTVVPATLPLTSYGIVSTVADEESTDTVAHVSTQCIDELRSALECAIREYRYISPELRPRLPRLPMHNKNRALVAALDSQLSNYLDDCEDLGDTHSIMYCAAVAACRVAHVKFPTNDVTTRPKPAVPAWQRRIECRIAGARALIGKLICFREGNTRPRVMRFVRRAFSGTDISPRDYMSRVTERIDFLKQKVYAWANRIRRYRRRVERYTQNRTFRSNERWVYRTWERPDHGVTDRRLPDDDAMCSFWRSIWSVPVSHTEGDWIRDVERACDPIPQMGTINISPQDVARAVRPLPNWKSPGPDGLHNFWIKWLTRAHARLASQFQSAVESGSLPKFLTTGVTYLLHKSGSTAEPKNYRPITCLPTVYKVLTSILRSKINSHIDKNKIMSTAQNGCKNGSRGTKELLLIDMAISQQVRRSRKDLSTCWIDYKKAYDSIPHTWLMRVLELYKIDTILRTFLMSCMRQWSTVLRYPGCRHTQRNSEPVRIERGIFQGDSLRPLWFCLALNPLSTLLENSGLGYRLKRGGQVISHLLYMDDLKLFAPNKLQLMELLKLTETFSSAIRMEFGVDKCAIMHVKRGEVVESVGTQLTDSINLRSLSPTETYKYLGMSEALGINVTDMKQSLKERFFGRLKKVFNSFLSGGNKVRAFNGWVMPVLMYSFGVLKWSQTELDAMDRQVRTMLTAYRMHHPRSSVMRLYIPRKWGGRGFLNAKTLHNREVCSLREYFLAADVDMHRDVVAVDKGLTLLSLAIENWRKPVVLDTNARREVWQSKELHGRFFRALHGPDVDQVASVAWLRFGDLFGETEGFVCAIMDEVIMTNNYRRFIVKDGTVDICRACHRPGESIRHIISGCSRLANGEYLHRYNLVARIIHQQLALKYSLVESEVPYYRYEPDPVLDNGHITLYWDRSIITDRTIVANKPDIVVVDRKERRAMIVDIAVPHDENLVKAEKDKLIKYIDLAREVVDMWEVDSAIIVPIVVSANGLIAKSLDQHLRRLSLGGWIKGLIQKVVLLDTARIVRRFLSLEP

SEQ ID NO: 13818 - protein, 1202 aa, Spodoptera exigua
MLTRAAARRARPPPPASSLSSASPPPGSSLTVSEETPAVAAASSSSDEYYSPPTTPPPTRRRGGRRPPAGLGPRGPSASDRVPAAGGSVQRMRWTQPINENVMRAYYGATEGGNNLTAYRVRMLSLFQVLEPAINVSAQRLSDQVRVIQRNRMLDNTVLDRLRTEMGSCAGASSSRTVAPAMMPSSNRGIVSTAADEESTDTVTHVSTQCNDELRSALECAIREYRYMSPEIRPRLPRLPMHNKNRVLVAALDSQLSNHFDDCEDLSDTHSMMYCAAVAACRVAHVKFPTSDVATRLKPAVPAWQRRIERRIAGARALIGKLICFREGNTRPRVMRFVRRAFSGTDISPQDYMSRVTERIDFLKQKVYAWANRIRRYKRRVQRYTQNRTFRSNERWVYRAWERPDQGVTDTRLPDDDAMCSFWRSIWSVPVSHTEGDWIREVKRACDPIPQMGAINISPQDVARAVRPLPNWKSPGPDGLHNFWIKWFTRSHARLASQFQAALESGSLPQFLTTGVTHLLHKSGSTTEPKNYRPITCLPTVYKVLTSILRSKINSHIDKNNIMSTAQNGCKSGSRGTKELLLIDMTISQQVRRSRKDLSTCWIDYKKAYDSVPHTWLMRVLELYKIDTKLRTFLMSCMRQWSTVLRYPGCRHIQTNSETVRIERGIFQGDSLSPLWFCLALNPLSTLLENSGLGYRLKRGGQVISHLLYMDDLKLFAPNRLQLMELLKLTETFSSAIRMEFGVDKCAVMHVKRGEIVESVGTQLTDSINLRSLSPTETYKYLGMSEALGINVTDMKQSLRERFFGRLKKVFNSFLSGGNKVRAFNDWVMPVLMYSFGVLKWSQTELDTLDRRVRTMLTAYRMHHPRSSVMRLYIPRKCGGRGFLNAKTLHNREVCSLREYFLAADVGMHRDVVAVDKGLTPLSLASENWRKPVVLDTNARREVWQSKELHGRFFRALHGPDVDQLASVSWLRSGDLFGETEGFVCAIMDEVIMTNNYRRFIVKDGTADICRACHRPGESIRHIISGCSRLANGEYLHRHNLVARIIHQQLALKYSLVGSEVPYYRYEPDPVLENGHITLYWDRSIITDRTIVANKPDIVVVDRNERRAMIVDIAVPHDENLVKAEKDKLIKYIDLAREVVDMWDVDSAVIVPIVVSANGLIAKSLDQHLRRLSLGGWIKGLIQKVVLLDTARIVRRFLSLEP

SEQ ID NO: 13819 - protein, 1197 aa, Mamestra configurata
MLTRSRARHLATHPSPSASSLCSASPPPEPSPTVSAVTPAVAVASSSSDEYFSPPTTPPPARRRRGRRPPDGLGPRGPPASDRVPAPGGSVQRMRWTQSINENVMRSYFGATEGGTNLTAYRGRMLSLFQVLEPAVNVSAQRLSDQVRVIQRNRMLDDSVLDRLRMEMCGHVITPPSQTVAPPQSQISSHADEESNDRVTNVSTQCNEELRSALECAIREYRYVPPELRPRLPRLPMHNKNRALVAALDSQLSNYFDDCEDLTDTHSIMYCAAVAACRVAHVKMTNDRVTRPKPAVPAWQCRIERRIGGARALIGKLICFREGNTRPRVMRFVRRAFSGTDISPRDYMSRVTERIDFLKQKVYAWANRIRRYRRRVERYTQNRTFRSNERWVYRVWEQPDQGVTDTRLPDDDAMCSFWRNIWSVPVSHTEGDWIREVERACDPLPEMGAITISPQDVARAVRPLPNWKSPGPDGLHNFWIKWLQRSHARLASQYQTALESGSLPEFLTTGVTHLLHKSGSTAEPKNYRPITCLPTVYKVLTSILRAKINNHINSNNIMSVSQNGCRNGSRGTKELLLIDMAISQQVRRSRKDLSTCWIDYKKAYDSVPHTWLMRVLELYKIDTMLRTFLMSCMGQWRTVLRYPGCRNIQRNSEPVRIERGIFQGDSLSPLWFCLALNPLSTLLENSGLGYRLKRGGQVISHLLYMDDLKLFAPSNLQLMELLKVTETFSSAIRMEFGVDKCAVMHVKRGEIMESVGTQLSDSINLRSLSSTETYKYLGMSEALGINVTDMKQSLKERFFGRLKKVFNSLLSGGNKVRAFNGWVMPVLMHSFGVLKWTQTELDALDRRVRTLLTAYRMHHPRSSVMRLYIPRKCGGRGFLNAKTLHNREICSLREYFLAVDVGMHRDVVAVDKGLTPLSLANENWRKPAVLDTNDRRAVWQSKELHGRYFRALHGPDVDQLASVAWLRFGDLFGETEGFVCAIMDEVIMTNNYRRFIVKDGTVDICRACHRPGESIRHIVSGCSRLANGEYLHRHNLVARIIHQQLALKYSLVESEVPYYRYAPDPVLDNGNITLYWDRSIITDRTIVANKPDIVVVDRIERRAMIVDITVPHDENLVKAEKDKQIKYIDLAREVVDMWDVDSAIIVPIVVSANGLIATSLDQHLRRLSLGSWIKGLIQKAVLLDTARIVRRFLSLEP

SEQ ID NO: 13820 - protein, 868 aa, Amphipyra berbera
MRFVRRAFSGTEINPRDYMSCVTERIDFLKQKVYAWANRIRRYKRRVERCTQNRMFHSDERLVYRTWERPDQCVSDTHLPDSDAMNTFWRNIWSMPVTHTEGDWMQEVQRACEPIEEMGDITIVPQDVTCAVRPMSNWKSPGPDGLHNFWLKWLRSSHARLASQFQSSLESGSLPEFLTTGVTHLLHKSGSTTEPKNYRPITCLPTVYKLLTSILRAKINSHIINNSIMSASQNGCRNGSRGTKELLLIDMAISQQVRRSRKDLSTCWIDYKKAYDSVPHAWLMRVLELYKVNTTLCAFLTSCMGQWRTVLHYPGCRQIQERGEPIRIERGIFQGDSLSPLWFCLALNPLSTLLEGSGLGYRLRRGGQVISHLLYMDDLKLFAPNNLQLMKLLKVTETFSNSIRMEFGVDKCAVMHVKRGGIMEYVGTQLSDSIQLRSLSSTETYKYLGMSEALGINETDMKQSLRERFYGRLKKVLKSLLSGGNKVRAFNGWVMPVLMYSFGILKWTQTELDALDRRVRTLLTAYRMHHPRSSVMRLYIPRKCGGRGFLNAKTLHNREVCSLREYFLQADVGMHRDVVAVDKGFTPLSLAKENWRKPVVLDTNGRREVWQSKELHGRFYRALHGPDVDFLASVAWLRFGDLFGETEGFVCAIMDEVMMTNNYRKYIVKDGTVDICRACHCPGESIRHIISGCSRLANGEYLHRHNLVARIIHQQLALKYNLVDAEVPYYKYVPDPVLENGHITLYWDRSIITDRTIVANKPDIVVIDRSKRLAMIVDITVPHDENLVKAEKDKEIKYQDLAHEVVDMWEVDSAVIVPIVVTANGLIAKSLDQHLMRLSLSSWVKGLIQKAVLLDTARIVRKFLSLRP

SEQ ID NO: 13821 - protein, 1207 aa, Amphipyra berbera
MLTRSRAKATAQNTRPRPSASSLSSASQPPDSSIVSNVTPAAAVASSSSDEYFSPPSTPPPPPPRRRGRGRPPASLGPRGPPASDRVPAPGGSVQRMRWTPTMNENCMRAYFGATVGGTNLTAYRGRMLSLFQVLEPAVNVSAQRLSDQVRVIQRDHRLTDDALDRLRSEVQSNCIISLQSQTAAQPQVPPMVPPQPIRADEESDDRVTIVSAQCNEQLRSALELAIREYRFTPPNLRPRIPRLPMNRQNRALMCALDSLLSNYFDNSEGLEDTHSILYCAAVAACRVAHVKFDNNDRATRPKPAVPAWQCRIERRINEARALIGKLICFREGNTRPRVMRFVRRAFSGTDINPREYMSRVTERIDFLKQKVYAWANRIRRYKRRVERYTQNRMFHSDERWVYRTWERPEHDVSDTHLPDNDVMNTFWCNIWSMPVTHTEGDWMQEVQRACEPIEEMGDIIIVPQDVTSAVRPMANWKSPGPDGLHNFWLKWLRSSHAPLASQFQSSLESGSLPPFLTTGITHLLHKSGSTAEPKNYRPITCLPTIYKLLTSILRAKINTHIINNSIMSASQNGCKNGSRGTKELLLIDMAISQQVRRSRKDLSTCWIDYKKAYDSVPHTWLMRVLELYKVNTTLCAFLTSCMGQWRTVLHYPGCRQIQGRGEPIRIERGIFQGDSLSPLWFCLALNPLSTLLEGSGLGYRLRRGGQVISHLLYMDDLKLFAPNNLQLMKLLKVTETFSNSIRMEFGVDKCAVMHVKRGGIMESVGIQLSDSIHLRSLSSTETYKYLGMSEALGINETDMKQSLRERFYGRLKKVLKSLLSGGNKVRAFNGWVMPVLMYSFGILKWTQTELDALDRRVRTLLTAYRMHHPRSSVMRLYIPRKCGGRGFLNAKTLHNREVCSLREYFLQADVGMHRDVVAVDKGFTPLSLAKENWRKPVVLDTNGRRKVWQSKELHGRFYRALHGPDVDFLASVAWLRFGDLFGETEGFVCAIMDEVMMTNNYRKYIVKDGTVDICRACHCPGESIRHIISGCSRLANGEYLHRHNLVARIIHQQLALKYNLVNAEVPYYKYVPDPVLENGHITLYWDRSIITDRTIVANKPDIVVIDRTERLTMIVDITVPHDENLVKAEKDKEIKYQDLAHEVVDMWEVDSAVVVPIVVTANGLIAKSLDHHLTRLSLGSWVKGLIQKAVLLDTARIVRKFLSLRP

SEQ ID NO: 13822 - protein, 1203 aa, Amphipyra berbera
MLTRARARKQTAHPRSPDSSLSSASQPPESSPPVSAVTPAAAVASSSSDEYYSPPSSPPPVRRRGGARPPACLGPRGQPATNRVPAAGGNVSRMRWTQSINENVMRAYYGATEGGINLTAYRERMLFLFQVLEPAINVSAQRLSDQVRVVQRNRRLDDTVLERLRSEARNSQTVTFPVQAAVQMQPIAVPPRPIHVDGEGDGEAINVSNQCSEELRSALDDAILEFRTTPPEIRPRLPRLPMHGKNRALMCALDSLLSNYFDGSEDLADTHSILYCAAIAACRVAHVKFTENERATRPKPAVPAWQSRIERRIGGARVLIGKLICFREGNNRPRVMRFVRRAFSGTDISPRDYMSRVTERIDFLKQKVYAWANRIRRYKRRVERYTQNRIFQSDQRRVYRAWERPDPGGGDVRLPDDDALSSFWRSIWSVPIAHTEDGWMRDIEQACEPIAEMEPITITPQDVADAARPLPNWKSPGPDGLHNFWLKWLRSSHARLASQFQSSLESGSLPQFLTTGVTHLLYKSGSTAEPKNYRPITCLPTVYKLLTSILRVKITTHIDNNCIMSASQNGCRKGSRGTKELLLIDMAISQQVRRSQKDLSTCWIDYKKAYDSVPHSWLMRVLELYKINTTLRTFLMSCMRHWRTVLRYPGCRRIRGSGEQIRIERGIFQGDSLSPLWFCLALNPLSTLLEGTGLGYQLRRGGQVISHLLYMDDLKLFAPTDLQLMELLKVTENFSNSIRMEFGVDKCAVMHVKRGRIAESEGIQLPNSVQLRSLSPTETYKYLGMSEALGISETDMRQSLRERFFGRLNKLLKSLLSGGNKVRAFNGWVMPVLMYSFGTLKWTQADLDALDRRVRALLTAHRMHHPRSSVMRLYIPRKCGGRGFLNAKTLHNREVYSLREYFLQAEGVMHRDVVAVDKGFTPLALARENWRKPAVLSTNDREVVWQSKELHGRYYRALHGPDVDFSASVSWLRSGNLFGETEGFVCAIMDEVMMTNNYRKYIVKDGTVDICRACHRPGESIRHIVSGCSRLANGEYLHRHNLVARIIHQQLALKYNLVESEVPYYRYVPDPVLENGHATLYWDRSIITDRTIVANKPDIVVIDRSERRTMIVDITVPHDENLVKAEKDKQIKYLDLAHEVVGMWDVDSAVIVPIVVTANGIIAKSLDIHLMRLSLGGWIKGLIQRAVLLDTARIVRRFLSLEP

SEQ ID NO: 13823 - protein, 1203 aa, Amphipyra berbera
MLTRARARKQTAHPRSPDSSLSSASQPPESSPPVSAVTPAAAVASSSSDEYYSPPSSPPPVRRRGGARPPACLVPRGQPATNRVPAADGNVSRMRWTQSINENVMRAYYGATEGGINLTAYRERMLFLFQVLEPAINVSAQRLSDQVRVVQRNRRLDDTVLERLRSEARNSQTVTFPVRAAVQMQPLAVPPRPIHVDREGDGEAINVSNQCSEELRSALDDAILEFRTTPPEIRPRLPRLPMHGKNRALMCALDSLLSNYFDGSEDLADTHSILYCAAIAACRVAHVKFTENERATRPKPAVPAWQSRIERRIGGARVLIGKLICFREGNNRPRVMRFVRRAFSGTDISPRDYMSRVTERIDFLKQKVYAWANRIRRYKRRVERYTQNRIFQSDQRRVYRAWERPDPGGGDVRLPDDDALSSFWRSIWSVPIAHTEDGWMRDIEQACEPIAEMEPITITPQDVADAARPLPNWKSPGPDGLHNFWLKWLRSSHARLASQFQSSLESGSLPQFLTTGVTHLLYKSGSTAEPKNYRPITCLPTVYKLLTSILRVKITTHIDNNCIMSASQNGCRKGSRGTKELLLIDMAISQQVRRSQKDLSTCWIDYKKAYDSVPHSWLMRVLELYKINTTLRTFLMSCMRHWRTVLRYPGCRRIRGSGEQIRIERGIFQGDSLSPLWFCLALNPLSTLLEGTGLGYQLRRGGQVISHLLYMDDLKLFAPTDLQLMELLKVTENFSNSIRMEFGVDKCAVMHVKRGRIAESEGIQLPNSVQLRSLSPTETYKYLGMSEALGISETDMRQSLRERFFGRLNKLLKSLLSGGNKVRAFNGWVMPVLMYSFGTLKWTQADLDALDRRVRALLTAHRMHHPRSSVMRLYIPRKCGGRGFLNAKTLHNREVYSLREYFLQAEGVMHRDVVAVDKGFTPLALARENWRKPAVLSTNDREVVWQSKELHGRYYRALHGPDVDFSASVSWLRSGNLFGETEGFVCAIMDEVMMTNNYRKYIVKDGTVDICRACHRPGESIRHIVSGCSRLANGEYLHRHNLVARIIHQQLALKYNLVESEVPYYRYVPDPVLENGHATLYWDRSIITDRTIVANKPDIVVIDRSERRTMIVDITVPHDENLVKAEKDKQIKYLDLAHEVVGMWDVDSAVIVPIVVTANGIIAKSLDIHLMRLSLGGWIKGLIQRAVLLDTARIVRRFLSLEP

SEQ ID NO: 13824 - protein, 1132 aa, Amphipyra berbera
MGPRGPPASDGVPAPGGSVQRMRWTQSMNENCMRAYFGATEGGTNLTAYRGRMLSLFQVLEPAVNVSAQRLSDQVRVIQRDHRLTDAALDRLRSEVQSNRIISLQSQTAAQPQTPTVVPPLPIHADEESDDRVTNVSTQCNEQLRSALELAIREYRFTPPNIRPRIPRLPMHRKNRALMCALDSLLSSYFDNSENLEDTHSILYCAAVAACRVAHAKFDNNDRATRPKPAVPAWQCRIERRINEARALIGKLICFREGNTRPRVMRFVRRAFSGTDINPRDYLSRVTERIDFLKQKVYAWANRIRRYKRRVERYTQNRMFHSDERWVYRTWERPDHDVNDTHLPDNDVMNTFWRNIWSMPVTHTEGDWMQEVQRACEPIEEMGDITIVPQDVTSAVRPMANWKSPGPDGLHNFWLKWLRSSHARLASQFQSSLESGSLPEFLTTGVTHLLHKSGSTAEPKNYRPITCLPTVYKLLTSILRAKINSHIINNSIMSVSQNGCKNGSRGTKELLLIDMAISQQVRRSRKDLSTCWIDYKKAYDSVPHTWLMRVLELYKVNTTLCAFLTSCMGQWRTVLHYPGCRQIQGRGEPIRIERGIFQGDSLSPLWFCLALNPLSTLLEGSGLGYQLRRGGQVISHLLYMDDLKLFAPNNLQLMKLLKVTETFSNSIRMEFGVDKCAVMHVKRGGIMESVGTQLSDSIHLRSLSSTETYKYLGMSEALGINATDMKQSLRERFYGRLKKVLKSLLSGGNKVRAFNGWVMPVLMYSFGILKWTQTELDALDRRVRTLLTAYRMHHPRSSVMRLYIPRKCGGRGFLNAKTLHNREVCSLREYFLQADVGMHRDVVAVDKGFTPLSLAKENWRKPVVLDTNGRREVWQSKELHGRFYRALHGPDVDFLASVAWLRFGDLFGETEGFVCAIMDEVMMTNNYRKYIVKDGTVDICRACHCPGESIRHIISGCSRLANGEYLHRHNLVARIIHQQLALKYNLVDAEVPYYKYVPDPVLENGHITLYWDRSIITDRTIVANKPDIVVIDRTERLTMIVDITVPHDENLVKAEKDKEIKYQDLAHEVVDMWEVDSAVIVPIVVTANGLIAKSLDHHLTRLSLGSWVKGLIQKAVLLDTARIVRKFLSLRP

SEQ ID NO: 13825 - protein, 1197 aa, Noctua janthe
MLTRSATRRARLSPPDPSLSSASPPPESSPIVSAVTPAVTVASSSSDEYFSPPTTPPPVRRRGGRRPPDGLGPRGPPASDRVPAPGGSVPRMRWTQSINANVMRAYYGATEGGNNLTAYRVRMLSLFQVLEPAVNVSAQRLSDQVRVIQRNGMLDDTVLDRLRTEMQSSHVIATPPQTVVPPQSTIIPTHDNNVSNDMVTNVSTQCNEEMRCALEGAIREYRFMQPDLRPRVPRLPMHNKNKVLVAVLDSQLSNYFDNCENLTDAHSVLYCAAVAACRVAHVKFSDDRATRPKPAVPSWQYRIERRIGEARALIGKLICFREGNTRPRVMRFVRRAFSGTDISARDYMSRVTERIDFLKQKVYAWANRIRRYKRRVDRYTQNRTFQRDERWVYRAWERPDQGVADTHLPDDDAMCSFWRSIWSVPVSHTEGEWTREVERACDLVPEMGAITISPQDVVRAVRPLPNWKSPGPDGLHNFWIKWFTRSHARLAILFQSALESGSLPEFLTTGITHLLHKSGSTAEPKNYRPIACLPTVYKVLTSILRAKINKHIDGNSVMSASQNGCRNGSRGTKELLLIDMAISQQVRRSRRDLSTCWIDYKKAYDSVPHTWLMRVLELYKVDSTLRIFLMSCMGQWRTVLRYPGCRQIQRNSEPIRIERGIFQGDSLSPLWFCLALNPLSTLLEDSGLGYRLRRGGQVISHLLYMDDLKLFAPNDLQLMELLKVTETFSSAIRMEFGVDKCAVMHVKRGEIVESVGTQLSDSINLRSLSATETYKYLGMSEALGINVADMKQSLKERFFGRLKKVFNSLLSGGNKVRAFNGWVMPVLMYSFGILKWTQTELDALDRRVRTLLTTYRMHHPRSSVMRLYIPRRCGGRGFLNAKTLHNREICSLREYFLETDVGMHRDVVAVDKGLTPLSLAKENWRKPVVLDTNDRMEVWQSKELHGRFFRALHGPDVDLPASVAWLRSGDLFGETEGFVCAIMDEVMMTNNYRRFIVKDGTVDICRACHRPGESIRHIISGCSRLANGEYLHRHNLVARIIHQQLALKYNLVESEVPYYKYVPDPVLENGNITLYWDRSIVTDRTIVANKPDIVVVDRSERRAMIVDITVPHDGNLVKAEKDKQIKYLDLAHEVVDMWDVDSAIIVPIVVSAHGLIAKSLDQYLRRLSLGSWIKGLIQKAVLLDTARIVRRFLSLEP

SEQ ID NO: 13826 - protein, 868 aa, Noctua janthe
MRFVRRAFSGTDISARDYMSRVTERIDFLKQKVYAWANRIRRYKRRVDRYTQNRTFQRDERWVYRAWERPDQGVADTHLPDDDAMCSFWRSIWSVPVSHTEGEWTREVERACDLVPEMGAITISPQDVVRAVRPLPNWKSPGPDGLHNFWIKWFTRSHARLAILFQSALESGSLPEFLTTGITHLLHKSGSTAEPKNYRPIACLPTVYKVLTSILRAKINKHIDDNSVMSASQNGCRNGSRGTKELLLIDMAISQQVRRSRRDLSTCWIDYKKAYDSVPHTWLMRVLELYKVDSTLRIFLMSCMGQWRTVLRCPGCRQIQRNSEPIRIERGIFQGDSLSPLWFCLALNPLSMLLEDSGLGYRLRRGGQVISHLLYMDDLKLFAPNDLQLMELLKVTETFSSAIRMEFGVDKCAVMHVKRGEIVESVGTQLSDSINLRSLSATETYKYLGMSEALGINVADMKQSLKERFFGRLKKVFNSLLSGGNKVRAFNGWVMPVLMYSFGILKWTQTELDALDRRVRTLLTTYRMHHPRSSVMRLYIPRRCGGRGFLNAKTLHNREIYSLREYFLETDVGMHRDVVAVDKGLTPLSLAKENWRKPVVLDTNDRMEVWQSKELHGRFFRALHGPDVDLPASVAWLRSGDLFGETEGFVCAIMDEVMMTNNYRRFIVKDGTVDICRACHRPGESIRHIISGCSRLANGEYLHRHNLVARIIHQQLALKYNLVESEVPYYKYVPDPVLENGNITLYWDRSIVTDRTIVANKPDIVVVDRSERRAMIVDITVPHDGNLVKAEKDKQIKYLDLAHEVVDMWDVDSAIIVPIVVSAHGLIAKSLDQYLRRLSLGSWIKGLIQKAVLLDTARIVRRFLSLEP

SEQ ID NO: 13827 - protein, 1197 aa, Noctua janthe
MLTRSATRRARLSPPDPSLSSASPPPESSPIVSAVTPAVAVASSSSDEYFSPPTTPPPVRRRGGRRPPDGLGPRGPPASDRVPAPGGSVPRMRWTQSINANVMRAYYGATEGGNNLTAYRVRMLSLFQVLEPAVNVSAQRLSDQVRVIQRNGMLDDTVLDRLRTEMQSSHVIATPPQTVVPPQSTIIPTHDNNVSNDMVTNVSTQCNEEMRCALEGAIREYRFMQPDLRPRVPRLPMHNKNKVLVAVLDSQLSNYFDNCENLTDAHSVLYCAAVAACRVAHVKFSDDRATRPKPAVPSWQYRIERRIGEARALIGKLICFREGNTRPRVMRFVRRAFSGTDISARDYMSRVTERIDFLKQKVYAWANRIRRYKRRVDRYTQNRTFQRDERWVYRAWERPDQGVADTHLPDDDAMCSFWRSIWSVPVSHTEGEWTRGVERACDLVPEMGAITISPQDVVRAVRPLPNWKSPGPDGLHNFWIKWFTGSHARLAILFQSALESGSLPEFLTTGITHLLHKSGSTAEPKNYRPIACLPTVYKVLTSILRAKINKHIDDNSVMSASQNGCRNGSRGTKELLLIDMAISQQVRRSRRDLSTCWIDYKKAYDSVPHTWLMRVLELYKVDSTLRIFLMSCMGQWRTVLRYPGCRQIQRNSEPIRIERGIFQGDSLSPLWFCLALNPLSTLLEDSGLGYRLRRGGQVISHLLYMDDLKLFAPNDLQLMELLKVTETFSSAIRMEFGVDKCAVMHVKRGEIVESVGTQLSDSINLRSLSATETYKYLGMSEALGINVADMKQSLKERFFGRLKKVFNSLLSGGNKVRAFNGWVMPVLMYSFGILKWTQTELDVLDRRVRTLLTTYRMHHPRSSVMRLYIPRRCGGRGFLNAKTLHNREIYSLREYFLETDVGMHRDVVAVDKGLTPLSLAKENWRKPVVLDTNDRMEVWQSKELHGRFFRALHEPDVDLPASVAWLRSGDLFGETEGFVCAIMDEVMMTNNYRRFIVKDGTVDICRACHRPGESIRHIISGCSRLANGEYLHRHNLVARIIHQQLALKYNLVESEVPYYKYVPDPVLENGNITLYWDRSIVTDRTIVANKPDIVVVDRSERRAMIVDITVPHDGNLVKAEKDKQIKYLDLAHEVVDMWDVDSAIIVPIVVSAHGLIAKSLDQYLRRLSLGSWIKGLIQKAVLLDTARIVRRFLSLEP

SEQ ID NO: 13828 - protein, 1000 aa, Noctua janthe
MVTNVSTQCNEEMRCALEGAIREYWFMQPDLRPRVPRLPMHNKNKVLVAVLDSQLSNYFDNCENLTDAHSVLYCAAVAACRVAHVKFSDDRATRPNPAVPSWQYRIERRIGEARALIGKLICFREGNTRPRVMRFVRRAFSGTDISTRDYMSRVTERIDFLKQKVYAWANRIRRYKRRVDRYTQNRTFQRDERWVYRAWERPDQGVADTHLPDDDAMCSFWRSIWSVPVSHTEGEWTREVERACDLVPEMGAITISPQDVVRAVRPLPNWKSPGPDGLHNFWIKWFTRSHARLAILFQSALESGSLPEFLTTGITHLLHKSGSTAEPKNYRPIACLPTVYKVLTSILRAKINKHIDDNSVMSASQNGCRNGSRGTKELLLIDMAISQQVRRSRRDLSTCWIDYKKAYDSVPHTWLMRVLELYKVDSTLRIFLMSCMGQWRTVLRYPGCRQIQRNSEPIRIERGIFQGDSLSPLWFCLALNPLSTLLEDSGLGYRLRRGGQVISHLLYMDDLKLFAPNDLQLMELLKVTETFSSAIRMEFGVDKCAVMHVKRGEIVESVGTQLSDSINLRSLSATETYKYLGMSEALGINVADMKQSLKERFFGRLKKVFNSLLSGGNKVRAFNGWVMPVLMYSFGILKWTQTELDALDRRVRTLLTTYRMHHPRSSVMRLYIPRRCGGRGFLNAKTLHNREIYSLREYFLETDVGMHRDVVAVDKGLTPLSLAKENWRKPVVLDTNDRMEVWQSKELHGRFFRALHGPDVDLPASVAWLRSGDLFGETEGFVCAIMDEVMMTNNYRRFIVKDGTVDICRACHRPGESIRHIISGCSRLANGEYLHRHNLVARIIHQQLALKYNLVESEVPYYKYVPDPVLENGNITLYWDRSIVTDRTIVANKPDIVVVDRSERRAMIVDITVPHDGNLVKAEKDKQIKYLDLAHEVVDMWDVDSAIIVPIVVSAHGLIAKSLDQYLRRLSLGSWIKGLIQKAVLLDTARIVRRFLSLEP

SEQ ID NO: 13829 - protein, 868 aa, Noctua janthe
MRFVRRAFSGTDISARDYMSRVTERIDFLKQKVYAWANRIRRYKRRVDRYTQNRTFQRDERWVYRAWERPDQGVADTHMPDDDAMCSFWRSIWSVPVSHTEGEWTREVERACDLVPEMGAITISPQDVVRAVRPLPNWKSPGPDGLHNFWIKWFTRSHARLAILFQSALESGSLPEFLTTGITHLLHKSGSTAEPKNYRPIACLPTVYKVLTSILRAKINKHIDDNSVMSASQNGCRNGSRGTKELLLIDMAISQQVRRSRRDLSTCWIDYKKAYDSVPHTWLMRVLELYKVDSTLRIFLMSCTGQWRTVLRYPGCRQIQRNSEPIRIERGIFQGDSLSPLWFCLALNPLSTLLEDSGLGYRLRRGGQVISHLLYMDDLKLFAPNDLQLMELLKVTETFSSAIRMEFGVDKCAVMHVKRGEIVESVGTQLSDSINLRSLSATETYKYLGMSEALGINVADMKQSLKERFFGHLKKVFNSLLSGGNKVRAFNGWVMPVLMYSFGILKWTQTELDALDRRVRTLLTTYRMHHPRSSVMRLYIPRRCGGRGFLNAKTLHNREIYSLREYFLETDVGMHRDVVAVDKGLTPLSLAKENWRKPVVLDTNDRMEVWQSKELHGRFFRALHGPDVDLPASVAWLRSGDLFGETEGFVCAIMDEVMMTNNYRRFIVKDGTVDICRACHRPGESIRHIISGCSRLANGEYLHRHNLVARIIHQQLALKYNLVESEVPYYKYVPDPVLENGNITLYWDRSIVTDRTIVANKPDIVVVDRSERRAMIVDITVPHDGNLVKAEKDKQIKYLDLAHEVVDMWDVDSAIIVPIVVSAHGLIAKSLDQYLRRLSLGSWIKGLIQKAVLLDTARIVRRFLSLEP

SEQ ID NO: 13830 - protein, 1000 aa, Noctua janthe
MVTNVSTQCNEEMRCALEGAIREYRFMQPDLRPRVPRLPMHNKNKVLVAVLDSQLSNYFDNCENLTDAHSVLYCAAVAACRVAHVKFSDDRATRPKPAVPSWQYRIERRIGEARALIGKLICFREGNTRPRVMRFVRRAFSGTDISARDYMSRVTERIDFLKQKVYAWANRIRRYKRRVDRYTQNRTFQRDERWAYRAWERPDQGVADTHLPDDDAMCSFWRSIWSVPVSHTEGEWTREVERACDLVPEMGAITISPQDVVRAVRPLPNWKSPGPDGLHNFWIKWFTRSHARLAILFQSALESGSLPEFLTTGITHLLHKSGSTAEPKNYRPIACLPTVYKVLTSILRAKINKHIDDNSVMSASQNGCRNGSRGTKELLLIDMAISQQVRRSRRDLSTCWIDYKKAYDSVPHTWLMRVLELYKVDSTLRIFLMSCMRQWRTVLRYPGCRQIQRNSEPIRIERGIFQGDGLSPLWFCLALNPLSTLLEDSGLGYRLRRGGQVISHLLYMDDLKLFAPNDLQLMELLKVTETFSSAIRMEFGVDKCAVMHVKRGEIVESVGTQLSDSINLRSLSATETYKYLGMSEALGINVADMKQSLKERFFGRLKKVFNSLLSGGNKVRAFNGWVMPVLMYSFGILKWTQTELDALDRRVRTLLTTYRMHHPRSSVMRLYIPRRCGGRGFLNAKTLHNREIYSLREYFLETDVGMHRDVVAVDKGLTPLSLAKENWRKPVVLDTNDRMEIWQSKELHGRFFRALHGPDVDLPASVAWLRSGDLFGETEGFVCAIMDEVMMTNNYRRFIVKDGTVDICRACHRPGESIRHIISGCSRLANGEYLHRHNLVARIIHQQLALKYNLVESEVPYYKYVPDPVLENGNITLYWDRSIVTDRTIVANKPDIVVVDRSERRAMIVDITVPHDGNLVKAEKDKQIKYLDLAHEVVDMWDVDSAIIVPIVVSAHGLIAKSLDQYLRRLSLGSWIKGLIQKAVLLDTARIVRRFLSLEP

SEQ ID NO: 13831 - protein, 995 aa, Noctua janthe
MNNFFNQTFGNLEGAIREYRFMQPDLRPRVPRLPMHNKNRVLVAVLDSQLSNYFDNCEDLTDAHSVLYCAAVAACRVAHVKFSDDRATRPKPAVPSWQYRIERRIGEARALIGKLICFREGNTRPRVMRFVRRAFSGTDISARDYMSRVTESIDFLKQKVYAWANRIRRYKRRVDRYTQNRTFQRDERWVYRAWERPDQGVADTRLPDDDAMCSFWRSIWSVPVSHTEGEWTREVERACDLVPEMGAITISPQDVVRAVRPLPNWKSPGPDGLHNFWIKWFTRSHARLAILFQSALESGSLPEFLTTGITHLLHKSGSTAEPKNYRPITCLPTVYKVLTSILRAKINKHIDDNSVMSASQNGCRNGSRGTKELLLIDMAISQQVRRSRKDLSTCWIDYTKAYDSVPHTWLMRVLELYKIDATLRTFLMSCMGQWRTVLRYPGCRQIQRNSEPIRIERGIFQGDSLSPLWFCLALNPLSTLLEDSGLGYRLRRGGQVISHLLYMDDLKLFAPNDLQLMELLKVTETFSSAIRMEFGVDKCAVMHVKRGEIVESVGTQLSDSINLRSLSATETYKYLGMSEALGINVADMKQSLKERFFGRLKKVFNSLLSGGNKVRAFNGWVMPVLMYSFGILKWTQTELDALDRRVRTLLTAYRMHHPRSSVIRLYIPRRCGGRGFLNAKTLHNREICSLREYFLETNVGMHRDVVAVDKGLTPLSLAKENWRKPVVLDTNDRMEVWQSKELHGRFFRALHGPDVDLSASVTWLRSGDLFGETEGFVCAIMDEVMMTNNYRRFIVKDGTVDICRACHRPGESIRHIISGCSRLANGEYLHRHNLVARIIHQQLALKYNLVESEVPYYKYVPDPVLENGSITLYWDRSIITDRTIVANKPDIVVVDRSERRAMIVDITVPHDENLVKAEKDKQIKYLDLAREVVDMWDVDSAIIVPIVVSAHGLIAKSLDQYLRRLSLGSWIKGLIQKAVLLDTARIVRRFLSLEP

SEQ ID NO: 13832 - protein, 1200 aa, Mythimna ferrago
MLTRAAARRARPPPSASSLSSASPPPEPSPIVSAVTPAVAAASSSSDEYYSPPTTPPPTRRRGGRRPPDCLGLRGPPASDRVPAPGGSVQRMRWTQSINENVMRSYYGATEGGNNLTAYRVRMLSLFQVLEPAVNVSAQRLSDQVRVILRNHMLDDTVLDRLRTEMSDRVITPPSQPMVSAVVPPSSCISFHTDEVSYDTVTNVSNQCNSELRSALECAIREYRNIPPELRPRIPRLPMCNKNRALVAALDSQLSNYFDDCEDLTDTHSIMYCAAVAACRVAHVKFPNSDVATRPKPAVPAWQCRIERRIGGARALIGKLICFREGNTRPRVMRFVRRAFSGTDISPRDYMSRVTERIDFLKQKVYAWANRIRRYKRRVERYTQNRTFRSNERWVYRAWERPDQGVTDVRLPDDDAMSSFWRSIWSVPVSHTEGDWTREVERACDPIPQMGAIDISPQDVVRAVRPLPNWKSPGPDGLHNFWIKWFTRSHARLAYQFQSALESGSLPQFLTTGITHLLHKSGSTAEPKNYRPITCLPTVYKVLTSILRSKINSHIDENSIMSPSQNGCRNGSRGTKELLLIDMTISQQVRRSRKDLSTCWIDYRKAYDSVPHTWLMRVLELYKIDTTLRTFLMSCMRQWSTVLRYPGCRNIQRNSEPVRIERGIFQGDSLSPLWFCLALNPLSTLLENSGLGYRLKRGGQVISHLLYMDDLKLFAPNNLQLMELLKVTETFSSAIRMEFGVDKCAVMHVKRGEVVESVSTQLTDSINLRSLSPTETYKYLGMSEALGISITDMKQSLRERFFGRLKKVFNSLLSGGNKVRAFNGWVMPVLMYSFGVLKWTQTELDALDRRVRTLLTAYRMHHPRSSVMRLYIPRKCGGRGFLNAKTLHNREVCSLREYFLAAAVGMHRDVVAVDKGLTPLSLANENWRKPIVLDTNDRREVWQSKELHGRFFRALHGPDVDQLASVAWLRFGDLFGETEGFVCAIMDEVIMTNNYRRFIVKDGTVDICRACHRPGESIRHIISGCSRLANGEYLHRHNLVARIIHQQLALKYSLVESEVPYYRYEPDPVLDNGHITLYWDRPIITDRTIVANKPDIVVVDRSERRAMIVDISVPHDENLVKAEKDKQIKYIDLAREVVDMWEVDSAVIVPIVVSANGLIAKSLDQHLRRLSLGDWIKGLIQKAVLLDTARIVRRFLSLEP

SEQ ID NO: 13833 - protein, 1200 aa, Mythimna ferrago
MLTRAAARRARPPPLASSLSSASLPPEPSLTVSAVTPAAAAASSSSDEYYSPPTTPPPARRRGGRRPPACLGPRGPPVSDRVPAAGGSVPRMRWTQSTNENVMRAYYGATEGGNNLTAYRVRMLSLFQVLEPAVNVSAQRLSDQVRVIQRNNMLDDTVLDRLRTEMSNRVITPPSQPVVPVVVPQSSHISLHTDEVSTDTVTNVSTQCNNELRSALECAIREYRNMPLELRPRLPRLPMHNKNKALVAALDSQLSNYFDDCEDLTDTHSIMYCAAVAACRVAHVKFPNSDVATRTKPAVPAWQYRIERRIGGARALIGKLICFREGNTRPRVMRFVRRAFSGTDISPRDYMSRATERIDFLKQKVYAWANRIRRYKRRVERYIQNSTFRSNERWVYRAWERPDQGVTDTRPPDDDAMCSFWRNIWSVPVSHTEGGWTREVERACESVTEMGAITISPQDVARAVRPLPNWKSPGPDGLHNFWIKWLQRSHARLASQYQAALESGSLPEFLTTGVTHLLHKSGSTAEPKNYRPITCLPTVYKVLTSILRAKINHHVDNNAIMSASQNGCRNGSRGTKELLLIDMAISQQVRRSRKDLSTCWIDYKKAYDSVPHTWLMRVLELYKVDATLRTFLMSCMRQWRTVLRYPGCRNIQRNSEPVRIERGIFQGDSLSPLWFCLALNPLSTLLENSGLGYRLKRGGQVISHLLYMDDLKLFAPNNLQLMELLKVTETFSSAIRMEFGVDKCAVMHIKRGEIVESVGIQLSDSIHLRSLSPTETYKYLGMSEALGINATDMKQSLRERFFGRLKKVLNSLLSGGNKVRAFNGWVMPVLMYAFGVLKWTQTELDALDRRVRTLLTAYRMHHPRSSVMRLYIPRKCGGRGFLNAKSLHNREVCSLREYFLAADGGMHRDVVAVDKGLTPLSLANENWRKPVVLDTNVRREVWQSKELHGRFFRALHGPDVDQLASVAWLRVGDLFGETEGFVCAIMDEVIMTNNYRRFIVKDGTVDICRACHRPGESIRHIISGCSRLANGEYLHRHNLVARIIHQQLALKYSLVESEVPYYRYVPDPVLDSGDITLYWDRSIITDRTIVANKPDIVVVDRSERRAMIVDISVPHDENLAKAEKDKQIKYIDLAREVVDMWEVDSAIIVPIVVSANGLIAKSLDQHLRRLSLGDWIKGLIQKAVLLDTARIVRRFLSLEP

SEQ ID NO: 13834 - protein, 1200 aa, Mythimna ferrago
MLTRAAARRARPPPPASSLSSASPPPEPSPIVSAVTPAVAAASSSSDEYYSPPTTPPPTRRRGGRRPPDCLGPRGPPASDRVPAPGGSVQRMRWTQSINENVMRSYYGATEGGNNLTAYRVRMLSLFQVLEPAVNVSAQRLSDQVRVILRNHMLDDTVLDRLRTEMSDRVITPPSQPVVPAVVPPSNYISFHTDEGSSDTVTNVSNQCNSELRSALECAIGEYRNIPPELRPRIPRLPMCNKNRALVAALDSQLSNYFDDCEDLTDTHSIMYCAAVAACRVAHVKFPNSDVATRPKPAVPAWQCRIERRIGGARALIGKLICFREGNTRPRVMRFVRRAFSGTDISPRDYMSRVTERIDFLKQKVYAWANRIRRYKRRVERYTQNRTFRSNERWVYRAWERPDQGVTDARLPDDDAMSSFWRNIWSVPVSHTEGDWTREVERACDPIPQMGAIDISPQDVARAVRPLPNWKSPGPDGLHNFWIKWFTRSHARLAYQFQSALESGSLPQFLTTGITHLLHKSGSTAEPKNYRPITCLPTVYKVLTSILRSKINSHIDENSIMSPSQNGCRNGSRGTKELLLIDMTISQQVRRSRKDLSTCWIDYRKAYDSVPHTWLMRVLELYKIDTTLRTFLMSCMRQWSTVLRYPGCRNIQRNSEPVRIERGIFQGDSLSPLWFCLALNPLSTLLENSGLGYRLKRGGQVISHLLYMDDLKLFTPNNLQLMELLKVTEIFSSAIRMEFGVDKCAVMHVKRGEVVESVSTQLTDSINLRSLSPTETYKYLGMSEALGISITGMKQSLRERFFGRLKKVFNSLLSGGNKVRAFNGWVMPVLMYSFGVLKWTQTELDALDRRVRTLLTAYRMHHPRSSVMRLYIPRKCGGRGFLNAKTLHNREVCSLREYFLAADVGMHRDVVAVDKGLTPLSLANENWRKPIVLDTNDRREVWQSKELHGRFFRALHGPDVDQLASVAWLRFGDLFGETEGFVCAIMDEVIMTNNYRRFIVKDGTVDICRACHRPGESIRHIISGCSRLANGEYLHRHNLVARIIHQQLALKYSLVESEVPYYRYEPDPVLDNGHITLYWDRPIITDRTIVANKPDIVVVDRSERRAMIVDISVPHDENLVKAEKDKQIKYIDLAREVVDMWEVDSAVIVPIVVSANGLIAKSLDQHLRRLSLGDWIKGLIQKAVLLDTARIVRRFLSLEP

SEQ ID NO: 13835 - protein, 1004 aa, Mythimna ferrago
MINMYIIINEWNNNNNNLRSALEDAFREYRSIPPELRPRLPRLPMHRKNRALVCALDSQLSNCFDSSEDLSDAHSILYCAAAAACRVAHVKIPNNDRATRPAKPAWQCRIERRIGETGALIGKLICFREGNTRPRVMRFVRRAFSGTDISPRDYLPRITERIDFLKQKVYAWANRIRRYKRRVERYTRNHTFQSNERWVYRAWERPDQSVIDTRLPDDDAMYSFWRSIWSVPVSHTEGDWTREIERECELIPEMGAINISPQDVACAVRPLPNWKSPGPDGLHNFWLKWFQGSHARLASQFQSALESGSLPQFLTTGITHLLHKSGSTAEPKNYRPITCLPTVYKVLASILRAKINNHIETNSIMSASRNGCGNGSRGTKELLLIDVAISQQVRRSRRDLSTCWIDYKKAYDSVPHAWLMRVLELYKVDATLRAFLMSCMGQWRTVLHYPGCRRVSENSEPLRIERGIFQGDSLSPLWFCLALSPLSTLLEGSGLGYRLRREGQVISHLLYMDDLKLFASNNLQLMELLKVTETFSSAIRMEFGLDKCAVMHVKRGEIMESVGTQLSDSIHLRSLCSTETYKYLGMSEALGINAADVKQSLRERFFGRLNKVLNSLLSGGNRVRAFNGWVMPVLMYSFGILKWTQTELDALDRRVRTLLTANRMHHPRSSVMRLYIPRKCGGRGFLNAKTLHNREVCSLREYFLETDVGMHRDVVAVDKGLTPLSLASENWRKPIVMDTNERREVWKGKELHGRFYRALHGPDVDLLASVSWLRFGNLFGETEGFVFAIMDEVMMTNNYRKYIVKDGTVDICRACHRPGESIRHIISGCSHLANGDYLHRHNLVARIIHQQLALKYNLVESEVPYYRYVPDPVLENGSVTLYWDRSIITDRTIVASKPDIVVIDRLERRTMIVDIAVPHDENLVKAENDKQTKYLDLAREVVDMWEVGGAIIVPIVVTANGLIAKSLDQHLRRLSLGSWIKGLIQKAVLLDTARIVRRFLSQEP

SEQ ID NO: 13836 - protein, 1200 aa, Mythimna ferrago
MLTRAAARRARPPPLASSLSSASLPPEPSLTVSAVTPAAAAASSSSDEYYSPPTTPPPARRRGGRRPPACLGPRGPPVSDRVPAAGGSVPRMRWTQSTNENVMRAYYGATEGGNNLTAYRVRMLSLFQVLEPAVNVSAQRLSDQVRVIQRNHMLDDTVLDRLRTEMSNRVITPPSQPVVPVVVPQSSHISLHPDEVSTDTVTNVSTQCNNELRSALECAIREYRNMPLELRPRLPRLPMHNKNKALVAALDSQLSNYFDDCEDLTDTHSIMYCAAVAACRVAHVKFPNSDVATRPKPAVPAWQCRIERRIGGARALIGKLICFREGNTRPRVMRFVRRAFSGTDISPRDYMSRVTERIDFLKQKVYAWANRIRRYRRRVERYIQNSTFRSNERWVYRAWERPDQGVTDTRPPDDDAMCSFWRNIWSVPVSHTEGGRTREVERACESVTEMGAITISPQDVARAVRPLPNWKSPGPDGLHNFWIKWLQRSHARLASQYQAALESGSLPEFLTTGVTHLLHKSGSTAQPKNYRPITCLPTVYKVLTSILRAKINHHVDNNAIMSASQNGCRNGSRGTKELLLIDMAISQQVRRSRKDLSTCWIDYKKAYDSVPHTWLMRVLELYKVDATLRTFLMSCMRQWRTVLRYPGCRNIQRNSEPVRIERGIFQGDSLSPLWFCLALNPLSTLLENSGLGYRLTRGGQVISHLLYMDDLKLFAPNNLQLMELLKVTETFSSATRMEFGVDKCAVMHIKRGEIVESVGIQLSDSIHLRSLSPTETYKYLGMSEALGINATDMKQSLRKRFFGRLKKVLNSLLSGGNKVRAFNGWVMPVLMYAFGVLKWTQTELDALDRRVRTLLTAYRMHHPRSSVMRLYIPRKCGGRGFLNAKSLHNREVCSLREYFLAADGGMHRDVVAVDKGLTPLSLANENWRKPVVLDTNVRREVWQSKELHGRFFRALHGPDVDQLASVAWLRVGDLFGETEGFVCAIMDEVIMTNNYRRFIVKDGTVDICRACHRPGESIRHIISGCSRLANGEYLHRHNLVAWIIHQQLALKYSLVESEVPYYRYVPDPVLDSGDITLYWDRSIITDRTIVANKPDIVVVDRSERRAMIVDISVPHDENLAKAEKDKQIKYIDLAREVVDMWEVDSAIIVPIVVSANGLVAKSLDQHLRRLSLGDWIKGLIQKAVLLDTARIVRRFLSLEP

SEQ ID NO: 13837 - protein, 1199 aa, Acronicta aceris
MLTRARARYIERHTRLTTPDSSPSSALQQPQHGRTSPDAAATASSSSDEYYSPPTSPPPVRRRGGRRPPDRLGPRGPLASGGIPASGGSVQRMRWTQSLNKNVMRAYYGATEGGTNLTAYRGRMLSLFQALEPTIDVSTQRLSDQVRVIQRNHMLDDSVLDQLRSEVQSSRAIAHPSQSVAPSAMLPQTNLVEVGSDDRVTNVSTQYNEKLRSALEGAFREYRSSPPELRPRLPRLPMNNKNLALVCALDSLLSDYFDSSEDLADTHSILYCAAVAACRVAHVKFPESDRAARPKPMIPAWQSRIEQRIGEARALIGKLISFREGNTRPRVMRFVRQAFSGTNIDPRDYASCVTERIDFLKQKVYAWANRIRRYKRRAERYSLNRTFQGDQRWVYRTWDRPDNGVSDVCRPNDDAMSSFWRNIWSVPVNHTEDDWICDVERACESLPAMEEINISPQDVACAVHSVPNWKAPGPDGLHNFWIKWLRSSHARLASQFQSSLESGTLPQFLTTGITHLLHKSGDTADPKNYRPITCLPTVYKLLTSILRAKICYHIDESSIMSASQNGCRNGSRGTKELLLIDMTISQQVRRLRKNLSTCWIDYKKAYDSVPHTWLMRVLELYKVDVSLRTFLRSCMGQWRTVLHYPGCRQIQRISEPIRIERGIFQGDSLSPLWFCLALNPLSTLLEESRLGYRLRRGGQVISHLLYMDDLKLFASSDLHLMELLKITENFSNSIRMEFGVEKCAVMHVKRGGIVESVGIQLSDSTQLRSLASTETYKYLGMAEALGINVADMKQSLQVRFFGRLTKVLKSLLSGGNKVRAFNGWVMPVLMYSFGVLKWTQTELETLDRKVRTLLTAYRMHHPRSSVMRLYIPRKCGGRGFLNAKNLHNREVFSLREHFLKTEMGMHRDVVAVDNGLTPLSMAKENWRKPVVLSTNDRRNVWQGKELHGRYYRALHEPGVDTLASVSWLRFGDLFGETEGFVCAIMDEVMMTNNYRKFIVKDGTVDICRACHRPGESIRHIISGCSRLANGEYLHRHNLVARIIHQQLALKYNLVESEVPYYKYVPDPVLENGHATLYWDRSIITDRTIIANKPDIVVIDRLERRAMIVDITVPHDENLFKAEKEKEIKYLDLAHEVVDMWGVDAAIIVPIVVSANGLIAKSLDRHLRRLSLGGWIKGLIQKVVLLDTARIVRRFLSLGP

SEQ ID NO: 13838 - protein, 868 aa, Eilema sororculum
MRYVTRAFAGTDISPQDYTSRVTERIDFLKQKVYAWANRIRRYKRRVDRYTVNHMFQRDQRWVYRSWERTDESVDDVRRPDAEATNAFWRSIWSVPVSHTEGDWMREVERACETIPEMEEIYIDATDVDCAVHSLSNWKSPGPDGLHNFWLKWLRSSHVVLASQFQSAIESGLLPAFMTTGVTHLLHKTGSTLEPNNYRPITCLPTVYKLLTSILRAKINNHINNNSIMCASQNGCRNGARGTKELLLIDMAISQQARRNRKDLTACWIDYKKAFDSVPHTWLLRVLELYKVNTTLCTFLRSCMGQWRTVLFYPGCRQALGGGVPITIERGIFQGDSLSPLWFCLALNPLSTLLVNSGLGYRLRREGQMVSHLFYMDDLKLFAHTNPQLITLLKITETFSNSIKMAFGVDKCAVIHVKRGRVVESEGIQLSDSTNLRSLLVTETYKYLGMSQALCINEVDMKQMLQERFFGRLKKVLNSLLSGGNKVRACNSWVMPLLMYSFGILKWTQTELDTIDRKVRTQLTAFRMHHPRSSVMRLYIPRKCGGRGFLNAKTLHNREVYNLRDYFLKSNVDMHRDVVNVDTGLTPLGLAKENWRRPTIVSTDSRREVWQSKELHGRFYRALHRPEVDLLASVSWLRFSDLFGETEGFVCAIADEVIKTNNYRKYIMRDGTIDICRACHQPGESLRHIISGCSRLANGEYLHRHNQVARIIHQRLALKYNLVEVEVPYYKYVPEPVLQNSHITLYWDRSIITDRTVVANKPDIVVIDRSERRALIVDVTIPHDENLVKAEKDKQVKYLDLAHEVVDVWNVDSAIIVPIVVSVNGLIAKSLDQHLKRLGLDGWVKGQMQKAVLLDTARIVRKFLSLEP

SEQ ID NO: 13839 - protein, 1192 aa, Eilema sororculum
MLTRAQAKRHKNAPTTSPDSSLSSAAQPPAVEPAASSSSSSDEFFSPPTSPTPVRRPGRGRPPTCLGPRRPPASSGAPATGGDVHRMRWTTSINENVMRAYFAATEGGTNLSAYRTRMLPLFQALEPSINTSAQRLSDQVRVIQRNRMLNETVLETLRLECLRNICVTPAPAPAPASTAERNDDTRVAPDDTPIPVSIQYNEEIKEALECALREYRSMPVHVRPRLPRLPIHRRNIALVSALDSLLPRYLENSENLGDTHSILYCTAVAACRMAGAKFPIKDPAIRPKFTIPAWQCRIERRVAEARVLIGKLICFRSGNTRPRVMRYVTRAFAGTDISPQDYTSRVTERIDFLKQKVCAWANRIRRYKKRVDRYTVNRMFQRDQRWVYRSWERTDESVDDVRRPDAEATNAFWLSIWSVPVSHTEGDWMREVERACETIPEMEEIYIDATDVDCAVRSLSNWKSPGPDGLHNFWLKWLRSSHVVLASQFQSAIESGTLPAFMTTGVTHLLHKTGSTLEPNNYRPITCLPTVYKLLTSILRAKINNHINNNSIMCASQNGCRNGARGTKELLLIDMAISQQARRNRKDLTACWIDYKKAFDSVPHTWLLRVLELYKVNTTLCTFLRSCMRQWRTVLFYPGCRQALGGGVPITIERGIFQGDSLSPLWFCLALNPLSALLVNSGLGYRLRREGQVVSHLFYMDDLKLFAHTNPQLIALLKVTETFSNSIKMAFGVDKCAVIHVKRGRVVESEGIQLSDSTNLRSLLVTETYKYLGMSQALCINEVDMKQLLQERFFGRLKKVLNSLLSGGNKVRACNSWVMPLLMYSFGILKWTQTELDTIDRKVRTQLTAFRMHHPRSSVMRLYIPRKCGGRGFLNAKTLHNREVCNLRDYFLNSNVDMHRDVVNVDTGLTPLGLAKENWRRPTIVSTDSRREVWQSKELHGRFYRALHRPEVDLLASVAWLRFSDLFGETEGFVCAIADEVIKTNNYRKYIMRDGTIDICRACHQPGESLRHITSGCSRLANGEYLHRHNQVARIIHQRLALKYNLVEVEVPYYRYVPEPVQENSHITLYWDRSIITDRTVVANKPDIVVIDRSERRALIVDVTIPHDENLVKAETDKQVKYLDLAHEVVDMWNVNSAIIVPIVVSVNGLIAKSLDQHLKRLGLDGWVKGQMQKAVLLDTARIVRKFLSLES

SEQ ID NO: 13840 - protein, 1191 aa, Eilema sororculum
MLTRAQARNRNAQTTSPDSSLSSAAQPPAMEPAASSSSSSDEFFSPPTSPTPVRRPGRGRPPTCLGPRRPPASNRAPAAGGNVHRMRWTNSINENVMRAYFAATEGGTNLSAYRTRMLPLFQALEPSINTSAQRLSDQVRVIQRNRMLNETVLETLRQECLRNICVTPAPAPAPASTAEINNDTYVAPDDTPIPVSIQYNEEIKEALECALREYRSVPVHVRPRLPRLPIHRRNIALVSALDSLLPRYLENSENLGDTHSILYCAAVAACRMAGAKFPIKDPAIRPKSAIPAWQCRIERRVAEARVLIGKLICFRSGNTRPRVMRYVTRAFAGTDISPQDYTSRVTERIDFLKQKVYAWANRIRRYKRRVDRYTVNHMFQRDQRWVYRSWERTDESVDDVRRPDAEATNAFWRSIWSVPVSHTEGDWMCEVERACETIPEMEEIYIDATDVDCAVRSLSNWKSPGPDGLHNFWLKWLRSSHVVLASQFQSAIESGTLPAFMTTGVTHLLHKTGSTLEPNNYRPITCLPTVYKLLTSILRAKINNHINNNSIMCASQNGCRNGARGTKELLLIDMAISQQARRNRKDLTACWIDYKKAFDSVPHTWLLRVLELYKVNTTLCTFLRSCMGQWRTVLFYPGCRQALGGGVPITIERGIFQGDSLSPLWFCLALNPLSTLLVNSGLGYRLRREGQMVSHLFYMDDLKLFAHTNPQLIALLKVTETFSNSIKMAFGVDKCSVIHVKRGRVVESEGIQLSDSTNLRSLLVTETYKYLGMSQALCINEVDMKQMLQERFFGRLKKVLNSLLSGGNKVRACNSWVMPLLMYSFGILRWTQTELDTIDRKVRTQLTAYRMHHPRSSVMRLYIPRKCGGRGFLNAKTLHNREVCNLRDYFLKSNVDMHRDVVNVDTGLTPLGLAKENWRRPTIVSTDSRREVWQSKELHGRFYRALHRPEVDLLASVSWLRFSDLFGETEGFVCAIADEVIKTNNYRKYIMRDGTIDICRACHQPGESLRHITSGCSRLANGEYLHRHNQVARIIHQRLALKYNLVEVEVPYYKYVPEPVLQNSHITLYWDRSIITDRTVVANKPDIVVIDRSERRALIVDVTIPHDENLVKAEKDKQVKYLDLAHEVVDMWNVDSAIIVPIVVSVNGLIAKSLDQHLKRLGLDGWVKGQMQKAVLLDTARIVRKFLSLEP

SEQ ID NO: 13841 - protein, 1193 aa, Eilema depressum
MLTRAQARRNASAPATPPDSSLSSAAQPPPTEPAASSSSSSDEFFSPPTSPTPVRRPGRGRPPICLGPRRPPASNRAPAAGGDVHRMRWTPSINENVMRAYFAATEGGTNLSAYRTRMLPLFQALEPSVNTSSQRLSDQVRVIQRNRMLNETVLETLRQECLRNICVTPAPAPASTPAPVPVSHMNEETGDDTLIPVSIQYNEQIKEALECALREYRSMPLNDRPRLPRLPIHRRNMTLVGALDSLLPGYLDNSENLGDTHSILYCTAVAACRMAGVKFPNKDPAIRPKSTIPAWQCRIERRVAEARVLISKLICFRSGNTRPRVMRYVTRAFAGTGISPQEYTSRITERIDFLKQKVCAWANRIRRYRKRVDRFTVNRMFRRDQRWVYRSWEQPDESVDYVRRPEAAATNTFWRSIWSVPVSHIEGDWMCEVERACESIPKMEDIYIDAIDVDCAVRPLSNWKSPGPDGLHNFWLKWLRSSHALLASQFQSAVESGTLPAFMTTGVTHLLHKTGSTLEPNNYRPITCLPTVYKLLTSILRVKINNHINNNSIMCASQNGCRNGARGTKELLLIDMAISQQARRRTKDLAACWIDYKKAFDSVPHTWLLRVLELYKVNATLCTFLRSCMRQWRTVLFYPGCCQALGDGEPITIERGIFQGDSLSPLWFCLALNPLSTLLVNSGLGYRLRREGQMVSHLLYMDDLKLFAHTNPQLMALLKITENFSNSIKMGFGVEKCAVIHVKRGRVVESQGIQLSDSTSLRSLLVTETYKYLGMSQALCINEAGMKQMLQERFFGRLKKVLNSLLLGGNKVRACNSWVMPLLMYSFGILKWTQTELDTIDRRVRTQLTAFRMHHPRSSVMRLYIPRKCGGRGFLNAKTLHNREVCNLRDYFLKSNVDMHRDVVSVDTGLTPLGLAKENWRRPIVVGTDSRREVWQSKKLHGRFYRALHRPEVDLLASVSWLRFGDLFGETEGFVCAIADEVIKTNNYRKYIMRDGTIDICRACHQPGESLRHITSGCSRLANGEYLHRHNQVARIIHQRLALKYNLVELEVPYYRYVPEPVLENSHITLYWDRSIITDRTVVANKPDIVVIDRSERRALIVDVTIPHDENLVKAEKDKQVKYLDLAHEIVDMWNVDSAIIVPIVVTVNGLIAKSLDQHLKRLGLDGWVKGQMQKAVLLDTARIVRKFLSLEP

SEQ ID NO: 13842 - protein, 1212 aa, Ptilodon capucinus
MTDAPRRNPRRQCRQRSAVRHYAQSTPPDQSPRSASPSPASIIRTSVTAVASSESDEYFSPPTSPPPVRRQRGRPPGHLGFLGQPAPNRVLVPSGVVRRMRWTSSMNENVMRAYYEATEGGTNLTAYRDRMLPLFQSLEPAVNVSAQRLSDQVRVIQRGNMLADTVLDRLRSEVQSRRVVPVASSQPAAQPVARATVTSRLAADSDVDRDNAPIDVSTQYNNLLRSTLEDVVREYRSMPNHLRPRIPRLPMHKGNRALVGALDSLLSIYFDSSDDLVDTHSILYCAAITVCRVARVKVFNTDTTTRPKPAVPAWQCRIERRISEARALIGKLSCFREGNTRPRVMRFVKRAFAGTDVSPREYFSRVTERIDFLKQKIYAWANRIRRYKARVDRYSQSSMFQRDQRWVYRSWERPNEPVSELQRPDDNAMTTFWRDIWSVPVTHYEGNWIGDVERMCEPIKEMEAISIGPLDVANAVRSLPNWKAPGPDGLHNFWLKWLRSSHVRLASQFQSALQSGSLPEFITTGVTHLLHKTGSTTDPKNYRPITCLPTIYKTLTSILRAKIARHVENNSIMSASQNGCRSGSRGTKELLLIDMTICQQARRNRKDLSTCWIDYKKAYDSVPHTWLVRVLELYKIDTTLRTFLESCMRQWKTVLLCPGSRQILGNGEPIRIERGIFQGDSLSPLWFCLALNPLSTLLEESGFGFRLRRGGQVISHLLYMDDLKLFAPTALQLSGLLKVTEAFSNSIRMEFGVDKCAVMHAKQGRMVESEGIQLSDSIQLRSLAATETYKYLGMSQGLGISETDMKQLLRDRFLGRLKKVLKSLLSGGNKVRAYNGWVMPVLMYSFGILKWTQTELDALDRTVRTTLTAYRMHHPRSSVMRLYIPRKCGGRGFLNVKTLHNREICSLREYFLRADGEMHVDVVAVDNGLTPLSLAKENWRKPVVLTTDDRRVVWQGKELHGRYYRALHGPDVDLAASVAWLRFGDLFGETEGFVCAIMDEVVMTNNYRRYILRDGTIDICRACHRPGESLRHIISGCSRLANGQYLHRHNQVARIVHQQLALKYRLVTSEVPYYRYEPQPVLEEGHITLYWDRSIITDRTIVANKPDIVLIDRQERRAMIIDITVPHDENLVKAEKDKESKYLDLAHEVVDMWDIDAAIIVPIVVSAHGLLAKSLDKHLKRLALGSWIKGQIQKAVLLETARIVRKFLSLEP

SEQ ID NO: 13843 - protein, 868 aa, Ptilodon capucinus
MRFVKRAFAGTDVSPREYISRVTERIDFLKQKIYAWANRIRRYKVRVDRYSQNSMFQRDQRWVYRSWERPNEPVSELQRPDDNATTTFWRDIWSVPVTHYEGDWIGDVERMCEPIKEMEAISIGPLDVVNAVRSLPNWKAPGPDGLHNFWLKWLRSSHVRLASQFQSALQSGSLPEFITTGVTHLLHKTGSTTDPKNYRPITCLPTIYKTLTSILRAKIARHVEDNSIMSASQNGCRSGSRGTKELLLIDMTICQQARRNRKDLSTCWIDYKKAYDSVPHTWLVRVLELYKIDTTLRTFLESCMRQWKTVLLCPGSRQILGNGEPIRIERGIFQGDSLSPLWFCLALNPLSTLLEESGFGFRLRRGGQVISHLPYMDDLKLFAPTALQLAGLLKVTETFSNSIRMEFGVDKCAVMHAKQGRLVESEGIRLSDSIQLRTLAATETYKYLGMSQGLGISETDMKQLLRDRFLGRLKKVLKSLLSGGNKVRAYNGWVMPVLMYSFGILKWTQTELDTLDRTVRTTLTSYRMHHPHSSVMRLYIPRKRGGRGFLNVKTLHNREICSLREYFLRADGEMHVDVVAVDNGLTPLSLAKENWRKPVVLTTDDRRLVWQGKQLHGRYYRALHGPDVDLAASVAWLRFGDLFGETEGFVCAIMDEVVMTNNYRKYILRDGTIDICRACHRPGESLRHIISGCSRLANGQYLHRHNQVARIIHQQLALKYRLVTSEVPYYRYEPQPVLEEGHISLYWDRSIITDRTIVANKPDIVLIDRQERRAIIVDITVPHDENLVKAEKDKESKYLDLAHEVVDMWDIDAAIIVPIVVSAHGLLAKSLDKHLKRLALGGWIKGQIQKAVLLETARIVRKFLSLEP

SEQ ID NO: 13844 - protein, 868 aa, Agrochola circellaris
MRFVKRAFSGTDTSSRDYLTRVTERIDFLKQKICAWANRIRRYRRRVERYTQNRTFQSDERWVYRAWERLDQGVIDTRLPDDDAMCSFWRSIWSAPVNHTEGDWTGKIERACERIPEMGAITISPQDVACAVRPLPNWKSPGPDGLHNFWIKWLQRSHARLASQFQSALESGSLPQFLTTGITHLLHKSGSTAEPKNYRPITCLPTVYKVFTSILRTKINKHIDTNSIMSASQNGCKNGSRGTKELLLIDMAINQQVRRSRRDLSTCWIDYKKAYDSVPHTWLMRVLELYKVDATLRTFLISCMGQWRTVLRYPGCRQIQRNSEPIRIERGIFQGDSLSPLWFCLALNPLSTLLEDSGLGYRLRRGGQVISHLLYMDDLKLFAPNNLQLVELLKVTETFSSAIRMEFGVDKCAVMHVKRGGIVESGGTQLPDSIHLRSLSSIETYKYLGMSEALGINTADMKQSLKERFFDRLNKVLNSLLSGGNKVRAFNGWVMPVLMYSFGILKWTQTELDALDRRVRTLLTVNRMHHPRSSVMRLYIPRKCGGRGFLNAKTLHNREVCSLREYFLEADVGMHRDVVSVDKGLTPLSLANENWRKPIVLDTNDRREVWQSKELHGRFYRALHGPDVDLLASVAWLRFGDLFGETEGFVFAIMDEVMMTNNYRKYIVKDGTVDICRACHRPGESIRHIISGCSRLANGDYLHRHNLVARIIHQHLALKYNLVESEVPYYKYVPDPVLENGNITLYWDRSIITDRTIVANKPDIVVIDRLERRTMIIDIAVPHDENLVKAEKDKQIKYLDLAREVVDMWDVDTAVIVPIVVTANGVIAKSLDQHLRRLSLGSWIKGLIQKAVLLDTARIVRRFLSQEP

SEQ ID NO: 13845 - protein, 1198 aa, Agrochola circellaris
MLTRSATRRARLLPPDSSLSSASPPPVPSPTVSAGTTPAAAVASSSSDEYFSPPTTPPPARRRGGHRPPVGLGPRGPPASDRVPAPGGSVQRMRWTQSINENVMRSYYGATEGGNNLTAYRVRMLSLFQVLEPAVNVSAQRLSDQVRVILRNHMLDDTVLDRLRSEMRNSHATAPPSQTVMVAPQFTINQVDEGIDDMATNVSTQYNEELRSALERAIREYRSMSPELRPRLPRLPMHNKNRALVAALDSQLSNYFDDCEDLTDTHSILYCAAVAACRVAHVKFANDSRATRPKTAVPAWQCRIERRIDGARALIGKLICFREGNTRPRVMRFVRRAFSGTDISPEDYVSRATERIDFLKQKVYAWANRIRRYRRRVERYTQNRTFQSDERRVYRAWEQPDQGVADARLPDDDAMCSFWRSIWSAPVSHTEGDWTREVERACDPIPEMGAITICPQDVARAVRPLPNWKSPGPDGLHNFWIKWFKRSHARLAAQYQTALESGSLPEFLTTGVTHLLHKSGSTADPKNYRPITCLPTVYKVLTSILRAKINKHIDTNSIMSASQNGCRNGSRGTKELLLIDMTISQQVRRSRKDLSTCWIDYKKAYDSVPHTWLMRVLELYKVDATLRTFLLSCMGQWRTVLRYPGCRNIQRNSEPIRIERGIFQGDSLSPLWFCLALNPLSTLLEGSDLGYRLRRGGQVISHLLYMDDLKLFAPNNFQLMELLKVTETFSRAIRMEFGVDKCAVMHVKRGEIVESVGTQLTDSINFRALSASETYKYLGMSETLGINVTDMKQSLKERFFDRLKKVFNSFLSGGNKVRAFNGWVMPVLMYSFGVLKWTQTELDALDRRVRTLLTGYRMHHPRSSVMRLYIPRKCGGRGFLNAKTLHNREICSLREYFLEADVGMHRDVVAVDKGLTPLSLAKENWRKPAVLDTNDRKEVWQNKELHGRYFRALHGPDVDLLASVAWLRFGDLFGETEGFVCAIMDEVMMTNNYRRFIVKDGTVDICRACHRPGESIRHIISGCSRLANEEYLHRHNLVARIIHQQLALKYSLVESEVPYYRYVPDPVLESGHITLYWDRSIITDRSIVANKPDIVVVDRAERRTMIIDITVPHDGNLVKAEKDKQIKYLDLAREVVDMWDVDSAIIVPIVVSANGLIAKSLDQHLRRLSLGGWIKGLIQKAVLLDTARIVRRFLSLEP

SEQ ID NO: 13846 - protein, 1198 aa, Agrochola circellaris
MLTRSATRRARLLPPDSSLSSASPPPVPSPTVSAGTTPAAAVASSSSDEYFSPPTTPPPARRRGGHRPPVGLGPRGPPASDRVPASGGSVQRMRWTQSINENVMRSYYGATEGGNNLTAYRVRMLSLFQVLEPAVNVSAQRLSDQVRVILRNHMLDDTVLDRLRCEMRNSHATAPPSQTVMVAPQFTINQFDEGIDDMATNVSTQYNEELRSALERAIREYRSMSPELRPRLPRLPMHNKNRALVAALDSQLSNYFDDCEDLTDTHSILYCAAVAACRVAHVKFANDSRATRPKPAVPAWQCRIERRIGGARALIGKLICFREGNTRPRVMRFVRRAFSGTDISPEDYVSRATERIDFLKQKVYAWANRIRRYKRRVERFTQNRTFQSDERRVYRAWEQPDQGVADARLPDDDAMCSFWRSIWSAPVSHTEGDWTREVERACDPIPEMGAITICPQDVARAVRPLPNWKSPGPDGLHNFWIKWFKKSHARLAAQYQTALESGSLPEFLTTGVTHLLHKSGSTADPKNYRPITCLPTVYKVLTSILRAKINKHIDTNSIMSASQNGCRNGSRGTKELLLIDMTISQQVRRSRKDLSTCWIDYKKAYDSVPHTWLMRVLELYKVDATLRTFLLSCMGQWRTVLRYPGCRNIQRNSEPIRIERGIFQGDSLSPLWFCLALNPLSTLLEGSDLGYRLRRGGQVISHLLYMDDLKLFAPNNFQLMELLKVTETFSRAIRMEFGVDKCAVMHVKRGEIVESVGTQLTDSINFRALSASETYKYLGMSETLGINVTDMKQSLKERFFGRLKKVFNSFLSGGNKVRAFNGWVMPVLMYSFGVLKWTQTELDALDRRVRTLLTGYRMHHPRSSVMRLYIPRKCGGRGFLNAKTLHNREICSLREYFLEADVGMHRDVVAVDKGLTPLSLAKENWRKPAVLDTNDRKEVWQNKELHGRYFRALHGPDVDLLASVAWLRFGDLFGETEGFVCAIMDEVMMTNNYRRFIVKDGTVDICRACHRPGESIRHIISGCSRLANEEYLHRHNLVARIIHQQLALKYSLVESEVPYYRYVPDPVLESGHITLYWDRSIITDRSIVANKPDIVVVDRAERRTMIIDITVPHDGNLVKAEKDKQIKYLDLAREVVDMWDVDSAIIVPIVVSANGLIAKSLDQHLRRLSLGGWIKGLIQKAVLLDTARIVRRFLSLEP

SEQ ID NO: 13847 - protein, 1106 aa, Hydraecia micacea
MRWTRSINENVMRSYYGATEGGSNLTAYRVRMLSLFQVLEPAVNVSAQRLSDQVRVIQRNHMLDDTVLDRLRNEIQSSHAIAPQSQTAVILPQSNTSHADEGSNDRATNVSTQCNEELSSALEDAIQEYRFMSPELRPRLPRLPMHNKNRALVAVLNSQLSKYFDDCEDLTDTHSILYCAAVAACRVAHVKFTNDSRATRPKPAVPAWQCRIERRIGGARALIGKLICFREGNTRPRVMRFVRRAFLGTDISPQDYTSCVTERIDFLKQKVYAWANRIRRYKRRVERYTQNRTFQSDERWVYRDWERPDQSVADTCLPDDDAMCSFWRSIWSVPVSHTEGDWARDVERACDPIPEMEAITICSQDVARAVRPLPNWKSPGPDGLHNFWIKWFSRSHARLASQFQTALESGSLPQFLTTGITHLLHKSGSTAEPKNYRPITCLPTVYKVLTSILRAKINKHIDTNFIMSASQNGCRNGSRGTKELLLIDMTISQQVRRFRKDLSTCWIDYKKAYDSVPHTWLMRVLELYKVDTTLRTFLMSCMGQWRTVLRYPGCRNIQRNSEPIRIERGIFQGDSLSPLWFCLALNPLSTLLEDSGLGYRLRRGGQVISHLLYMDDLKLFAPNNLQLMELLKVTQTFSNAIRMEFGVDKCAVMHVKRGEIVESVGNQLSDSTNLRALSASETYKYLGMSEALGINVTDMKQSLKERFFGRLKKVLNSLLSGGNKVRAFNGWVMPVLMYSFGILKWTQTELDALDRRVRTLLTANRMHHPRSSVMRLYIPRKCGGRGFLNSKTLHNREICSLREYFLETDVGMHRDVVMVDKGLTPLSLAKENWRKPVVLDTNDRMEVWQSKELHGRFFRALHGPDVDLLASVAWLRFGDLFGETEGFVCAIMDEVMMTNNYRRFIVKDGTVDICRACHRPGESIRHIISGCSRLANGEYLHRHNLVARIIHQQLALKYSLVESEVPYYRYVPDPVLENGNITLYWDRSIITDRTIVANKPDIVVVDRSERRAMIVDITVPHDENLVKAEKDKQIKYLDLAREVVDMWDVDSAIIVPIVVTANGLIAKSLDQHLRRLSLASWIKGLIQKAVLLDTARIVRRFLSLEP

SEQ ID NO: 13848 - protein, 1201 aa, Hydraecia micacea
MLTRSATARRARIPPPDSSLSSASPPAPLVSSPTVSDVTAPAAAVASSSSDEYFSPPTTPPPARRRGGRRPPDGLGPRGPPASDRVPAPGGSVQRMRWTRSINENVMRSYYGATEGGSNLTAYRVRMLSLFQVLEPAVNVSAQRLSDQVRVIQRNHMLDDTVLDRLRNEIQSSHAIAPQSQTAVILPQSNTSHADEGSNDRATNVSTQCNEELRSALEDAIQEYRSMSPELRPRLPRLPMHNKNRALVAVLNSQLSKYFDDCEDLTDTHSILYCAAVAACRVAHVKFTNDSRATRPKPAVPAWQCRIERRIGGARALIGKLICFREGNTRPRVMRFVRRAFLGTDISPQAYTSCVTERIDFLKQKVYAWANRIRRYKRRVERYAQNRTFQSDERWVYRDWERPDQSVADTCLPDDDAICSFWRSIWSVPVSHTEGDWARDVERACDPIPEMEAITICPQDVARAVRPLPNWKSPGPDGLHNFWIKWFSRSHARLASQFQTALESGSLPQFLTTGITHLLHKSGSTAEPKNYRPITCLPTVYKVLTSILRAKINKHIDTNFIMSASQNGCRNGSRGTKELLLIDMTISQQVRRFRKDLSTCWIDYKKAYDSVPHTWLMRVLELYKVDTTLRTFLMSCMGQWRTVLRYPGYRNIQRNSEPIRIERGIFQGDSLSPLWFCLALNPLSTLLEDSGLGYRLRRGGQVISHLLYMDDLKLFAPNNLQLMELLKVTQTFSNAIRMEFGVDKCAVMHVKRGEIVESVGNQLSDSTNLRALSASETYKYLGMSEALGINVTDMKQSLKERFFGRLKKVLNSLLSGGNKVRAFNGWVMPVLMYSFGILKWTQTELDALDRRVRTLLTANRMHHPRSSVMRLYIPRKCGGRGFLNSKTLHNREICSLREYFLETDVGMHRDVVMVDKGLTPLSLAKENWRKPVVLDTNDRMEVWQSKELHGRFFRALHGPDVDLLASVAWLRFGDLFGETEGFVCAIMDEVMMTNNYRRFIVKDGTVDICRACHRPGESIRHIISGCSRLANGEYLHRHNLVARIIHQQLALKYSLVESEVPYYRYVPDPVLENGNITLYWDRCIITDRTIIANKPDIVMVDRSERRAMIVDITVPHDENLVKAEKDKQIKYLDLAREVVDMWDVDSAIIVPIVVTANGLIAKSLDQHLRRLSLGSWIKGLIQKAVLLDTARIVRRFLSLEP

SEQ ID NO: 13849 - protein, 1204 aa, Hydraecia micacea
MLTRSRARRLPNITHPTSSGSSLSSASQLPEPAPDVSPVSPAAAVASSSSDEYFSPPTTPPPVCRRGRGRPPASLGLRGPPASERVPAPGGSVQRMRWTQTVNENVMRAYFGATEGGSNLTAYRGRMLSLFQVLEPAVNVSAQRLSDQVRVIQRNHMLDNVVLDRLRLESRNSHVTPASSLVAVQLQPSVPLRPDCVDVEDDDEAISVSSQCNARLRSALEDAFREYRSIPPGLRPRLPRLPMHKKNKALVCALDSQLSNCFNDSKDLADTHSILYCAAVAACRVAHVKFPNSDRAPRPKPAVPAWQCRIECRIGEARALIGKLICFREGNTRPRVMRFVRRAFSGTDISSRDYLSRVTERIDFLKQKICAWANRIRRYRRRVERYTQNRRFQSDERWVYRAWEQPDQGVTDTRLPDDDAMCSFWRNIWSVPVSHTEGDWTGKIERACDLIPEMEALIISPQDVARAVRPLPNWKSPGPDGLHNFWIKWFKRSHVRLASQFQSALESGSLPQFLTTGITHLLYKSGSTADPKNYRPITCLPTVYKVLTSILRAKINKHIDTNSIMSVSQNGCKNGSRGTKELLLIDMTINQQVRRSRKDLSTCWIDYKKAYDSVPHTWLMRVLELYKVDTTLCTFLMSCMGQWRTVLRYPGCRNIQRNSEPIRIERGIFQGDSLSPLWFCLALNPLSTLLEDSGLGYRLRRGGQVISHLLYMDDLKLFAPNNLQLMELLKITETFSSAIRMGFGVDKCAVMHVKRGEIVESVGNQLSDSTKLRALSASDTYKYLGMSEALGINVTDMKQSLKERFFGRLKKVFNSLLSGGNKVRAFNDWVMPVLMYSFGILKWTQTELDALDRKVRTLLTANRMHHPRSSVMRLYIPRKCGGRGFLNAKTLHNREICSLREYFLETDVGMHRDVVVVDNGLTPLSLGKENWRKPVVLDTNDRMEVWQSKELHGRFFRALHGPDVDLLASVAWLRFGDLFGETEGFVCAIMDEVMMTNNYRRFIVKDGTVDICRACHRPGESIRHIISGCSRLANGEYLHRHNLVARIIHQQLALKYSLVESEVPYYRYVPDPVLENGNITLYWDRSIITDRTIVANKPDIVVMDRLERRAMIVDITVPHDENLVKAEKDKQIKYLDLAREVVDMWDVDSAIIVPIVVTANGLIAKSLDQHLRRLSLASWIKGLIQKAVLLDTARIVRRFLSLEP

SEQ ID NO: 13850 - protein, 1204 aa, Hydraecia micacea
MLTRSRARRLPNITHPTSSGSSLSSASQLPEPAPDVSPVSPAAAVASSSSDEYFSPPTTPPPVCRRGRGRPPASLGLRGPPASERVPAPGGSVQRMRWTQTVNENVMRAYFGATEGGSNLTAYRGRMLSLFQVLEPAVNVSAQRLSDQVRVIQRNHMLDNVVLDRLRLESRNSHVTPASSLVAVQLQPSVPLRPDCVDVEDDDEAISVSSQCNARLRSALEDAFREYRSIPPGLRPRLPRLPMHKKNKALVCALDSQLSNCFNDSKDLADTHSILYCAAVAACRVAHVKFPNSDRAPRPKPAVPAWQCRIECRIGEARALIGKLICFREGNTRPRVMRFVRRAFSGTDISSRDYLSRVTERIDFLKQKICAWANRIRRYRRRVERYTQNRRFQSDERWVYRAWERPDQGVTDTRLPDDDAMCSFWRNIWSVPVSHTEGDWTGKIERACDLIPEMEALIISPQDVARAVRPLPNWKSPGPDGLHNFWIKWFKRSHVRLASQFQSALESGSLPQFLTTGITHLLYKSGSTADPKNYRPITCLPTVYKVLTSILRAKINKHIDTNSIMSVSQNGCKNGSRGTKELLLIDMTINQQVRRSRKDLSTCWIDYKKAYDSVPHTWLMRVLELYKVDTTLCTFLMSCMGQWRTVLRYPGCRNIQRNSEPIRIERGIFQGDSLSPLWFCLALNPLSTLLEDSGLGYRLRRGGQVISHLLYMDDLKLFAPNNLQLMELLKITETFSSAIRMEFGVDKCAVMHDKRGEIVESVGNQLSDSTNLRALSASDTYKYLGMSEALGINVTDMKQSLKERFFGRLKKVFNSLLSGGNKVRAFNDWVMPVLMYSFGILKWTQTELDALDRKVRTLLTANRMHHPRSSVMRLYIPRKCGGRGFLNAKTLHNREICSLREYFLETDVGMHRDVVVVDNGLTPLSLGKENWRKPVVLDTNDRMEVWQSKELHGRFFRALHGPDVDLLASVAWLRFGDLFGETEGFVCAIMDEVMMTNNYRRFIVKDGTVDICRACHRPGESIRHIISGCSRLANGEYLHRHNLVARIIHQQLALKYSLVESEVPYYRYVPDPVLENGNITLYWDRSIITDRTIVANKPDIVVMDRLERRAMIVDITVPHDENLVKAEKDKQIKYLDLAREVVDMWDVDSAIIVPIVVTANGLIAKSLDQHLRRLSLASWIKGLIQKAVLLDTARIVRRFLSLEP

SEQ ID NO: 13851 - protein, 1200 aa, Amphipyra tragopoginis
MLTRSKARARDAHPPPPDSSPSSASQQQGLDPASPAAAVASSSSDEYYSPPSSPPPARRRGGTRPPGGLGLRGPLASDRVPAPGGIVPRMKWTQKINESVMRAYYGATEGGTNLTAYRGRMLSLFRVLEPAVNVSAQRLSDQVRVIQRGHMLDDTVLDRIRSEVQSSPVISPSPQVLEQSQNLAATLPRLNPADEEDDDRATNVSTQCNEELRSALEDAMREYRYTRSDLRPRIPRLPMHRKNRALVCALDSLLSNYFDGSEDLGDTHSILYCAAVAACRVAHVKFIDNERVTRPKNAVPAWQCRIERRIAEARALIGKLVCFREGNTRPRVMRFVRRAFSGTDVSPREYMSRVTERIDFLKQKVYAWASRIRRYRRRVDRYTQNRLFQSDERWVYRTWERPDQRVSDTHLPDNDVISAFWRNIWSVPVTHTEGDWMQEVQRACEPIQEMGDIIISPQDVASAVRPMSNWKSPGPDGLHNFWLKWLRSSHACLASQFQSSLESESLPQFLTTGVTHLLHKSGSTAEPKNYRPITCLPTVYKLLTSILRSKINFHIENNCIMSPSQNGCRNGSRGTKELLLIDMAISQQVRRSRKDLSTCWIDYKKAYDSVPHTWLMRVLELYKVNTTLCAFLTSCMRQWRTVLRYPGCRQIQGIGEPIRIERGIFQGDSLSPLWFCLALNPLSTLLEGSGLGYRLRRGGQVISHLLYMDDLKLFAPNKLQLLELLKVTETFSNSIRMEFGVDKCAVMHVKRGGIMESAGTQLTDSIHLRSLSSTETYKYLGMSEALGINGTDMKQSLRERFCGRLKKVLNSLLSGGNKVRAFNGWVMPVLMYSFGILKWTQTELDALDRRVRSLLTANRMHHPRSSVMRLYIPRKCGGRGFLNAKTLHNREVCSLREYFSQADVGMHRDVVAVDKGFTPLSLAKENWREPVVLDTNDRREVWRSKELHGRFYRALHGPDVDFLASVAWLRFGDLFGETEGFVCAIMDEVMMTNNYRKYIVKDGTVDICRAYHCPGESIRHIVSGCSRLANGEYLHRHNLVARIIHQQLALKYNLVDAEVPYYKYVPDPVLENGHITLYWDRSIITDRTIVANKPDIVVIDRSERLTMIVDITVPHDENLVKAEKDKEIKYQDLAHEVVAMWDVDSAIVVPIVVTANGLIAKSLDQHLKRLSLGSWIKGLVQKAVLLDTARIVRKFLSLRP

SEQ ID NO: 13852 - protein, 1203 aa, Amphipyra tragopoginis
MLTRARARQKDARPRSPDSSLCSASQPPESSPPVSAVTPAAAVASSSSDEYFSPPSSPPPVRRRGGARPPACLGPRSQPASNRVPAAGGNVSRMRWTQSINENVMRAYYGATDGGINLTAYRDRMLSLFQVLEPAINVSTQRLSDQVRVIQRNRRLDDTVLERLRSETRNNRTVTSPAQSAVQPQLPAVPPRPSHADGDGDGEVIEVSNQCSDELRSALEGAILEYRTTPPELRPRLPRLPMHKKNRALVCALDSLLSNYFDGSEDLADTHSILYCAAIAACRVAHVKFTESDRATRPKPVVPAWQCRIERRIGGARALIGKLICFREGNTRPRVMRFVRRAFSGTDISPRDYMSRITERIDFLKQKVYAWANRIRRYKRRVERYTRNRTFQSDQRRVFRTWERPDPSGSDVRLPDDEAMGSFWRSIWSVPIAHTEGGWMRDIERACEPIPEMGAIIISPQDVAGAARPLPNWKSPGPDGLHNFWLKWLRSSHACLASQFQSSLESGSLPQFLTTGATHLLYKSGSTAEPKNYRPITCLPTVYKLLTSILRVKISNHIDNNSILSPSQNGCRSGSRGTKELLLIDMTISQQVRRSRKDLSTCSIDYKKAYDSVPHTWLMRVLELYKINTTLRTFLMSCMRQWRTVLRYPGCREIRGRGEPIRIERGIFQGDSLSPLWFCLALNPLSTLLEGTRLGYRLRREGQVISHLLYMDDLKLFAPTDLRLMELLKVTENFSSSIRMEFGVDKCAVMHVKRGGIVESEGIQISNSIQLRSLSPTETYKYLGMSEALGISEADMRQSLRERFFGRLNKVLRSLLSGGNKVRAFNGWVMPVLMYSFGILKWTQTDLEALDRRVRALLTVHRMHHPRSSVMRLYIPRKCGGRGFLNAKTLHNREVCSLREYFLQAEGEMHRDVVAVDKGLTPLALAKENWRKPAVLSTNDREEVWQSKELHGRFYRALHGPDVDFPASVSWLRFGDLFGETEGFVCAIMDEVMMTNNYRKYIVKDGTVDICRACHRPGESIRHIISGCSRLANGEYLHRHNLVARIIHQQLALKYNLVESEVPYYRYVPDPVLENGHATLYWDRSIITDRTIVANKPDIVVIDRSERRTMIVDITVPHDENLVKAEKDKQIKYLDLAHEVVGMWDVDSAVVVPIVVTANGLIAKSLDQHLKRLSLGGWIKGLLQKAVLLDTARIVRRFLSLEP

SEQ ID NO: 13853 - protein, 1201 aa, Amphipyra tragopoginis
MLTRARTREARPPPPDSPLSSASQPPESSPTVSAVTPAAAVASSSSDEYFSPPTSPTPVRRQGRRRPPNSLGPRGPPAPSRVLATGGCVQRMKWTQSINENVMRAYYGSTEGGTNLAAYRVRMLTLFQELEPAINVSAQRLSDQVRVIQRNHRLDDAALDRLHLEVQNSRVTPVPSQTAVHHININVVPPRSDCVDGDVDDRAVTVSSQYNDRLRSALEDAIREYRANPELRPRLPRLPMHNKNRALVCALDSLLSSYFESSEDLVDTHSILYCTAVAACRVANVKFNNSERATRPKPAIPAWQCRIERRIDGARALIGKLICFREGNTRPRVMRFVRRAFSGTGISPREYMSQVTERIDFLKQKVCAWASRIRRYKRRVERYAQNHMFQCDQRWVYRAWERPDQGVSDGRLPDDDAMSSFWRSIWSVPVTHTEGDWTRDIERACEPIGEMGEILISPQDVASAARPLPNWKSPGPDGLHNFWIKWLRSSHARLASQFQSSLESGSLPQFLTTGVTHLLHKSGSTAEPKNYRPITCLPTVYKLLTSILRTKINTHVENNSIMSPSQNGCRNGSRGTKELLLIDMAISQQVRRSRKNLSTCWIDYKKAYDSVPHTWLMRVLELYKINTTLRTFLTSCMRQWRTVLRYPGCRPILGSGEPISIERGIFQGDSLSPLWFCLALNPLSTLLEGSGLGYPLRRGGQVVSHLLYMDDLKLFAPTKLQLVELLKVTETFSNSIRMEFGVDKCAVMHVRRGGIMESEGLQLSDSIHLRSLSANNTYKYLGMSEGLGISEADMKQSLRERFFGRLKKVLKSLLSGGNKVRAFNGWVMPVLMYSFGILKWTQTELDALDRRVRTLLTANRMHHPRSSVMRLYIPRKCGGRGLLNAKTLHNREVCSLREYFLHADAGMHRDVVAVDKGLTPLNLAKENWRKPVVLSTNDRREVWQSKELHGRFYRALHGPDVDFLASVSWLRFGDLFGETEGFVCAIMDEVIMTNNYRKYIVKDGTVDICRACHCPGESLRHIISGCSRLANGEYLHRHNQVARIIHQQLALKYNLVESEVPYYKYVPDPVLENGHITLYWDRSIITDRTIVANKPDIVVIDRSERRTMIVDVTIPHDENLVKAEKDKQIKYLDLAHEVVNMWDVDSATIVPIVVTANGLMAKSLDQHLKRLSLGGWIKGLIQKAVLLDTARIVRRFLSLEP

SEQ ID NO: 13854 - protein, 1205 aa, Amphipyra tragopoginis
MLTRSRAKTQQSTHLPPSASSLSSASQPPEPASIVSDVTPAAAVASSSSDEYFSPATTPPPARRRGRGRPPACLGSRGPPASDRVPAPGGSVQRMRWTQSMNENCMRAYFGATEGGTNLTAYRGRMLSLFQALEPAVNVSAQRLSDQVRVIQRDHRLDDAALDRLRNEMQNSHVTPLPAQIRTQPLVPPAVPLEPNHGDEEEEDRAISAGTQCSELMRSALEDALREFRSTPPELRPRLPRLPMHNKNRALVCALDLLLSNVFESSEDLGDTHSILYCAAVAACRVAHVKFPNDNRATRPKSAVPAWQCRIERRIDEARVLIGKLTCFREGNRRPRVMRFVRRAFSGTDIGPGEYVSRITERIDFLKQKVYAWANRIRRYRRRVDRYTHNRIFQSDQRWVYRTWERPDQGVSDAHLPDNDVMNAFWRNIWSVPVTHTEGDWMQEVQRACEPIQEMGAVTIGPQDVASAVRPMPNWKSPGPDGLHNFWIKWLRSSHARLASQFQSSLESGSLPSFLTTGVTHLLFKSGSTAEPKNYRPITCLPTVYKLLTSILRAKLNHHIDSNAIMCATQNGCKNGSRGTKELLLIDMAISQQVRRSRKDLSTCWIDYKKAYDSVPHTWLMRVLELYKINATLRTFLMSCMGQWRTVLHYPGCRQIQGNGELIRIERGIFQGDSLSPLWFCLALNPLSTLLEGSGLGYRLRRGGQVISHLLYMDDLKLFAPNNLQLLELLKVTETFSNSIRMEFGVDKCAVMHVKRGRIMESVGTQLSDFIHLRSLSSTETYKYLGMSEALGINEADMKQSLRERFFGRLIKVLKSLLSGGNKVRAFNGWVMPVLMYSFGILRWTQTELDALDRRVRTLLTAYRMHHPRSSVMRLYIPRKCGGRGFLNAKTLHNREVCSLREYFSQADVGMHRDVVAVDKGLTPLSLAKENWRKPVVLDTNGRRDVWRSKELHGRFYRALHGPDVDFLASVAWLRFGDLFGETEGFVCAIMDEVMMTNNYRKYVVKDGTVDICRACHCPGESIRHIVSGCSRLANGEYLHRHNLVARIIHQQLALKYNLVDTEVPYYRYVPDPVLENGHVTLYWDRSIITDRTIVANKPDIVVIDRLERRTMIVDITVPHDENLVKAENDKKIKYLDLAHEVVDMWDVDSAVIVPIVVTANGLIAKSLDQHLMRLSLGSWIKGLIQKAVLLDTARIVRKFLSLEP

SEQ ID NO: 13855 - protein, 1203 aa, Amphipyra tragopoginis
MLTRARARQKDARPRSPDSSLCSASQPPESSPPVSAVTPAAAVASSSSDEYFSPPSSPPPVRRRGGARPPACLGPRSQPASNRVPAAGGNVSRMRWTQSINENVMRAYYGATDGGINLTAYRDRMLSLFQVLEPAINVSTQRLSDQVRVIQRNRRLDDTVLERLRSETQNNRTVTSPAQAAVQPQLPAVPPRPSHADGEGDGEVIEVSNQCSDELRSALEGAILEYRTTPPELRPRLPRLPMHKKNRALVCALDSLLSNYFDGSEDLADTHSILYCAAIAACRVAHVKFTESDRATRPKPVVPAWQCRIERRIGGARALIGKLICFREGNTRPRVMRFVRRAFSGTEISPRDYMSRITERIDFLKQKVYAWANRIRRYKRRVERYTQNRTFQSDQRRVFRTWERPDPSGSDVRLPDDEAMGSFWRSIWSVPIAHTEGDWMRDIERACEPIPEMGAIIISPQDVAGAARPLPNWKSPGPDGLHNFWLKWLRSSHACLASQFQSSLESGSLPQFLTTGATHLLYKSGSTAEPKNYRPITCLPTVYKLLTSILRVKISNHIDNNSFLSPSQNGCRSGSRGTKELLLIDMTISQQVRRSRKDLSTCWIDYKKAYDSVPHTWLMRVLELYKINTTLRTFLMSCMRQWRTVLRYPGCREIRGRGEPIRIERGIFQGDSLSPLWFCLALNPLSTLLEGTRLGYRLRREGQVISHLLYMDDLKLFAPTDLRLMELLKVTENFSSSIRMEFGVDKCAVMHVKRGGIVESEGIQISNSIQLRSLSPTETYTYLGMSEALGISEADMRQSLRERFFGRLNKVLRSLLSGGNKVRAFNGWVMPVLMYSFGILKWTQTDLEALDRRVRALLTVYRMHHPRSSVMRLYIPRKCGGRGFLNAKTLHNREVCSLREYFLQAEGEMHRDVVAVDKGLTPLALAKENWRKPAVLSTNDREEVWQSKELHGRFYRALHGPDVDFPASVSWLRFGDLFGETEGFVCAIMDEVMMTNNYRKYIVKDGTVDICRACHRPGESIRHIISGCSRLANGEYLHRHNLVARIIHQQLALKYNLVESEVPYYRYVPDPFLENGHATLYWDRSIITDRTIVANKPDIVVIDRSERRTMIVDITVPHDENLVKAEKDKQIKYLDLAHEVVGMWDVDSAVVVPIVVTANGLIAKSLDQHLKRLSLGGWIKGLLQKAVLLDTARIVRRFLSLEP

SEQ ID NO: 13856 - protein, 868 aa, Noctua pronuba
MRFVRRAFSGTGISFRDYLARVTERIDFLKQKICAWANRIRRYKRRVERCTQNRTFQSDERWVYRAWERPDQGVTDTRLPDADAMCLFWRSIWSVPVSHTEGDWTREVEQACDPIPEMGAIIISPQDVACAVRPLPNWKSPGPDGLHNFWIKWFQRSHARLASQFQSALESGSLPQFLTTGITHLLHKSGSTAEPKNYRPITCLPTVYKVLTSILRAKINHHIDSNSIMSASQNGCRNGSRGTKELFLIDMAISQQVRRSRRDLSTCWIDYKKAYDSVPHTWLMRVLELYKVDATLRTFLKSCMGHWRTVLRYPGCRQIQGNSEPIRIERGIFQGDSLSPLWFCLALNPLSTLLEGSGLGYRLRRGGQVISHLLYMDDLKLFAPNNLQLMKLLKVTETFSSAIRMEFGVDKCAVMHVKRGEIMESVGTQLSDSIHLRSLSSTETYKYLGMSEALGINTTDMKQSLRERFFGRLNKVLGSLLSGGNKVRAFNGWVMPVLMYSFGILKWTQTELDALDRRVRALLTANRMHHPRSSVMRLYIPRKCGGRGFLNAKTLHNREVCSLREYFLEADVGMHRDVVSVDKGLTPLSLANENWRKPRVLDTNDRKEVWQGKELHGRFYRALHGPDVDFLASVSWLRFGDLFGETEGFVCAIMDEVMMTNNYRKYIVKDGTVDICRACHRPGESIRHIISGCSRLANGEYLHRHNLVARIIHQQLALKYNLVESEVPYYKYAPDPVLDDGNITLYWDRSIITDRTIVANKPDIVVIDRLERRAMIVDITVPHDENLVKAEKDKQFKYLDLAREVVDMWDVSTAVIVPIVVSANGLIAKSLDQHLRRLSLGSWIKRLIQKAVLLDTARIVRRFLSQEP

SEQ ID NO: 13857 - protein, 914 aa, Noctua pronuba
MYSATRPKSAVPVWQCRIERRINEARALIGKLICFREGNTRPRVMRFVRRAFSGTDISPREYMSRVTERIDFLKQKVYAWANRIRRYRRRVDRYTQNRMFQSDERWVYRTWERPVTIQGVTDTHLPDNDAMSAFWRSIWSVPVSHTEGDWMRVVEQACDSIPEMEAISISPLDVARAVRPLPNWKSPGPDGLHNFWIKWLQRSHACLASQFQSSLETGSLPSFFTTGATHLLHKSGSTAEPKNYRPITCLPTVYKVLTSILRAKIVRHIDNNSIMSVSQNGCRNGSRGTKELLLIDMAISQQVRRSRRDLSTCWIDYKKAYDSVPHTWLRRVLELYKIDATLRTFLVSCMGQWSTVLLYPGCRQVLGNDEPIRIERGIFQGDSLSPLWFCLALNPLSTLLEDSGLGYRLRRGGQVICHLLYMDDLKIFAPSNLQLMELLKVTETFSSAIRMEFGVDKCAVMHVKRGEIMESVGTQLSDSIYLRSLSSTETYKYLGMSEALGINATDMKQSLKERFFGRLNKVLKSLLSGGNKVRAFNGWVMPVLMYSYGILKWTQTELDALDRKVRTLLTANRMHHPRSSVMRLYIPRKCGGRGFLNAKTLHNREVCSLREYFLETDVGMHRDVVSVDKGLTPLSLANENWRKPVVLDTNDRKEVWQSKELHGRFFRALHGPDVDLLASVSWLRFGDLFGETEGFVCAIMDEVIMTNNYRKYIVKDGTVDICRACHRPGESIRHIVSGCSRLANGEYLHRHNLVARIIHQQLALQYNLVGTEVPYYKYVPDPVLENGHATLYWDRSIITDRTILANKPDIVVIDRRERRAMIVDITVPHDENLVKAENDKKIKYLDLAHEVVDMWDVDSAIIVPIVVTVNGLIAKSLDQHLRRLSLRGWVKGLIQKAVLLDTARIVRRFLSLEP

SEQ ID NO: 13858 - protein, 1095 aa, Noctua pronuba
MRSYYGATEGGNNRTAYRVRMLSLFQVLKPAVNVSTQRLSDQVRVIQRNRMLDDTVLDRLRTEMQSSHVITPSAQAVVLPQSNTIPNRANDESNDMVTNVSTQCNEEIRSALEGAIREYRSMQPDLRPRIPRLPMHNKNRALVAVLDSELSNYFDNCEDLTDAHSILYCAAVAACRVAHVKFSDDRATRPKPAVPAWQYRIERRIGGARALIGKLICFREGNTRPRVMRFVRRAFSGTDISPRDYMSRVTERIDFLKQKVYAWANRIRRYKRRVDRYTQNRTFQRDERWVYRAWERPDQGVADTHLPDDDAMCSFWRSIWSVPVSHTEDEWTREVERACDPVQEMGAITISPQDVVCAVRPLPNWKSPGPDGLHNFWIKWFTRSHARLATLFQSALESGSLPEFLTTGITHLLHKSGSTAEPKNYRPITCLPTVYKVLTSILRTKISKHINDNSIMSPSQNGCRNGSRGTKELLLIDMAISQQVRRFRRDLSTCWIDYKKAYDSVPHTWLMRVLELYKVDTTLRTFLMSCMGQWRTVLRYPGCRQIQRDSEPIRIERGIFQGDSLSPLWFCLALNPLSTLLEDSGLGYRLRRGGQVISHLLYMDDLKLFAPNDLQLMELLKVTETFSSAIRMEFGVDKCAVMHVKRGEIVESVRTQLSDSINLRSLSATETYKYLGMSEALGINVADMKQSLKERFFGRLKKIFNSLLSGGNKVRAFNGWVMPVLMYSFGILKWTQTELDALDRRVPTLLTAYRMHHPRSSVMRLYIPRRCGGRGFLNAKTLHNREICSLREYFLETDVGMHRDVVAVDKGLTPLSLAKENWRKPVVLDTNDRREVWQSKELHGRFFRALHGPDVDLSASVAWLRSGDLFGETEGFVCAIMDEVMMTNNYRRFIVKDGTVDICRACHRPGESIRHIISGCSRLANGEYLHRHNLVARIIHQQLALKYNLVESEVPYYKYVPDPVLENGYVTLYWDRSIITDRTIVANKPDIVVVDRSERRAMIVDITVPHDENLVKAEKDKQIKYLDLAHEVVDLWDVDSAIIVPIVVSAHGLITKSFDQHLRRLSLGSWIKGLIQKAVLLDTARIVRRFLSLEP

SEQ ID NO: 13859 - protein, 1207 aa, Noctua pronuba
MSPMLTRRRAKLLETHPPSPGSSLSSASQPPGRATSVSAASPVAAVASSSSDEFFSPPSTPPSPRRRGRRPPAGLGPRGQQAPNRVPAAGGNVSRIRWTQSMNENVMRAYYGATEGGINLTAYRCRMLSLFRALEPAVNVSAQRLSDQVRVIQNNHRLDDATLDRLRSELRISPASNPLPSQNVTHVPASLPLRANQHAEEEDDRAVSADNLCNEELRSALEDAIREYRFTSPDLRPRLPRLPMNKKNRALVCALDALLPNFIENSANLCDTHSILYCTAVAACRVANVKFPNTDSATRPKSAVPVWQCRIERRINEARVLIGKLICFREGNTRPRVMRFVRRAFSGTDISPREYMSRVTERIDFLKQKVYAWANRIRRYRRRVDRYTQNRMFQSDERWVYRTWERPVTIQGVTDAHLPDNDAMSAFWRSIWSVPVSHTEGDWMRVVEQACDSIPEMEAISISPLDVARAVRPLPNWKSPGPDGLHNFWIKWLQRSHACLASQFQSSLETGSLPSFFTTGVTHLLHKSGSTAEPKNYRPITCLPTVYKVLTSILRAKIVRHIDSNSIMSVSQNGCRNGSRGTKELLLIDMAISQQVRRSRRDLSTCWIDYKKAYDSVPHTWLRRVLELYKIDATLRTFLVSCMGQWSTVLLYPGCRQVLRNDEPIRIERGIFQGDSLSPLWFCLALNPLSTLLEDSGLGYRLRRGGQVISHLLYMDDLKIFAPSNLQLMELLKVTETFSSAIRMEFGVDKCAVMHVKRGEIMESVGTQLSDSIYLRSLSSTETYKYLGMSEALGINSCDMKQSLKERFFGRLNKVLKSLLSGGNKVRAFNGWVMPVLMYSYGILKWTQTELDALDRKVRTLLTANRMHHPRSSVMRLYIPRKCGGRGFLNAKTLHNREVCSLREYFLETDVGMHRDVVSVDKGLTPLSLANENWRKPVVLDTNDRKEVWQSKELHGRFFRALHGPDVDLLASVSWLRFGDLFGETEGFVCAIMDEVIMTNNYRKYIVKDGTVDICRACHRPGESIRHIVSGCSRLANGEYLHRHNLVARIIHQQLALQYNLVGTEVPYYKYVPDPVLENGHATLYWDRSIITDRTILANKPDIVVIDRRERRAMIVDITVPHDENLVKAENDKKIKYLDLAHEVVDMWDVDSAIIVPIVVTVNGLIAKSLDQHLRRLSLRGWVKGLIQKAVLLDTARIVRRFLSLEP

SEQ ID NO: 13860 - protein, 960 aa, Tinea trinotella
MHKKNRALVCALDSQLVNHFKSSKDLADTHSILYCAAVAVCRVAHVKFPNNDRAARLAVPAWQCRIERRIGEARALIGKLISFREGNTRPRVMRFVRRAFSGTDISSRDYQTRVTERIDFLKQKIYAWANRIRRYKRRVERYTQNRTFQSNERWVYRAWERPDQDVSDMCLPDDDAMSLFWRNIWSVPVGHTEGEWTREVERACDLIPEMGAIIISPQDVACAVRPLSNWKSPGLDGLHNFWIKYFQRSHARLAAQFQSALELGSLPQFLTTGITHLLHKSGSTAEPKNYRPITCLPTVYKVLTSILRAKIDKHIDTNCIMSASQNGCRSGSRGTKELLLIDVAISQQVRRSRRDLSTCWIDYKKAYDSVPHTWLMRVLELYKVDAALRTFLVSCMGQWRTVLHYPGCRRILGNGEPIKIERGIFQGDSLSPLWFCLALNPLSTLLDGSGQGYRLRRDGQVISHLLYMDDLKLFAPNNLQLMKLLKVTETFSSAISMEFGVDKCAIMHVKRGEIMESVGTQLSDSIHLRSLCSTETYKYLGMSEALGINAVDVKQSLRDRFFGRLNKVLNSLLSGGNKVRAFNGWVMPVLMYSFGILKWTQTELDALDRRVRTLLTANRMHHPRSSVMRLYIPRKCGGRGFLNAKTLHNREVCSLREYFLKTDVGMHRDVVAVDKGLTSLSLANENWRKPVVLDANDRREVWQSKELHGRFYRALHGPDVDFLASVSWLRFGDLFGETEGFVCAIMDEVMMTNNYRKYIVKDGTVDICRACHRPGESIRHIISGCSRLANGDYLHRHNLVARIIHQQLALKYNLVESEVPYYRYVPDPVLENGNITLYWDRSIITDRTIVANKPDIVVIDRLERRTIIVDVAVPHDENLVKAEKDKQIKYLDLAREVVDMWEVDTAIIVPIVVTANGLIAKSLDEHLKRLSLGSWIKRLIQKAVLLDTARIVRRFLSQEP

SEQ ID NO: 13861 - protein, 1199 aa, Spilosoma lubricipeda
MLTRARSRAQLLTPDSSLRSALPSSDARTEVPTVAEASSSSSSDEFFSPPTSPTPVRRQERYRPPDSLGPRGPLTSNRAPAAGGNVRRMKWTHSINENVMRAYFRATELGTNLTAYRVRLVSLFQELEPAVNVSAQRLSDQVRAIQRCHLLDDAALERIRSDIRNSLAVPSSSHVVDTIVNTTSQLPRSEYIDERVDSEIISVSTQCNDTIRSTLEDAIREYRYVDSNNRLRLSRLPIHKRNLALVSALDSLLPDYFNNSEDLSDTHSILYCAAIAVCRVAGVNFVECKTATRPKNTVPAWQCRIERRIAGTRTLIGKLISFRSGNTRPKVMRFVKQAFLGTTVSPQQYMSCVTERIDFLKQKVYAWANRIRRYRKRTDRYNQNRTFQRNEKWVYQKWEKLSPCMSDEHLPDKNATNYFWRNIWSTPVTHTEGHWCRDVERSCESITPMEPVRIDKEDVSCAVRSLANWKAPGPDGLHNFWLKWFRSSHAYLASQFQTALDSGSLPQFLTTGITHLLHKSGSTTDPKNFRPITCLPTLYKLLTSILRLKITAHINNNSIISVSQNGCRSGTRGTKELLIIDMTISQQVRRNRKSLATCWIDYKKAYDSVPHTWLLRVLELYKIDTTLCTFLKSCMGQWRTVLRYPGCRQSTMNDVRIKIERGIFQGDSLSPLWFCLALNPLSALLEDSGLGYRLQKDDQVISHLFYMDDLKLLAPTKLQLTALLKVTENFSNSIKMEFGVDKCAVMYVKKGVIVESEGTELSDSTRLRSLSATETYKYLGFSQSLGIPEPDMKQSLRERFFGRLKKVLKSLLSGGNKVRAFNGWVMPVLMYSFGILRWTQTELDAIDRRVRTLLTAFRMHHPRSSVMRLYIPRKLGGRGLLNAKTLHNREIYNLREYFLHTDVGMHRSVVTVDTGLTPLALAKENWRKPVVLSTNDRREVWKGKELHGRFYRALNGPDIDFKASTSWLRYGDLFGETEGFVCAIMDEVIMTNNYRKYILKDGTVDICRACHRPGESIRHIISGCSRLANGEYLHRHNQVARIVHQQLALKYHLVSSEVPYYRYVPDPVLENGRATLYWDRSIITDRTIVANKPDIVVIDRLERRAMIVDIAVPHDENLVKVEKEKQIKYLDLSHEIVDMWNVDSAIIVPIVVSAHGLIAKSLDQHLKRLTLEGWIKGLMQKAVLLDTARIVRRFLSLEP

SEQ ID NO: 13862 - protein, 1196 aa, Spilosoma lubricipeda
MLTRARSRALLPSSDSSLRSALPSSDARTEVPTVAEASSSSSSDEFFSPPTSPIPVRRQGRDRPPTSLGSRGPLTSNRAPATGGDVRRMKWTQSINENVMRAYFRATELGTNLTAYRVRLVSLFQELEPAVNVSAQRLSDQVRAIQRCHLLDDTVLERIRSDIRNSLTVPSSLHVVDVVTNSTPQNEDVSELVDSEIISVSTLYNDKIRSTLEDVIREYRCVNFNNRPRLPRLPIHKRNLALVSALDSLLPDYLGNSEDLSDTHSILYCAAIAVCRVAGIKFAENITTTRPENTVPAWQCRIERRIAGARTLIGKLISFRSGNTRPKVMRFVKQAFLGTTISPQQYMSCVTERIDFLKQKVYAWANRIRRYRKRIDRYNQNRMFQRNEKWVYRKWENLSPCMSDGQVPDENATNSFWRSIWSVPVAHTEGDWYRDVERSCESLLPMELINIDKEDVSCAVRSLPNWKAPGPDGLHNFWLKWFRSSHACLASQFQTALDSGSLPQFLTTGITHLLYKSGSAMDPKNFRPITCLPTLYKLLTSILRLKITTHINQNSILSVSQNGCRSGTRGTKELLIIDMTISQQVRRNRKSLATCWIDYKKAFDSVPHTWLLKVLELYKIDTTLCTFLKSCMRQWRTVLRYPGCRQTAVNDVPIKIERGIFQGDSLSPLWFCLALNPLSTLLEGSGLGYRLQKEAPVISHLFYMDDLKLFAPTKLQLTALLRVTENFSNSIKMEFGIDKCAVMHVKKGVIVESEGIELSDSTRLRSLSATETYKYLGFSQSLGIPESDMKQSLRERFFGRLKKVLKSLLSGGNRVRAYNGWVMPVLMYSFGILRWTQTELDALDRRVRTLLTAFRMHHPRSSVMRLYIPRKFGGRGLLNVKTLHNREIYNLREYFLHTDVGVHRSVVAMDTGLTPLALAKENWRKPVVLGTNERREVWKGKELHGRFYRALNGPDIDFKASTSWLRYGDLFGETEGFVCAIMDEVIMTNNYRKYILKDGTVDICRACHRPGESIRHIISGCSRLANGEYLHRHNQVARIVHQQLALKYKLVNSEVPYYRYVPDPVLENGRATLYWDRSIITDRTIVANKPDIVVIDRSERRAMIVDIAVPHDENLVKVEKEKQIKYLDLSHEIVDMWDVDSVIIVPIVVSVHGLIAKSLDQHLKRLALDGWIKGLMQKAVLLDTARIVRRFLSLEP

SEQ ID NO: 13863 - protein, 1108 aa, Spilosoma lubricipeda
MKWTQSINENVMRAYFRATELGTNLTAYRVRLVSLFQELEPAVNVSAQRLSDQVRAIQRCHLLDDTVLERIRSDIRNSLTVPSSLHVVDVVTNSTPQNEDVSELVDSEIISVSTLYNDKIRSTLEDVIREYRCVNFNNRPRLPRLPIHKRNLALVSALDSLLPDYFGNSEDLSDTHSILYCAAIAVCRVAGIKFAENITTTRPENTVPAWQCRIERRIAGARTLIGKLISFRSGNTRPKVMRFVKQAFLGTTISPQQYMSCVTERIDFLKQKVYAWANRIRRYRKRIDRYNQNRMFQRNEKWVYRKWENLSPCMSGGQVPDENATNSFWRSIWSVPVAHTEGDWYRDVERSCESLLPMELINIDKEDVSCAVRSLPNWKAPGPDGLHNFWLKWFRSSHACLASQFQTALDSGSLPQFLTTGITHLLYKSGSAMDPKNFRPITCLPTLYKLLTSILRLKITTHINQNSILSVSQNGCRSGTRGTKELLIIDMTISQQVRRNRKSLATCWIDYKKAFDSVPHTWLLKVLELYKIDTTLCTFLKSCMRQWRTVLRYPGCRQTAVNDVPIKIERGIFQGDSLSPLWFCLALNPLSTLLEGSGLGYRLQKEAPVISHLFYMDDLKLFAPTKLQLTALLRVTENFSNSIKMEFGIDKCAVMHVKKGVIVESEGIELSDSTRLRSLSATETYKYLGFSQSLGIPESDMKQSLRERFFGRLKKVLKSLLSGGNRVRAYNGWVMPVLMYSFGILRWTQTELDALDRRVRTLLTAFRMHHPRSSVMRLYIPRKFGGRGLLNVKTLHNREIYNLREYFLHTDVGVHRSVVAMDTGLTPLALAKENWRKPVVLGTDERREVWKGKELHGRFYRALNGPDIDFKASTSWLRYGDLFGETEGFVCAIMDEVIMTNNYRKYILKDGTVDICRACHRPGESIRHIISGCSRLANGEYLHRHNQVARIVHQQLALKYKLVNSEVPYYRYVPDPVLENGRATLYWDRSIITDRTIVANKPDIVVIDRSERRAMIVDIAVPHDENLVKVEKEKQIKYLDLSHEIVDMWDVDSVIIVPIVVSVHGLIAKSLDQHLKRLALDGWIKGLMQKAVLLDTARIVRRFLSLEP

SEQ ID NO: 13864 - protein, 922 aa, Ochropleura plecta
MCRVAHVKFPDDGATRPKPAVPFWQCRIERRIGVARALIGKLICFREGNTRPRVMRFVRRAFAGTDISPPDYMSHITERIDFLKQKVYAWANRIRRYKRRVERYTLNRTFQSDERWVYRAWERPDQGVSDTHLPDDDAMCLFWRNIWSVPVSHTEGEWTREVERACDPIPEMGALTISPQDVACAVRPLPNWKSPGPDGLHNFWLKWIQRSHARLATLFQTALESGSLPKFLTTGITHLLHKSGSTTEPKNYRPITCLPTIYKVLTSILRAKITKHIDDNSIMSASQNGCRNGSRGTKELLLIDMAISQQVRRSRRHLSTCWIDYKKAYDSVPHTWLMRVLELYKVDATLRTFLSSCMRQWNTVLRYPGSRQIQRNSEPIRIERGIFQGDSLSPLWFCLALNPLSTLLEDSGLGYRLRRGGRVISHLLYMDDLKLFAPNDSQLMELLKVTETFSSAISMEFGVDKCAVMHVKRGEIVESVGTQLSDSIHLRSLSANETYKYLGMSEALGINVADMKQSLKERFFGRLRKVFNSLLSGGNKVRAFNGWVMPVLMYSFGILKWTQTELDALDRKVRTLLTAYRMHHPRSSVMRLYIPRSCGGRGFLNAKTLHNREICSLREYFLEADVGMHRDVVTVDKGFTPLSLAKENWRKPVVLDTNDRREVWQSKELHGRFFRALHGPDVDQPASVAWLRSGDLFGETEGFVCAIMDEVMMTNNYRRFIVKDGTVDICRACHRPGESIRHIISGCSRLANGEYLHRHNLVARIIHQQLALKYSLVESEVPYYRYEPDPVLEHGNITLYWDRSIITDRTIVANKPDIVVVDRSERRAMIVDITVPHDENLVKAEKDKQIKYIDLAREVVDMWDVDSAIIVPIVVSANGLITKSLEQHLRRLSLGSWIKGLIQKAVLLDTARIVRRFLSLEP

SEQ ID NO: 13865 - protein, 1076 aa, Hecatera dysodea
MLSLFQVLEPAVNVSAQRLSDQVRVIQRNRMLDDAVLDRLRLESRSSRVSPASPPAAVQIQPSISPRPDHVSEDVDDGTISVSTQCNERLRSALENAFREYRSTPPELRPRLPRLPMHNKNRALVCALDSQLSIYFDSSENLTDTHSILYCGAAAACRVAHVKLPNSDRVARPAVPAWQCRIERRIAEARALIGKLICFREGNTRRRVMRFVWRAFSGTDISPRDYLTRVTERIDFLKQKVYAWANRIRRYKRRVERYTQNRIFQNNERWVYRAWERPDQGVTDTRLPDDEAMLSFWRNIWSVPVSHTEGDWTREVERACDSIPEMGAINISPQDVARAVRPLPNWKSPGPDGLHNFWIKWLTRSHARLASQFQSALESRSLPQFFTTGITHLLHKSGSTADPKNYRPITCLPTVYKVLTSILRAKINDHIESNSIMSISQNGCRSGARGTKELLLIDVAISQQVRRSRKDLSTCWIDYKKAYDSVPHTWLMRVLELYKVDAVLRAFMMSCMGQWRTVLHYPGCRQTQANSEPIRIERGIFQGDSLSPLWFCLALNPLSTLLEGSGQGYRLRRGGQVISHLLYMDDLKLFAPNNLQLMKLLKVTETFSSDISMEFGVDKCAVMHVKRGEIMESVGTQLSDSIHLRSLCSTETYKYLGMSEALGINATSVKQSLKERFFGRLNKVLNSLLSGGNKVRAFNGWVMPVLMYSFGILKWTQTELDALDRRVRSLLTANRMHHPRSSVMRLYIPRKCGGRGFLNAKTLHNREVCSLREYFLEADVGMHRDVVAVDKGFTPLSLANENWRKPVVLDTNDRREVWQSKELHGRFYRVLHGPDVDFLASVAWLRFGDLFGETEGFICAITDEVMMTNNYRKYIVKDGTVDICRACHRPGESIRHIISGCSSLANGDYLHRHNLVARIIHQQLALKYNLVESEVPYYRYAPDPVLENGNCTLYWDRSIITDRTIVANKPDIVVIDRLERRAMIVDIAVPHDENLVKAEKDKQSKYLDLAREVVDMWDVNTAVIVPIVVTANGIIAKSLDQHLKRLSLGSWIKGLIQKAVLLDTARIVRRFLSREP

SEQ ID NO: 13866 - protein, 1200 aa, Hecatera dysodea
MLTRSRTRCQNTRLTPSDSSLSSASQPPGPTPPVSPEIPVAAVASSSSDEYFSPPTTPPPARRRGRGRPPTSLGPRGPPASDRVPAIGGSVQRMRWTHSINENVMRSYFGATEGGTNLTAYRGRMLSLFQVLEPAVNVSAQRLSDQVRVIQRNRMLDDAVLDRLRLESRSSRVSPASPPAAVQIQPSISPRPDHVSEDVDDATISVSTQCNERLRSALEDAFREHRSTPPELRPRLPRLPMHNKNRALVCALDSQLSIYFDSSENLTDTHSILYCGAAAACRVAHVKLPNSDRVARPAVPAWQCRIERRIAEARALIGKLICFREGNTRRRVMRFVRRAFSGTDISPRDYLTRVTERIDFLKQKVYAWANRIRRYKRRVERYTQNRIFQNNERWVYRAWERPDQGVTDTCLPDDEAMLSFWRNIWSVPVSHTEGDWTREVERACDSIPEMGAINISPQDVARAVRPLPNWKSPGPDGLHNFWIKWLTRSHARLASQFQSALESRSLPQFFTTGITHLLHKSGSTAEPKNYRPITCLPTVYKVLTSILRAKINDHIESNSIMSTSQNGCRSGARGTKELLLIDVAISQQVRRSRKDLSTCWIDYKKAYDSVPHTWLMRVLELYKVDAVLRAFLMSCMGQWRTVLHYPGCRQTQVNSEPIRIERGIFQGDSMSPLWFCLALNPLSTLLEGSGQGYRLRRGGQVISHLLYMDDLKLFAPNNLQLMKLLKATETFSSDISMEFGVDKCAVMHVKRGEIMESVGTQLSDSIHLRSLCSTETYKYLGMSEALGINATSVKQSLKERFFGRLNKVLNSLLSGGNKVRAFNGWVMPVLMYSFGILKWTQTELDALDRRVRSLLTANRMHHPRSSVMRLYIPRKCGGRGFLNAKTLHNREVCSLREYFLEADVGMHRDVVAVDKGFTPLSLANENWRKPVVLDTNDRREVWQSKELHGRFYRVLHGPDVDFLASVAWLRFGDLFGETEGFICAITDEVMMTNNYRKYIVKDGTVDICRACHRPGESIRHIISGCSSLANGDYLHRHNLVARIIHQQLALKYNLVESEVPYYRYAPDPVLENGNCTLYWDRSIITDRTIVANKPDIVVIDRLERRAMIVDIAVPHDENLVKAEKDKQSKYLDLAREVVDMWDVNTAVIVPIVVTANGIIAKSLDQHLKRLSLGSWIKGLIQKAVLLDTARIVRRFLSREP

SEQ ID NO: 13867 - protein, 960 aa, Hecatera dysodea
MHNKNRALVCALDSQLSIYFDSSENLTDTHSILYCGAAAACRVAHVKLPNSDRVARPAVPAWQCRIERRIGEARALIGKLICFREGNTRPRVMRFVRRAFSGTDISPRDYLTRVTERIDFLKQKVYAWANRIRRYKRRVERYTQNRTFQRNERWVYRAWERPDQGVTDTRLPDDEAMLSFWRNIWSVPVSHTEGDWTREVERACDSIPEMGAINISPQDVARAVRPLPNWKSPGPDGLHNFWIKWFKGSHARLAAQFQAALGSGSLPKFLTTGITHLLHKSGSTAEPKNYRPITCLPTVYKVLTSILRAKINNHIDSNSIMSASQNGCRNGSRGTKELLLIDVAISQQVRRSRRDLSTCWIDYKKAYDSVPHTWLMRVLELYKVDAVLRTFLMSCMGQWRTVLHYPGCRQTQANSEPIRIERGIFQGDSLSPLWFCLALNPLSTLLEGSGQGYRLRRGGQVISHLLYMDDLKLFAPNNLQLMKLLKVTETFSSDISMEFGVDKCAVMHVKRGEIMESVGTQLSDSIHLRSLCSTETYKYLGMSEALGINATGVKQSLKERFFGRLNKVLNSLLSGGNKVRAFNGWVMPVLMYSFGILKWTQTELDALDRRVRSLLTANRMHHPRSSVMRLYIPRKCGGRGFLNAKTLHNREVCSLREYFLEADVGMHRDVVAVDKGLTPLSLANENWRKPMVLDTNDRREVWKSKELHGRFYRVLHGPDVDFLASVAWLRFGDLFGETEGFICAITDEVMMTNNYRKYIVKDGTVDICRACHRTGESIRHIISGCSSLANGDYLHRHNLVARIIHQQLALKYNLVESEVPYYRYAPDPVLENGNCTLYWDRSIITDRTIVANKPDIVVIDRLERRAMIVDIAVPHDENLVKAEKDKQSKYLDLAHEVVDMWNVNTAVIVPIVVTANGIIAKSLDQHLKRLSLGSWIKGLIQKAVLLDTARIVRRFLSREP

SEQ ID NO: 13868 - protein, 1200 aa, Hecatera dysodea
MLTRSRTRCQNTRLTPSDSSLSSASQPPGPTPPVSPEIPVAAVASSSSDEYFSPPTTPPPARRRGRGRPPTSLGPRGPPASDRVPAIGGSVQRMRWTHSINENVMRSYFGATEGGTNLTAYRGRMLSLFQVLEPAVNVSAQRLSDQVRVIQRNRMLDDAVLDRLRLESRSSRVSPASPPAAVQIQPSISPRPDHVSEDVDDGTISVSTQCNERLRSALEDAFREYRSTPPELRPRLPRLPMHNKNRALVCALDSQLSIYFDSSENLTDTHSILYCGAAAACRVAHVKLPNSDRVARPAVPAWQCRIERRIAEARALIGKLICFREGNTRRRVMRFVRRAFSGTDISPRDYLTRVTERIDFLKQKVYAWANRIRRYKRRVERYTQNRIFQNNERWVYRAWERPDQGVTDTRLPDDEAMLSFWRNIWSVPISHTEGDWTREVERACDSIPEMGAINISPQDVARAVRPLPNWKSPGPDGLHNFWIKWLTRSHARLASQFQSALESRSLPQFFTTGITHLLHKSGSTADPKNYRPITCLPTVYKVLTSILRAKINDHIESNSIMSTSQNGCRSGARGTKELLLIDVAISQQVRRSRKDLSTCWIDYKKAYDSVPHTWLMRVLELYKVDAVLRAFLMSCMGQWRTVLHYPGCRQTQANSEPIRIERGIFQGDSLNPLWFCLALNPLSTLLEGSGQGYRLRRGGQVISHLLYMDDLKLFAPNNLQLMKLLKVTETFSSDISMEFGVDKCAVMHVKRGEIMESVGTQLSDSIHLRSLCSTETYKYLGMSEALGINATSVKQSLKERFFGRLNKVLNSLLSGGNKVRAFNGWVMPVLMYSFGILKWTQTELDALDRRVRSLLTANRMHHPRSSVMRLYIPRKCGGRGFLNAKTLHNREVCSLREYFLEADVGMHRDVVAVDKGLTPLSLANENWRKPVVLDTNDRREVWQSKELHGRFYRVLHGPDVDFLASVAWLRFGDLFGETEGFICAITDEVMMTNNYRKYIVKDGTVDICRACHRPGESIRHIISGCSSLANGDYLHRHNLVARIIHQQLALKYNLVESEVPYYRYAPDPVLENGNCTLYWDRSIITDRTIVANKPDIVVIDRLERRAMIVDIAVPHDENLVKAEKDKQSKYLDLAREVVDMWDVNTEVIVPIVVTANGIIAKSLDQHLKRLSLGSWIKGLIQKAVLLDTARIVRRFLSREP

SEQ ID NO: 13869 - protein, 1200 aa, Mythimna impura
MLTRAAARRARLPPPASSLSSASPPPEPSPTVSAVTPAVAVASSSSDEYFSPPTSPPPARRRRGRRPPSGLGPRGPPASDRVPAPGGSVQRMRWTQSINENVMRAYYGATEGGNNLTAYRVRMLSLFQVLEPAVNVSAQRLSDQVRVIQRNHMLDDTVLDRLRTEMSNHAIAPSSQSVVPVMVPPSYHLSGHVDEEITDMVTHVSTQCNNELRSALECAIREYRNMPLELRPRLPRLPMHNKNKALVAALDLQLSNYFDDCKDLTDTHSIMYCAAVAACRLAHVKFPNCDVATRPKPAVPAWQCRIERRIGGARALIGKLICFREGNTRPRVMRFVRRAFSGTDISPRDYMSRVTERIDFLKQKVYAWANRIRRYKRRVDRYTQNRTFRSNERWVYRAWERPDQGVTDACLPDDDAMSSFWRSIWSVPVSHTEGDWTREVERACDPIPQMGAIDISPQDVARAVRPLPNWKSPGPDGLHNFWIKWFTRSHARLAYQFQSALESGSLPQFLTTGITHLLHKSGSTAEPKNYRPITCLPTVYKVLTSILRSKINSHIDKNLIMSPSQNGCRNGSRGTKELLLIDMTISQQVRRSRKDLSTCWIDYKKAYDSVPHTWLMRVLELYKIDTTLRTFLMSCMRQWSTVLRYPGCRHTQRNSEPVRIERGIFQGDSLSPLWFCLALNPLSTLLENSGLGYRLKRGGQVISHLLYMDDLKLFAPNNLQLMELLKVTETFSSAIRMEFGVDKCAVMHVKRGEVVESVGTQLTDFINLRSLSPTETYKYLGMSEALGINITDMKQSLKERFFGRLKKVLNSLLSGGNKVRAFNGWVMPVLIYSFGVLKWTQTELDALDRKVRTLLTAYRMHHPRSSVMRLYIPRKCGGRGFLNAKTLHNREVCSLREYFLAADVGMHRDVVTVDKGLTPLSLANENWRKPVVLDTNDRREVWQSKELHGRFFRALHGPDVDQLASVAWLRSGDLFGETEGFVCAIMDEVIMTNNYRRFIVKDGTVDICRACHRPGESIRHIISGCSRLANGEYLHRHNLVARIIHQQLALKYSLVESEVPYYRYEPDPVLDNGHITLYWDRSIITDRTIVANKPDIVVVDRSERRAMIVDISVPHDENLVKAEKDKKIKYIDLAREVVDMWDVDSAIIVPIVVSGNGLIAKSLDQHLRRLALGDWIKGLIQKAVLLDTARIVRRFLSLEP

SEQ ID NO: 13870 - protein, 1200 aa, Mythimna impura
MLTRAAARRARHPPPGSPLSSASPPPDLGSPVSPVAAVASSSSDEYFSPPTSPTPVRRPGRGRPPKSLGPGGQPAPSRVPAAGGCVQRMRWTQSMNENVMRAYYGSTEGGTSLTAYRDRMLSLFQDLEPTVNVSAQRLSDQVRFIQRNHRLDDAALDRLRSEVLSNQIVSTSIQTQTAATPTTNAISPRSILNNDDADERVVTVSSQCNDELRSALEDALREYRLTPTELRPRLPRLPMHKKNRALVCTLDSLLKNIFESSENLVDTHSILYCGAVAACRLANIKFPNTDGTIRPKPAVPAWQYRIERRIDGARVLIGKLHSFREGNTRPRVMRFVRRAFLGTSISPQEYMSRVTERIDFLKQKVCAWASRIRRYKRRVDRYSQNRIFQSDERWVYRAWERPEQNVIDGLRPDDFATITFWRNIWSVPVSHTEGGWIREVERVCEAIPEMEKITISPADVAKAVRPLPNWKSPGPDGLQNFWLKWYRNSHAPLASQFQSTLESGSLPEYLTTGVTHLLHKTGNPAEPKNYRPITCLSTVYKLLTSILREKINRHIENNSIMSASQNGCRNGSRGTKELLLIDMAVSQQARRSRKDLSTCWIDYKKAYDSVPHAWLMRVLELYKIDTTLRTFLESCMRQWKTVLRYPGCRPIQGDDEPIRIKRGIFQGDSLSPLWFCLALNPLSTLLEDSGLGYRLRRGGQAISHLLYMDDLKLFAPSNLQLMELLKVTETFSSAIRMEFGVDKCAAMHVKQGEIMESEGIQLPDSIHLKSLSSTETYRYLGMSEALGINNADMKQSLKERFFGRLKKVLNSLLSGGNKVRAFNGWVMPVLMYSFGILKWTQTELDALDRRVRTLLTANRMHHPRSSVMRLYISRKCGGRGFLNAKTLHNREVCSLREYFLKTDVGMHRDVVAVDKGLTPLSMAKEDWRKPVVLTTDDRKEVWKGKELHGRFYRALHEPDVDFLASVAWLRFSDLFGETEGFVCAIMDEVILTNNYRKYIMKDGTVDVCRACHRPGESIRHIISGCSRLANGEYLHRHNQVARIIHQQLALKYNLVDSEVPYYKYVPDPVLENDHVTLYWDRSIITDRTIVANKPDIVVIDRLARRAIIVDVTIPHDENLVKAEKEKQIKYLDLAHEVVGMWNMDSAVIVPIVVTANGLIAKSFDDHLSKLSLRGWIKGLIQKAVLLDTARIVRRFLSLEP

SEQ ID NO: 13871 - protein, 923 aa, Mythimna impura
MFHYNYLKGLCELASAPRTPPKGPGPQGPEINKIYKNNNNNLLICFREGNTRPRVMRFVRRAFSGTDISPRDYLPHITERIDFLKQKVYAWANRIRRYKRRVERYTQNRTFQRNERWVYRAWERPDQGVIDTRLPDDDAMCSFWRSIWSVPVSHTEGDWIREIERTCDLIPEMGAITISPQDVARAVRPLPNWKSPGPDGLHNFWLKWFQRSHARLASQFQSALESGSLPQFLTTGITHLLHKSGSTAEPKNYRPITCLPTVYKVLTSILRAKINSHIETNSIMSASRNGCRNGSRGTKELLLIDVAISQQVRRSRRDLSTCWIDYKKAYDSVPHTWLMRVLELYKVDATLRTFLMSCMRQWRTALHYPGCRQIRESSEPIRIERGIFQGDSLSPLWFCLALNPLSTLLEGSGLGYRLRRGGHVISHLLYMDDLKLFASNNLQLMELLKVTETFSSAIRMEFGLDKCAVMHVKRGEIIESVGTQLSDSIYIRSLCSTETYKYLGMSEALGINAADMKQSLRERFFGRLNKVLNSLLSGGNKVRAFNGWVMPVLMYSFGILKWTQTELDALDRRVRSLLTANQMHHPRSSVMRLYIPRKCGGRGFLNAKTLHNREICSLREYFLKTDVGMHRDVVAVDKGLTPLSLVNENWRKPTVMDTNERRAVWQGKELHGRFYRALHGPDVDLLASVSWLRFGDLFGETEGFVFAIMDEVMMTNNYRKYIVKDGTVDICRACHRPGESIRHIISGCSHLANGDYLHRHNLVARIIHQQLALKYNLVESEVPYYRYWPDPVLENGGVTLYWDRSIITDRTIVANKPDIVVIDRLERRTMIVDIAVPHDENLVKAEKDKQTKYLDLAREVVDMWEVDRAIIVPIVVTANGLIAKSLEQHLRRLSLGSWIKGLIQKAVLLDTARIVRRFLSQEP

SEQ ID NO: 13872 - protein, 1200 aa, Mythimna impura
MLTRSRAQKLHTHPTSSGSSLSSASQPPGPAPTVSPEIPVAAVASSSSDEYFSPPTTPPPARRRGRGRPPASLGPRGPPASDRVPAAGGSVQRMRWTSSINENVMRSYFGATEGGINLTAYRGRMLSLFQVLEPAVNVSVQRLSDQVRVIQRNRMLDDAVLDRLRLESQSSRVSPATTPAAVQRLPTASPRPDHVGDADDDAAISVSTQCNDRLRGALEDAFREYRSTPPGLRPRLPRLPMHKRNRALVCALDSQLSNCFDSSKDLTDTHSILYCAAVAACRVAHVKFPNCDRATRPAVPAWQCRIEHRIGEARALIGKLICFREGNTRPRVMRFVRRAFSGTDISPRDYLPCVTERIDFLKQKIYAWANRIRRYKRRVERYTRNRTFQSNERWVYRDWERSDQGVTDTRLPDDDAMCSFWRSIWSAPVSHTEGDWIREVERACDLLPEMGAITISPQDVARAVRPLPNWKSPGPDGLHNFWVKWFQRSHARLASQFQSALESGSLPQFLTTGITHLLHKSGSTAEPKNYRPITCLPTVYKVLTSILRAKINSHIETNSIMSASQNGCRNGSRGTKELLLIDIAISQQVRRSRKNLSACWIDYKKAYDSVPHTWLMRVLELYKVDATLRTFLMSCMGQWRTVLHYPGCRQIQENNEPIRIERGIFQGDSLSPLWFCLALNPLSTLLEGSGLGYRLKRGGQVISHLLYMDDLKLFAPNNLQLVELLKVTETFSSAIRMEFGVDKCAVIHVKRGEIMESVGIQLSDSIHLRSLCSTETYKYLGMSESLGINTDDVKQSLKERFFGRLNKVLNSLLSGGNKVRAFNGWVMPVLMYSFGILKWTQTELDALDRRVRTLLTANRMHHPRSSVMRLYIPRKCGGRGFLNAKTLHNREVCSLREYFLKTDVGMHRDVVAVDKGLTPLSLANENWRKPIVLDTNDRREVWQSKELHGRFYRALHGPDVDLLASVSWLRFGDLFGETEGFVFAIMDEVMMTNNYRKYIVKDGTVDICRACHRPGESIRHIISGCSHLANGDYLHRHNLVARIIHQQLALKYNLVESEVPYYRYVPDPVLDNGNITLYWDRSIITDRTIVANKPDIVVIDRLERRTMIVDIAVPHDENLVKAEKDKQTKYLDLAREVVDMWEVDRAIIVPIVVTANGLIAKSLEQHLRRLSLGSWIKGLIQKAVLLDTARIVRRFLSQEP

SEQ ID NO: 13873 - protein, 1200 aa, Mythimna impura
MLTRSRAKKANTHPTSSGSSLSSASQPPGPAPTVSPEIPVAAVASSSSDEYFSPPTTPPPARRRGRGRPPASLGSRGPPASDRVLVAGGSVQRMRWTQSINENVMRSYFGATEGGSNLTAYRGRMLSLFQVLEPAVNVSAQRLSDQVRVIQRNRMLDDAVLDRLRLESRSSRVSPASPQAAVQLQSNVSLRPDHVGEDDDDGAISVSNQCNVRLRSALEDAFREYRFTPAELRPRLPRLPMHKKNRALVCALDSQLSNCFDSSEDLTDTHSILYCAAVAACRVARVKFPNSDRVTRPAVPAWQCRIERRIGEARALIGKLICFREGNTRPRVMRFVRRAFSGTDISPRDYLPHITERIDFLKQKVYAWANRIRRYKRRVERYTQNRTFQRNERWVYRAWERPDQGVIDTRLPDDDAMCSFWRSIWSVPVSHTEGDWIREIERTCDLIPEMGAITISPQDVARAVRPLPNWKSPGPDGLHNFWLKWFQRSHARLASQFQSALESGSLPQFLTTGITHLLHKSGSTAEPKNYRPITCLPTVYKVLTSILRAKINSHIETNSIMSASQNGCRNGSRGTKELLLIDVAISQQVRRSRRDLSTCWIDYKKAYDSVPHTWLMRVLELYKVDATLRTFLMSCMRQWRTALHYPGCRQIREISEPIRIERGIFQGDSLSPLWFCLALNPLSTLLEGSALGYRLRRGGHVISHLLYMDDLKLFASNNLQLMELLKVTETFSSAIRMEFGLDKCAVMHVKRGEIMESVGTQLSDSIYIRSLCSTETYKYLGMSEALGINAADMKQSLRERFFGRLNKVLNSLLSGGNKVRAFNGWVMPVLMYSFGILKWTQTELDALDRRVRSLLTANRMHHPRSSVMRLYIPRKCGGRGFLNAKTLHNREICSLREYFLKTDVGMHRDVVAVDKGLTPLSLVNENWRKPTVMDTNERRAVWQGKELHGRFYRALHGPDVDLLASVSWLRFGDLFGETEGFVFAIMDEVMMTNNYRKYIVKDGTVDICRACHRPGESIRHIISGCSHLANGDYLHRHNLVARIIHQQLALKYNLVESEVPYYRYVPDPVLENGGVTLYWDRSIITDRTIVANKPDIVVIDRLERRTMIVDIAVPHDENLVKAEKDKQTKYLDLAREVVDMWEVDRAIIVPIVVTANGLIAKSLEQHLRRLSLGSWIKGLIQKAVLLDTARIVRRFLSQEP

SEQ ID NO: 13874 - protein, 1200 aa, Mythimna impura
MLTRSRAREQETHPTSSGSSLSSASQPPGPAPAVSPVIPAAAVASSSSDEYFSPPTTPPPARRRGRGRPPASLRPRGPPASDRVPAAGGSVQRMRWTQSINENVMRSYFGATEGGSNLTAYRGRMLSLFQVLEPTVNVSAQRLSDQVRVIQRNRMLDDAVLDRLRLESQRSRASSATPPAAVQLQPSALPRPDHVGDADDDAAISVSTQCNERLRSALEDAFREYRSTPPGLRPRLPRLPMHKRNRALVCALDSQLSNCFDSSKDLADTHSILYCAAAAACRVAHVKFPNCDRATRPAVPAWQRRIERRIGEARALIGKLICFREGNTRPRVMRFVRRAFLGTDISPQNYLPCVTERIDFLKQKVYAWASRIRRYKRRVERYTQNRTFQSNERWVYRTWERPDQDVTDTRLPDDDAMCSFWRRIWSVPVSHIEVDWIREVERTCDLLPEMGAITISPQDVARAVRPLPNWKSPGPDGLHNFWIQWFQGSHARLASQFQSALESGSLPEFLTTGITHLLHKSGSTADPKNYRPITCLPTVYKVLTSILRAKINTHIETNSIMSASQNGCRNGSRGTKELLLIDMAISQQVRRSRKDLSTCWIDYKKAYDSVPHTWLMRVLELYKVDTTLRTFLMSCMRQWRTVLHYPGCRQIRENSEPIRIERGIFQGDSLSPLWFCLALNPLSTLLEGSGLGYRLKRGGQVISHLLYMDDLKLFAPNNLHLMELLKVTETFSNAIRMEFGVDKCAVMHVKRGEIMESVGTQLSDSIYLRSLCSTETYKYLGMSEALGINAADVKQSLKERFFGRLNRVLKSLLSGGNKVRAFNGWVMPVLMYSFGILKWTQTELDALDRRVRTLLTANRMHHPRSSVMRLYIPRKCGGRGFLNAKTLHNREVCSLREYFLETDVGMHRDVVAVDKGLTPLSLANGNWRKPIILDTNDRREVWQSKELHGRFYRALHGPDVDLLASVSWLRFGDLFGETEGFVCAIMDEVVMTNNYRKYIVKDGTADICRACHRPGESIRHIISGCSHLANGDYLHRHNLVAKIIHQQLALKYNLVESEVPYYKYVPDPVLDNGSITLYWDRSIITDRTIVANKPDIVVIDRLERRTVIVDIAVPHDDNLVKAEKDKQTKYLDLAREVVDMWEVDTAVIVPIVVTANGLISKSLDQHLKRLSLGSWIKGLIQKAVLLDTARIVRRFLSQEP

SEQ ID NO: 13875 - protein, 1200 aa, Mythimna impura
MLTRAAARRARLPPPASSLSSASPPPEPSPTVSAVTPAVAVASSSSDEYFSPPTSPPPARRRRGRRPPSGLGPRGPPASDRIPAPGGSVQRMRWTQSINENVMRAYYGATEGGNNLTAYRVRMLSLFQVLEPAVNVSAQRLSDQVRVIQRNHMLDDTVLDRLRTEMSNHTIAPSSQSVVPVMVPPSYHLSGHVDEEITDMVTHVSTQCNNELRSALECAIREYRNMPLELRPRLPRLPMHNKNKALVAALDLQLSNYFDDCKDLTDTHSIMYCAAVAACRLAHVKFPNCDVATRPKPAVPAWQCRIERRIGGARALIGKLICFREGNTRPRVMRFVRRAFSGTDISPRDYMSRVTEHIDFLKQKVYAWANRIRRYKRRVDRYTQNRTFRSNERWVYRAWERPDQGVTDACLPDDDAMSSFWRSIWSVPVSHTEGDWTREVERACDPIPQMGAIDISPQDVARAVRPLPNWKSPGPDGLHNFWIKWFTRSHARLAYQFQSALESGSLPQFLTTGITHLLHKSGSTAEPKNYRPITCLPTVYKVLTSILRSKINSHIDKNLIMSPSQNGCRNGSRGTKELLLIDMTISQQVRRSRKDLSTCWIDYKKAYDSVPHTWLMRVLELYKIDTTLRTFLMSCMRQWSTVLRYPGCRHTQRNSEPVRIERGIFQGDSLSPLWFCLALNPLSTLLENSGLGYRLKRGGQVISHLLYMDDLKLFAPNNLQLMELLKVTETFSSAIRMEFGVDKCAVMHVKRGEVVESVGTQLTDFINLRSLSPTETYKYLGMSEALGINITDMKQTLKERFFGRLKKVFNSLLSGGNKVRAFNGWVMPVLMYSFGVLKWTQTELDALDRKVRTLLTAYRMHHPRSSVMRLYIPRKCGGRGFLNAKTLHNREVCSLREYFLAADVGMHRDVVTVDKGLTPLSLANENWRKPVVLDTNDRREVWQSKELHGRFFRALHGPDVDQLASVVWLRSGDLFGETEGFVCAIMDEVIMTNNYRRFIVKDGTVDICRACHRPGESIRHIISGCSRLANGEYLHRHNLVARIIHQQLALKYSLVESEVPYYRYEPDPVLDNGHITLYWDRSIITDRTIVANKPDIVVMDRSERRAMIVDISVPHDENLVKAEKDKQIKYIDLAREVVDMWDVDSAIIVPIVVSGNGLIAKSLDQHLRRLALGDWIKGLIQKAVLLDTARIVRRFLSLEP

SEQ ID NO: 13876 - protein, 868 aa, Mythimna impura
MRFVRRAFLGTDISPQNYLPCVTERIDFLKQKVYAWASRIRRYKRRVERYTQNRTFQSNERWVYRTWERPDQDVTDTRLPDDDAMCSFWRRIWSVPVSHIEGDWIREVERTCDLLPEMGAITISPQDVARAVRPLPNWKSPGPDGLHNFWIKWFQGSHARLASQFQSALESGSLPEFLTTGITHLLHKSGSTADPKNYRPITCLPTVYKVLTSILRAKINTHIETNSIMSASQNGCRNGSRGTKELLLIDMVISQQVRRSRKDLSTCWIDYKKAYDSVPHTWLMRVLELYKVDTTLRTFLMSCMRQWRTVLHYPGCRQIWENSEPIRIERGIFQGDSLSPLWFCLALNPLSTLLEGSGLGYRLKRGGQVISHLLYMDDLKLFAPNNLHLMELLKVTETFSNAIRMEFGVDKCAVMHVKRGEIMESVGTQLSDSIYLRSLCLTETYKYLGMSEALGINAADVKQSLKERFFGRLNRVLKSLLSGGNKVRAFNGWVMPVLMYSFGILKWTQTELDALDRRVRTLLTANRMHHPRSSVMRLYIPRKCGGRGFLNAKTLHNREVCSLREYFLETDVGMHRDVVAVDKGLTPLSLANGNWRKPIILDTNDRREVWQSKELHGRFYRALHGPDVDLLASVSWLRFGDLFGETEGFVCAIMDEVVMTNNYRKYIVKDGTADICRACHRPGESIRHIISGCSHLANGDYLHRHNLVAKIIHQQLALKYNLVESEVPYYKYVPDPVLDNGSITLYWDRSIITDRTIVANKPDIVVIDRLERRTVIVDIAVPHDDNLVKAEKDKQTKYLDLAREVVDMWEVDTAVIVPIVVTANGLISKSLDQHLRRLSLGSWIKGLIQKAVLLDTARIVRRFLSQEP

SEQ ID NO: 13877 - protein, 1198 aa, Mythimna impura
MLTRSRAKKANTHPTSSGSSLSSASQPPGPAPTVSPEIPVAAVASSSSDEYFSPPTTPARRRGRGRPPASLGSRGPPASDRVLAAGGSVQRMRWTQSINENVMRSYFGATEGGSNLTAYRGRMLSLFQVLEPAVNVSAQRLSDQVRVIQRNRMLDDAVLDRLRLESRSSRVSPASPQATVQLQSNVSLRPDHVGEDDDDGAISVSNQCNVRLRSALEDAFREYRFTPAELRPRLPRLPMHKKNRALVCALDSQLSNCFDSSEDLTDTHSILYCAAVAACRVARVKFPNSDRVTRPAVPAWQCRIERRIGEARALIGKLICFREGNTRPRVMRFVRRAFSGTDISPRDYLPHITERIDFLKQKVYAWANRIRRYKRRVERYTQNRTFQRNERWVYRAWERPDQGVIDTRLPDDDAMCSFWRSIWSVPVSHTEGDWIREIERTCDLIPEMGAITISPQDVARAVRPLPNWKSPGPDGLHNFWLKWFQRSHARLASQFQSALESGSLPQFLTTGITHLLHKSGSTAEPKNYRPITCLPTVYKVLTSILRAKINSHIETNSIMSASQNGCRNGSRGTKEPLLIDVAISQQVRRSRRDLSTCWIDYKKAYDSVPHTWLMRVLELYKVDATLRTFLMSCMRQWRTALHYPGCRQIRESSEPIRIERGIFQGDSLSPLWFCLALNPLSTLLEGSGLGYRLRRGGHVISHLLYMDDLKLFASNNLQLIELLKVTETFSSAIRMEFGLDKCAVMHVKRGEIMESVGTQLSDSIYIRSLCSTETYKYLGMSEALGINAADMKQSLRERFFGRLNKVLNSLLSGGNKVRAFNGWVMPVLMYSFGILKWTQTELDALDRRVRSLLTANRMHHPRSSVMRLYIPRKCGGRGFLNAKTLHNREICSLREYFLKTDVGMHRDVVAVDKGLTPLSLVNENWRKPTVMDTNERRAVWQGKELHGRFYRALHGPDVDLLASVSWLRFGDLFGETEGFVFAIMDEVMMTNNYRKYIVKDGTIDICRACHRPGESIRHIISGCSHLANGDYLHRHNLVARIIHQQLALKYNLVESEVPYYRYVPDPVLENGGVTLYWDRSIITDRTIVANKPDIVVIDRLERRTMIVDIAVPHDENLVKAEKDKQTKYLDLAREVVDMWEVDRAIIVPIVVTANGLIAKSLEQHLRRLSLGSWIKGLIQKAVLLDTARIVRRFLSQEP

SEQ ID NO: 13878 - protein, 1200 aa, Mythimna impura
MLTRSRAQKLYTHPTSSGSSLSSASQPPGPAPTVSPEIPVAAVASSSSDEYFSPPTTPPPARRRGRGRPPASLGPRGPPASDRVPAAGGSVQRMRWTSSINENVMRSYFGATEGGINLTAYRSRMLSLFQVLEPAVNVSVQRLSDQVRVIQRNRMLDDTVLDRLRLESQSSRVSPATTPAAVQRLPTASPRPVQVGDADDDAAISVSTQCNDRLRGALEDAFREYRSTSPGLRPRLPRLPMHKRNRALVCALDSQLSNCFDSSKDLTDTHSILYCAAVAACRVAHVKFPNCDRATRPAVPAWQCRIEHRIGEARALIGKLICFREGNTRPRVMRFVRRAFSGTDISPRDYLPCVTERIDFLKQKIYAWANRIRRYKRRVERYTRNRTFQSNERWVYRDWERSDQGVTDTRLPDDDAMCSFWRSIWSAPVSHTEGDWIREVERACDLLPEMGAITISPQDVARAVRPLPNWKSPGPDGLHNFWVKWFQRSHARLASQFQSALESGSLPQFLTTGITHLLHKSGSTVEPKNYRPITCLPTVYKVLTSILRAKINSHIETNSIMSASQNGCRNGSRGTKELLLIDIAISQQVRRSRKNLSACWIDYKKAYDSVPHTWLMRVLELYKVDATLRTFLMSCMGQWRTVLHYPGCRQIQENNEPIRIERGIFQGDSLSPLWFCLALNPLSTLLEGSGLGYRLKRGGQVISHLLYMDDLKLFAPNNLQLVELLKVTETFSSAIRMEFGVDKCAVIHVKRGEIMESVGIQLSDSIHLRSLCSTETYKYLGMSESLGINTDDVKQSLKERFFGRLNKVLNSLLSGGNKVRAFNGWVMPVLMYSFGILKWTQTELDALDRRVRTLLTANRMHHPRSSVMRLYIPRKCGGRGFLNAKTLHNREVCSLREYFLKTDVGMHRDVVAVDKGLTPLSLANENWRKPIVLDTNDRREVWQSKELHGRFYRALHGPDIDLLVSVSWLRFGDLFGETEGFVFAIMDEVMMTNNYRKYIVKDGTVDICRACHRPGESIRHIISGCSHLANGDYLHRHNLVARIIHQQLALKYNLVESEVPYYRYVPDPVLDNGNITLYWDRSIITDRTIVANKPDIVVIDRLERRTMIVDIAVPHDENLVKAEKDKQTKYLDLAREVVDMWEVDRAIIVPIVVTANGLIAKSLEQHLRRLSLGSWIKGLIQKAVLLDTARIVRRFLSQEP

SEQ ID NO: 13879 - protein, 974 aa, Phlogophora meticulosa
MLPALRPRLPRLPMHNKNRALVAALDSQLSNYFDNCDDLTDAHSILYCAAVAACRVAHVKFPYDIATRPKPAVPAWQCRIERRIAGARALIGKLVCYREGNTRPRVMRYVRRAFLGTDISPRDYMSRVTERIDFLKQKVYAWASRIRRYKRRVERYTQNRTFQSNERWVYRAWERPVQGVTDTHLPDDDVMCSFWRNIWSVPVSHTEGDWTREVERACDPIPQMGAITISPQDVARAVRPLPNWKSPGPDGLHNFWIKWLQKSHARLASQFQSALETGSLPQFLTTGITHLLHKSGSTAEPKNYRPITCLPTVYKVLTSILRVKINNHIDSNSIMSASQNGCRNGSRGTKELLLIDTAISQQVRRSRKDLSTCWIDYKKAYDSVPHTWLKKVLELYKVDATLRTFLTSCMGQWRTVLRYPGCRQIQRNSEPIRIERGIFQGDSLSPLWFCLALNPLSTLLEDSGLGYRLKRGGQVVSHLLYMDDLKLFAPSDLQLMELLTVTKTFSSAIRMEFGVDKCAVMHVKRGKIVESVGTQLPDFINFRALSPIETYKYLGMSEALGINAADMKQSLKERFFGRLKKVCNSLLSGGNKVRAFNGWVMPVLMYSFGILKWTQTELDALDRRVRTFLTASRMHHPRSSVMRLYIPRKCGGRGFLNAKTLHNREICSLRDYFLETDVEMHRDVVAVDQGLTPLSLAKENWRKPVVLDTNDRKEVWQSKELHGRFFQALHGPDVDQLASVSWLRFGDLFGETEGFVCAIMDEVIMTNNYRRFIVKDGTVDICRACHRPGESIRHIISGCSRLANEEYLHRHNLVARIIHQQLALKYSLVQSEVPYYKYVPDPVLENGSVTLYWDRSIITDRTIVANKPDIVVMDRIERRATIIDVTVPHDGNLVKAEKDKQIKYLDLAREVVDMWDVDSAIVVPIVVSANGLIAKSLDQHLRRLALGSWIKGLIQKAVLLDTARIVRRFLSLEP

SEQ ID NO: 13880 - protein, 1046 aa, Phlogophora meticulosa
MLDDVVLDRLRTEMQSSRVITSPSHTVVPPQYNIVLSSFADGEGSDKVTNVSTQYNEELRSALEGAIREYRFMLPALRPRLPRLPMHNKNRALVAALDSQLSNYFDNCDDLTDAHSILYCAAVAACRVAHVKFPYDIATRPKPAVPAWQCRIERRIAGARALIGKLVCYREGNTRPRVMRYVRRAFLGTDISPRDYMSRVTERIDFLKQKVYAWASRIRRYKRRVERYTQNRTFQSNERWVYRAWERPVQGVTDTHLPDDDVMCSFWRNIWSVPVSHTEGDWTREVERACDPIPQMGAITISPQDVARAVRPLPNWKSPGPDGLHNFWIKWLQKSHARLASQFQSALETGSLPQFLTTGITHLLHKSGSTAEPKNYRPITCLPTVYKVLTSILRVKINNHIDSNSIMSASQNGCRNGSRGTKELLLIDTAISQQVRRSRKDLSTCWIDYKKAYDSVPHTWLKRVLELYKVDATLRTFLTSCMGQWRTVLRYPGCRQIQRNSEPIRIERGIFQGDSLSPLWFCLALNPLSTLLEDSGLGYRLKRGGQVVSHLLYMDDLKLFAPSDLQLMELLTVTKTFSSAIRMEFGVDKCAVMHVKRGKIVESVGTQLPDFINFRALSPIETYKYLGMSEALGINAADMKQSLKERFFGRLKKVCNSLLSGGNKVRAFNGWVMPVLTYSFGILKWTQTELDALDRRVRTFLTASRMHHPRSSVMRLYIPRKCGGRGFLNAKTLHNREICSLRDYFLETDVGMHRDVVAVDQGLTPLSLAKENWRKPVVLDTNDRKEVWQSKELHGRFFQALHGPDVDQLASVSWLRFGDLFGETEGFVCAIMDEVIMTNNYRRFIVKDGTVDICRACHRPGESIRHIISGCSRLANEEYLHRHNLVARIIHQQLALKYSLVESEVPYYKYVPDPVLENGSVTLYWDRSIITDRTIVANKPDIVVMDRIERRATIIDVTVPHDGNLVKAEKDKQIKYLDLAREVVDMWDVDSAIVVPIVVSANGLIAKSLDQHLRRLALGSWIKGLIQKAVLLDTARIVRRFLSLEP

SEQ ID NO: 13881 - protein, 1200 aa, Phlogophora meticulosa
MLTRSAARRARPPPLASSLSSASPPPESSPIVSTVTPAVAIASSSSDEYFSPPTSPPPARRRRGRRPPDSIGPRGPPASDRVPASGGSVQRMRWTQSINENVMRSYYGATEGGTNLTAYRGRMLSLFQMLEPAVNVSAQRLSDQVRVIQRNHMLDDVVLDRLRLNSRIYHVTPALPPVAVQLQSLPSVSPRPDYVGEEDDDAAISVSSQCNVRLRSALEDAFREYRSTPPELRSRLPRLPMHKKNKALMTALDSLLTKSFDNSKDLTDTHSILYCAAAAACRVANVKFPNTERATRPTVPAWQCRIQRRIDEARALIGKLICFREGNTRPRVMRFVRRAFSGTDISSRDYLTRVTERIDFLKQKICAWANRIRRYKRRVERYTQNRTFRSDERWVYRAWERSDQGVTDTCLPDDEAMCSFWRSIWSVPVSHTEGNWTREIERACEPLPEMGAINISPQDVASAVRPLPNWKSPGPDGLHNFWIKWLQSSHARLACQFQSALESGSLPKFLTTGITHLLHKSGSTAEPRNYRPITCLPTVYKVLTSILRSKINNHIDSNLIMSFSQNGCRNGSRGTKELLLIDTAISQQVRRSRKDLSTCWVDYKKAYDSVPHTWLMRVLELYKVDATLRTFLMSCMGQWRTVLRYPGCQQTRENSEPIRIERGIFQGDSLSPLWFCLALNPLSTLLEGSGLGYRLRTGGQVISHLLYMDDLKLFAPNNLQLMELLKVTETFSSAIRMDFGVDKCAVMHVKRGEIVESVGTQLSDSIYLRSLSSTETYKYLGMSEALGINATDMKQSLKERFFGRLNKVLNSLLSGGNKVRAFNGWVMPVLMYSFGILKWTQTELDALDRRVRTLLTANRMHHPRSSVMRLYIPRKCGGRGFLNAKTLHNREICSLREYFLKADVGMHRDVVAVDKTFTPLSLANKNWRKPIVLDTADRMEIWKSKELHGRFYRVLHGPDVDLVASISWLRFGDLFGETEGFVCAIMDEVIMTNNYRKYIVKDGTVDICRACHRPGESIRHIISGCSRLANGDYLHRHNLVARIIHQQLALKYNLVDLEVPYYKYVPDPVLENGSITLYWDRSIITDRTIVANKPDIVVIDRSERRTMIIDITVPHDENLVKAEKEKQMKYLDLAREVVDMWDVNTPVIVPIVVTANGIIAKSLDQHLKRLSLGSWIKGLIQKAVLLDTARIVRRFLSQEP

SEQ ID NO: 13882 - protein, 1198 aa, Phlogophora meticulosa
MLTRSAARRARPPPPASSLSSASSPPKPSTIVSTVKPAVPVASSSSDEYFSPPTSPPPARRRRGRRPPDGLGPRGPPASDRVPAPGGSVQRMRWTQSINENVMRSYYGATEGGSNLTAYRVRMLSLFQVLEPAVNVSAQRLSDQVRVIQRNHMLDDVVLDRLRTEMQSSRVITSPSHTVVPPQYNIVLSSFADAEGSDKVTNVSTQYNEELRSALEGAIREYRFMLPALRPRLPRLPMHNKNRALVAALDSQLSNYFDNCDDLTDAHSILYCAAVAACRVAHVKFPYDIATRPKPAVPAWQCRIERRIAGARALIGKLVCYREGNTRPRVMRYVRRAFLGTDISPRDYMSRVTERIDFLKQKVYAWASRIRRYKRRVERYTQNRTFQSNERWVYRAWERPVQGVTDTHLPDDDVMCSFWRNIWSVPVSHTEGDWTREVERACDPIPQMGAITISPQDVARAVRPLPNWKSPGPDGLHNFWIKWLQKSHARLASQFQSALETGSLPQFLTTGITHLLHKSGSTAEPKNYRPITCLPTVYKVLTSILRVKINNHIDSNSIMSASQNGCRNGSRGTKELLLIDTAISQQVRRSRKDLSTCWIDYKKAYDSVPHTWLKRVLELYKVDATLRTFLTSCMGQWRTVLRYPGCRQIQRNSEPIRIERGIFQGDSLSPLWFCLALNPLSTLLEDSGLGYRLKRGGQVVSHLLYMDDLKLFAPSDLQLMELLTVTKTFSSAIRMEFGVDKCAVMHVKRGKIVESVGTQLPDFINFRALSPIETYKYLGMSEALGINAADMKQSLKERFFGRLKKVCNSLLSGGNKVRAFNGWVMPVLMYSFGILKWTQTELDALDRRVRTFLTASRMHHPRSSVMRLYIPRKCGGRGFLNAKTLHNREICSLRDYFLETDVGMHRDVVAVDQGLTPLSLAKENWRKPVVLDTNDRKEVWQSKELHGRFFQALHGPDVDQLASVSWLRFGDLFGETEGFVCAIMDEVIMTNNYRRFIVKDGTVDICRACHRPGESIRHIISGCSRLANEEYLHRHNLVARIIHQQLALKYSLVESEVPYYKYVPDPVLENGSVTLYWDRSIITDRTIVANKPDIVVMDRIERRATIIDVTVPHDGNLVKAEKDKQIKYLDLAREVVDMWDVDSAIVVPIVVSANGLIAKSLDQHLRRLALGSWIKGLIQKAVLLDTARIVRRFLSLEP

SEQ ID NO: 13883 - protein, 1050 aa, Xestia xanthographa
MLDDTVLDRLRSESRSNLVTPASPMIAVQQQNIPSAPPRSDYNGEEDRDEVISVSTQCNAQLRSALEGAFREYRSTPPELRPRLPRLPMHNKNKALMCALDSQLSNCFDSSKDLADTHSILYCGAVAACRVAHVKFPNNDRATRPKLAVPAWQCRIERRIGEARALIGKLICFREGNTRPRVMRFVRRAFSGTDISFRDYLARVTERIDSLKQKICAWASRIRRYKRRVERYTQNRTFQSDERWVYRAWERPDQSVTDTRLPDDSAMYSFWRNIWSVPVSHTEGDWTREVEQACDPIPEMGAIIISPQDVARAVRPLPNWKSPGPDGLHNFWIKWFQRSHARLASQFQSALESGSLPQFLTTGITHLLHKSGSVAEPKNYRPITCLPTVYKVLTSILRAKINQHIDSNSIMSASQNGCRNGSRGTKELLLIDMAISQQVRRSRKNLSTCWIDYKKAYDSVPHTWLMRVLELYKIDATLRTFLMSCMGHWRTVLRYPGCRQIQGNSEPIRIERGIFQGDSLSPLWFCLALNPLSTLLERSGLGYLLRRDGQVISHLLYMDDLKLFAPNNLQLMKLLKVTETFSSAIRMEFGVDKCAVMHVKRGEIMESVGTQLSDFIHLRSLSSTETYKYLGMSEALGINTADMKQSLRERFFGRLNKVLGSLLSGGNKVRAFNGWVMPVLMYSFGILKWTQTELDALDRRVRTLLTANRMHHPRSSVMRLYIPRKCGGRGFLNAKTLHNREVCSLREYFLEADGEMHRDVVSVDKGLTPLSLANENWRKPKVLDTNDRKVEWQGKELHGRFYRALHGPDVDFLPSVSWLRFGDLFGETEGFICAIMDEVMMTNNYRKYIVKDGTVDICRACHRPGESIRHIISGCSSLANGEYLHRHNLVARIIHQQLALKYNFVESEVPYYKYAPDPVLDNGHITLYWDRPITTDRTVVANRPDIVVIDRLERRTMIVDITIPHDENLVKAEKDKQFKYLDLAREVVDMWDVGTAVIVPIVVSANGLIAKSLDQHLRRLSLGSWIKGLIQKAVLLDTARIVRRFLSQEP

SEQ ID NO: 13884 - protein, 868 aa, Xestia xanthographa
MRFVRQAFSGTDISPRDYMSRVTERIDFLKQKVYAWANRIRRYKRRVDRYTQNRTFQKDERWVYRAWERPDQGVADTHLPDDDAMCSFWRSIWSVPVSHAEGEWTRVIERACDPISEMGAITISPQDVARAVRPLPNWKSPGPDGLHNFWIKWFTRSHACLATLFQSALESGSLPEFLTTGITHLLHKSGSTAEPKNYRPITCLPTVYKVLTSILRTKINKHIDDNSVMSASQNGCRNGSRGTKELLLIDMAISHQVRRSRKDLSTCWIDYKKAYDSVPHTWLMRVLELYKVDATLRTFLMSCMGQWRTVLRYPGCRQIQRNSEPIRIERGIFQGDSLSPLWFCLALNPLSTLLEDSGLGYRLRKDGQVISHLLYMDDLKLFAPNDLRLMELLKVTETFSNAIRMEFGVDKCAVMHVKRGEIVESVGTQLSDSITLRSLSATETYKYLGMSEALGVNVADMKQSLKERFFGRLKKVLNSLLSGGNKVRAFNGWVMPVLMYSFGILKWTQTELDALDTKVRKLLTAYRMHHPRSSVMRLYIPRKCGGRGFLNAKTLHNREICSLREYFLGTDVGMHRDVVTMDLGLTPLSLAKENWRKPPVLDTNDRREVWQSKELHGRFFRALHGPDVDLSASVAWLRSGDLFGETEGFVCAIMDEVMMTNNYRRFIVKDGTVDICRACHRPGESIRHIISGCSRLANGEYLHRHNLVARIIHQQLALKYNLVESEVSYYRYVPDPVLDNGCITLYWDQSIITDRTIVANKPDIVVVDRSERRAMIVDITVPHDENLVKAEKDKQIKYLDLAREVVDMWEVDSAIIVPIVVSAHGLIAKSLDQYLRRLSLGSWIKGLIQKAVLLDTARIVRRFLSLEP

SEQ ID NO: 13885 - protein, 1211 aa, Xestia xanthographa
MSPMLTRHRAKLQKEAHPPSPGSSLSSASQPPGHTTPVSTVSPVAAVASSSSDEFFSPPSTPSPPPRGRRRGRGRPPAGLGPRGQQAPSRVPAAGGNVSRMRWTQSINENVMRAYYGATEGGSNLTAYRGRMLSLFQVLEPAVSVEAQRLSDQVRVIQRNHMLDDTVLDRLRSESRSNRVTPASPMIAVQQQNIPSAPPRSDYDGEEDGDEVISVSTQCNAQLRSALESAFREYRSTPPELRPRLPRLPMHNKNKALMCALDSQLSNCFDSSKDLADTHSILYCGAVAACRVAHVKFPNNDRATRPKLAVPAWQCRIERRIGEARALIGKLICFREGNTRPRVMRFVRRAFSGTDISFRDYLARVTERIDSLKQKICAWASRIRRYKRRVERYTQNRTFQSDERWVYRAWERPDQGVTDTRLPDDNAMCSFWRNIWSVPVSHTEGDWTREVEQACDPIPEMGAIIISPQDVARAVRPLPNWKSPGPDGLHNFWIKWFQRSHARLASQFQSALESGSLPQFLTTGITHLLHKSGSTAEPKNYRPITCLPTVYKVLTSILRAKINQHIDSNSIMSASQNGCRNGSRGTKELLLIDMAISQQVRRSRKNLSTCWIDYKKAYDSVPHTWLMRVLELYKVDATLRAFLMSCMGQWRTVLRYPGCRQIQGNSEPIRIERGIFQGDSLSPLWFCLALNPLSTLLERSGLGYLLRRDGQVISHLLYMDDLKLFAPNNLQLMKLLKVTETFSSAIRMEFGVDKCAVMHVKRGEIMESVGTQLSDSIHLRSLSSTETYKYLGMSEALGINTADMKQSLRERFFGRLNKVLGSLLSGGNKVRAFNGWVMPVLMYSFGILKWTQTELDALDRRVRTLLTANRMHHPRSSVMRLYIPRKCGGRGFLNAKTLHNREVCSLREYFLEADGEMHRDVVSVDKGLTPLSLANENWRKPKVLNTSDRKEEWHGKELHGRFYRALHGPDVDFLASVSWLRFGDLFGETEGFVCAIMDEVMMTNNYRKYIVKDGTVDICRACHRPEESIRHIISGCSSLANGEYLHRHNLVARIIHQQLALKYNLVESEVPYYRYAPDPVLDNGNITLYWDRPITTDRTVVANRPDIVVIDRLERRAMIVDIAVPHDENLVKAEKDKQFKYLDLAREVVDMWDVNTAVIVPIVVSANGLIAKSLDQHLRRLSLGSWIKGLIQKAVLLDTARIVRRFLSQEP

SEQ ID NO: 13886 - protein, 1191 aa, Xestia xanthographa
MLTRSAAARRARLPPPDSSLSSASPPPEPSPIVSAVTPAVAVASSSSDEYFSPPTTPPPARRRGGRRPPDGLGPRGPPASDRVPAPGGSVQRMRWTQSINENVMRAYYGATEGGNNLTAYRVRMLSLFQVLEPAVNVSAQRLSDQVWVIQRNRMLDDTVLDRLRTEIQSNHVIATPSQAVVPPQSSIIPNCDNDVSNDMVTNVSTQCNVEMRSALEGAIREYRFMQPDLRPRIPRLPMHNKNRALVAVLDSQLSNYFDNCEDLTDVHSILYCAAVAACRVAHVKFPSDRATRPKPAVPAWQYRIERRIGGARALIGKLVCFREGNTRPRVMRFVRQAFSGTDISPRDYMSRVTERIDFLKQKVYAWANRIRRYKRRVDRYTQNRTFQKDERWVYRAWERPDQGVADTHLPDDDAMCSFWRSIWSVPVSHAEGEWTRVIERACDPISEMGAINISPQDVARAVRPLPNWKSPGPDGLHNFWIKWFTRSHARLATLFQSALESGSLPEFLTTGITHLLHKSGSTAEPKNYRPITCLPTVYKVLTSILRTKISKHIDDNSVMSASQNGCRNGSRGTKELLLIDMAISHQVRRSRKDLSTCWIDYKKAYDSVPHTWLMRVLELYKVDATLRTFLMSCMGQWRTVLRYPGCRQIQRNSEPIRIERGIFQGDSLSPLWFCLALNPLSTLLEDSGLGYRLRKDGQVISHLLYMDDLKLFAPNDLRLMELLKVTETFSNAIRMEFGVDKCAVMHVKRGEIVESVGTQLSDSITLRSLSATETYKYLGMSEALGVNVADMKQSLKERFFGRLKKVLNSLLSGGNKVRAFNGWVMPVLMYSFGILKWTQTELDALDTKVRKLLTAYRMHHPRSSVMRLYIPRKCGGRGFLNAKTLHNREICSLREYFLGTDVGMHRDVVTMDKGFTPLSLAKENWRKPPVLDTNDRREVWQSKELHGRFFRALHGPDVDLSASVAWLRSGDLFGETEGFVCAIMDEVMMTNNYRRFIVKDGTVDICRACHRPGESIRHIISGCSRLANGEYLHRHNLVARIIHQQLALKYNLVESEVPYYRYVPDPVLDNGCITLYWDQSIITDRTIVANKPDIVVVDRSERRAMIVDITVPHDENLVKAEKDKQIKYLDLAREVVDMWEVDSAIIVPIVVSISPWLNCQEPRSIPEEALVRQLDQGLDSESGTPGHGSYC

SEQ ID NO: 13887 - protein, 1198 aa, Xestia xanthographa
MLTRSAAARRARLPPPDSSLSSASPPPEPSPIVSAVTPAVAVASSSSDEYFSPPTTPPPARRRGGRRPPDGLGPRGPPASDRVPAPGGSVQRMRWTQSINANVMRAYYGATEGGNNLTAYRVRMLSLFQVLEPAVNVSAQRLSDQVRVIQRNRMLDDTVLDRLRTEIQSNHVIATPSQAVVPPQSSIIPNCDNDVSNDMVTNVSTQCNVEMRSALEGAIREYRFMQPDLRPRIPRLPMHNKNRALVAVLDSQLSNYFDNCEDLTDVHSILYCAAVATCRVAHVKFPSDRATRPKPAVPAWQYRIERRIGGARALIGKLVCFREGNTRPRVMRFVRQAFSGTDISPRDYMSRVTERIDFLKQKVYAWANRIRRYKRRVDRYTQNRTFQKDERWVYRAWERPDQGVADTHLPDDDAMCSFWRSIWSVPVSHAEGEWTRVIERACDPISEMGAITISPQDVARAVRPLPNWKSPGPDGLHNFWIKWFTRSHARLATLFQSALESGSLPEFLTTGITHLLHKSGSTAEPKNYRPITCLPTVYKVLTSILRTKISKHIDDNSVMSASQNGCRNGSRGTKELLLIDMAISHQVRRSRKDLSTCWIDYKKAYDSVPHTWLMRVLQLYKVDATLRTFLMSCMGQWRTVLHYPGCRQIQRNSEPIRIERGIFQGDSLSPLWFCLALNPLSTLLEDSGLGYRLRKDGQVISHLLYMDDLKLFAPNDLRLMELLKVTETFSNAIRMEFGVDKCAVMHVKRGEIVESVGTQLSDSITLRSLSATETYKYLGMSEALGVNVADMKQSLKERFFGRLKKVLNSLLSGGNKVRAFNGWVMPVLMYSFGILKWTQTELDALDTKVRKLLMAYRMHHPRSSVMRLYIPRKCGGRGFSNAKTLHNREICSLREYFLGTDVGMHRDVVTMDKGLTPLSLAKENWRKPPVLDTNDRREVWQSKELHGRFFRALHGPDVDLSASVAWLRSGDLFGETEGFVCAIMDEVMMTNNYRRFIVKDGTVDICRACHRPGESIRHIISGCSRLANGEYLHRHNLVARIIHQQLALKYNLVESEVPYYRYVPDPVLDNGCITLYWDQSIITDRTIVANKPDIVVVDRSERRAMIVDITVPHDENLVKAEKDKQIKYLDLAREVVDMWEVDSAIIVPIVVSAHGLIAKSLDQYLRRLSLGSWIKGLIQKAVLLDTARIVRRFLSLEP

SEQ ID NO: 13888 - protein, 1198 aa, Xestia xanthographa
MLTRSAAARRARLPPPDSSLSSASPPPEPSPIVSAVTPAVAVASSSSDEYFSPPTTPPPARRRGGRRPPDGLGPRGPPASDRVPAPGGSVQRMRWTQSINENVMRAYYGATEGGNNLTAYRVRMLSLFQVLEPAVNVSAQRLSDQVRVIQRNRMLDDTVLDRLRTEIQSSHVIATPSQAVVPPQSSIIPNCDNDVGNDMVTNVSTQCNVEMRSALEGAIRQYRFMQPDLRPRIPRLPMHNKNRALVAVLDSQLSNYFDNCEDLTDVHSILYCAAVAACRVAHVKFPSDRATRPKPAVPAWQYRIERRIGGARALIGKLVCFREGNTRPRVMRFVRQAFSGTDISPRDYMSRVTERIDFLKQKVYAWANRIRRYKRRVDRYTQNRTFQKDERWVYRAWERPDQGVADTHLPDDDAMCSFWRSIWSVPVSHAEGEWTRVIERACDPVSEMGAITISPQDVARAVRPLPNWKSPGPDGLHNFWIKWFTRSHARLATLFQSALESGSLPEFLTTGITHLLHKSGSTAEPKNYRPITCLPTVYKVLTSILRTKISKHIDDNSVMSASQNGCRNGSRGTKELLLIDMAISHQVRRSRKDLSTCWIDYKKAYDSVPHTWLMRVLELYKVDATRRTFLMSCMGQWRTVLRYPGCRQIQRNSEPIRIERGIFQGDSLSPLWFCLALNPLSTLLEDSGLGYRLRKDGQVISHLLYMDDLKLFAPNDLQLMELLKVTDTFSSAIRMEFGVDKCAVMHVKRGEIVESVGTQLSDSITLRSLSATETYKYLGMSEALGVNVADMKQSLKERFFGRLKKVFNSLLLGGNKVRAFNGWVMPVLMYSFGILKWTQTELDALDTKVRKLLTAYRMHHPRSSVMRLYIPRKCGGRGFLNAKTLHNREICSLREYFLGTDVGMHRDVVTVDKGLTPLSLAKENWRKPPVLDTNDRREVWQSKELHGRFFRALHGPDVDLPASVAWLRSGDLFGETEGFVCAIMDEVMMTNNYRRFIVKDGTVDICRACHRPGETIRHIISGCSRLANGEYLHRHNLVARIIHQQLALKYNLVESEVPYYRYVPDPVLDNGCITLYWDQSIITDRTIVANKPDIVVVDRSERRAMIVDITVPHDENLVKAEKDKQIKYLDLAREVVDMWEVDSAIIVPIVVSAHGLIAKSLDQYLRRLSLGSWIKGLIQKAVLLDTARIVRRFLSLEP

SEQ ID NO: 13889 - protein, 1077 aa, Cosmia trapezina
MHSLFQVLEPALNVSAQRLSDQVRVIQRNHMLDDTVLDRLRNEMQSSRVIAPLSQTIVAPPPPQCNTTQADEGSDGTAANVSTQCNEELRSALEGAIQEYRFVSPELRPRLPRLPMHNKNRALVAALDSQLSNYFDDCEDLTDTHSILYCAAVAACRVAHVKFANDSRATRPKPAVPAWQCRIERRIGGARALIGKLICFREGNTRPRVMRFVRRAFSGTDVSPQDYMSRVTERIDFLRQKVYAWANRIRRYKRRVDRYTQNRTFQSDERWVYRGWERPDQGVTDTRLPDDDTMCSFWRSIWSVPVSHTEGDWAREVRRACDPIPEMGAITICPQDVARAVRPLPNWKSPGPDGLHNFWIKWFLGSHACLAAQYQSALQSGSLPQFLTTGITHLLHKSGSTTEPKNYRPITCLPTVYKVLTSILRAKINEHIDTNSIMSASQNGSRNGSRGTKELLLIDMAISQQVRRSRRDLSTCWIDYKKAYDSVPHTWLMRVLELYKVDATLRTFLMSCMGQWRTVLRYPGCRNIQRNSEPIRIERGIFQGDSLSPLWFCLALNPLSTLLEDSGLGYRLRRGGQVISHLLYMDDLKLFAPSSLQLMELLKVTETFSSAIRMEFGVDKCAVMHVKRGEIVESVGTQLPDSINLRTLSAAETYKYLGMSEALGINVADMKQSLKERFFGRLKKVFNSLLSGGNKVRAFNGWVMPVLMYSFGILKWTQTELDALDRRVRTLLTAYRMHHPRSSVMRLYIPRKCGGRGFLNAKTLHNREICSLREYFLETDVGMHRDVVAVDKGLTPLSLAKENWRKPVVLDANDRMEVWQSKELHGRFFRALHGPDVNLLASVAWLRSGDLFGETEGFVCAIMDEVIMTNNYRRFIVKDGTVDICRACHRPGESIRHIISGCSRLANEEYLHRHNLVARIIHQQLALKYSLVESEVPYYRYVPDPVLENGHITLYWDRSIITDRTIVANKPDIVVVDRTERRAMIVDITVPHDGNLVKAEKDKQIKYIDLAREVVDMWDVDSAVIVPIVVSANGLIAKSLDQHLRRLSLGSWIKGLIQKAVLLDTARIVRRFLSLEP

SEQ ID NO: 13890 - protein, 1200 aa, Cosmia trapezina
MLTRSATRKARLPPPDSSLSSASPPPVPSLTVSAVSTPAAVVASSSSDEYFSPPTTPPPARRRGGRRPPDGLGPRGPPASDRVPAPGGSVQRMRWTRAINENVMRSYYGATEGGNNLTAYRVRMHSLFQVLEPALNVSAQRLSDQVRVIQRNHMLDDTVLDRLRNEMQSSRVIAPLSQTIVAPPPPQCNTTQADEGSDGTAANVSTQCNEELRSALEGAIQEYRFVSPELRPRLPRLPMHNKNRALVAALDSQLSNYFDDCEDLTDTHSILYCAAVAACRVAHVKFANDSRVTRPKPAVPAWQCRIERRIGGARALIGKLICFREGNTRPRVMRFVKRAFSGTDVSPQDYMSRVTERIDFLRQKVYAWANRIRRYKRRVDRYTQNRTFQSDERWVYRGWERPDQGVTDTRLPDDDAMCSFWRSIWSVPVSHTEGDWAREVRRACDPIPEMGAITICPQDVARAVRPLPNWKSPGPDGLHNFWIKWFLGSHARLAAQYQSALQSGSLPQFLTTGITHLLHKSGSTTEPKNYRPITCLPTVYKVLTSILRAKINEHIDTNSIMSASQNGSRNGSRGTKELLLIDMAISQQVRRSRRDLSTCWIDYKKAYDSVPHTWLMRVLELYKVDATLRTFLMSCMGQWRTVLRYPGCRNIQRNSEPIRIERGIFQGDSLSPLWFCLALNPLSTLLENSGLGYRLRRGGQVISHLLYMDDLKLFAPSNLQLMELLKVTETFSSAIRMEFGVDKCAVMHVKRGEIVESVGTQLPDSINLRTLSAAETYKYLGMSEALGINVADMKQSLKERFFGRLKKVFNSLLSGGNKVRAFNGWVMPVLMYSFGILKWTQTELDALDRRVRTLLTAYRMHHPRSSVMRLYIPRKCGGRGFLNAKTLHNREICSLREYFLETDVGMHRDVVAVDKGLTPLSLAKENWRKPVVLDANDRMEVWQSKELHGRFFRALHGPDVNLLASVAWLRSGDLFGETEGFVCAIMDEVIMTNNYRRFIVKDGTVDICRACHRPGESIRHIISGCSRLANEEYLHRHNLVARIIHQQLALKYSLVESEVSYYRYVPDPVLENGHITLYWDRSIITDRTIVANKPDIVVVDRTERRAMIVDITVPHDGNLVKAEKDKQIKYIDLAREVVDMWDVDSAVIVPIVVSANGLIAKSLDQHLRRLSLGSWIKGLIQKAVLLDTARIVRRFLSLEP

SEQ ID NO: 13891 - protein, 962 aa, Cosmia trapezina
MHNKNRALVAALDSQLSNYFDDCEDLTDTHSILYCAAVAACRVAHVKFSNDSRATRPKPSVPAWQCRIERRIGGARALIGKLICFREGNTRPRVMCFVRRAFSGTDVNPQDYMSRITERIDFLKQKVYAWANRIRRYKLRVDRYTQNRTFQSDERWVYRSWERPDQGVADTPLPDDDAMCSFWRSIWSVPVNHTEGDWTGRIERTCDQIPQMGALTISPQDVARAVRPLPNWKSPGPDGLHNFWIKWFQRSHVRLASQFRSALQSGSLPQFLTTGITHLLHKSGSTAEPKNYRPITCLPTVYKVLTSILRAKINEHVDTNSIMSASQNGCRNGSRGTKELLLIDMAISQQVRRSRKDLSTCWIDYKKAYDSVPHTWLMRVLELYKVDATLRTFLMSCMGQWRTVLRYPGCRNIQRNSEPIRIERGIFQGDSLSPLWFCLALNPLSTLLEDSGLGYRLRRGGQVISHLLYMDDLKLFAPNNLQLMELLKVTETFSSAIRMEFGVDKCAVMHVKRGEIMESVGTQLSDSINLRALSASETYKYLGMSEALGINVTDMKQSLRERFFGRLRKVFNSLLSGGNKVRAFNGWVMPVLMYSFGILKWTQTELDALDRRVRTLLTAYRMHHPRSSVMRLYIPRKCGGRGFLNAKTLHNREICSLREYFLEADVGMHRDVVAVDKGLTPLSLAKENWRKPVVLDTNDRREVWQSKELHGRFFRVLHEPDVDFLASVAWLRSGDLFGETEGFVCAIMDEVMMTNNYRKYIVKDGTVDICRACHRPGESIRHIISGCSRLANEEYLHRHNLVAKIIHQQLALKYSLVESEVQYYRYVPDPVLENGNITLYWDRSIITDRTIVANKPDIVVVDRTERRAMIIDITVPHDGNLVKAEKDKQIKYLDLAREVVDMWDVNSAIIVPIVVSANGLIAKSLDQHLRRLSLGSWIKGLIQRAVLLDTARIVRRFLSLEP

SEQ ID NO: 13892 - protein, 1205 aa, Cosmia trapezina
MLTRSRAQHLRNTHPTSSGSSLSSASQLPEPAPDVSQVIPAAAVASSSSDEYFSPPTTPPPVRRRGRGRPPASLGPRGPPASDRVPAAGGSVQRMRWTQTVNENVMRAYFGATEGGSNLTAYRGRMLSLFQVLEPAVNVSAQRLSDQVRVIQRNHMLDDVVLDRLRLESRNSRVTSDSPMVAVQLQNLPSASPRPDRVGEEDDSGAISVSSQCNVQLRSALEDAFREYRSAPPGLRPRLPRLPMHKKNKALVCALDSQLSNCFDGSKDLADTHSILYCAAVAACRVAHVKFHNNDRVTRPKPAVPTWQCRIERRIGEARALIGKLICFREGNTRPRVMRFVRRPFSGMDISPRDYLTCVTERIDFLKQKICAWANRIRRYRRRVERYTQNRTFQSDERWVYRAWERPDQGVADTRLPDDDAMCSFWRSIWSVPVSHTEGDWTREVERACDHIPKMGALTISPQDVARAVRPLPNWKSPGPDGLHNFWIKWFQRSHARLASQFQSALQSGSLPQFLTTGITHLLHKSGSTAEPINYRPITCLPTVYKVLTSILRAKINKHIDTNSIMSASQNGCGNGSRGTKELLLIDMTINQQVRRSRKDLSTCWIDYKKAYDSVPHTWLMRVLELYKIDATLRTFLMSCMGQWRTVLRYPGCRNIQRNSEPIRIERGIFQGDSLSPLWFCLALNPLSTLLEDSGLGYRLRRGGQVISHLLYMDDLKLFAPNNLQLMELLKVTETFSSAIRMEFGVDKCAVMHVKRGEIVESVRTQLSDSIHLRSLSSLETYKYLGMSEALGINAADMKQSLRERFFGRLNKVLNSLLSGGNKVRAFNGWVMPVLMYSFGILKWTQTELDALDRRVRTLLTANRMHHPRSSVMRLYIPRKCGGRGFLNAKTLHNREVCSLREYFLEADVGMHREVVSVDKGLTPLSLANENWRKPIVLDTNDRREVWQSKELHGRFYRVLHGPDVDFLASVSWLRFGDLFGETEGFVFAIMDEVMMTNNYRKYIVKDGTVDICRACHRPGESIRHIISGCSRLANGDYLHRHNLVARIIHQQIALKYSLVESEVPYYRYVPDPVLENGNITLYWDRSIITDRTIVANKPDIVVIDRLERRTVIVDIAVPHDENLVKAEKDKQIKYLDLAREVVDMWDVDTAIIVPIVVTANGIIAKSLDQHLRRLSLGGWIKGLIQKAVLLDTARIVRRFLSQQP

SEQ ID NO: 13893 - protein, 1197 aa, Mamestra brassicae
MLTRSRARHLATHPSPSASSLSSASPPPEPSPTVSAVTPAVAVASSSSDEYFSPPTTPPPARRRRGRRPPDGLGPRGPPASDRVPAPGGSVQRMRWTQPINENVMRSYFGATEGGTNLTAYRGRMLSLFQVLEPAVNVSAQRLSDQVRVIQRNRMLDDSVLDRLRMEMCGHVITPPSQTVAPPQSQISSHADEESNDRVTNVSTQCNEELRSALECAIREYRYIPPELRPRLPRLPMHNKNRALVAALDSQLSNYFDDCEDLTDTHSIMYCAAVAACRVAHVKMTNDRVTRPKPAVPAWQCRIERRIGGARALIGKLICFREGNTRPRVMRFVRRAFSGTDISPRDYMSRVTERIDFLKQKVYAWANRIRRYRRRVERYTQNRTFRSNERWVYRVWEQPDQGVTDTRLPDDDAMCSFWRNIWSVPVSHTEGGWIREVERACDPLPEMGAITISPQDVARAVRPLPNWKSPGPDGLHNFWIKWLQRSHARLASQYQTALESGSLPEFLTTGVTHLLHKSGSTAEPKNYRPITCLPTVYKVLTSILRAKINNHINSNNIMSVSQNGCRNGSRGTKELLLIDMAISQQVRRSRKDLSTCWIDYKKAYDSVPHTWLMRVLELYKIDTMLRTFLMSCMGQWRTVLRYPGCRNIQRNSEPVRIERGIFQGDSLSPLWFCLALNPLSTLLENSGLGYRLKRGGQVISHLLYMDDLKLFAPSNLQLMELLKVTETFSSAIRMEFGVDKCAVMHVKRGEIMESVGTQLSDSINLRSLSSTETYKYLGMSEALGINVTDMKQSLRERFFGRLKKVFNSLLSGGNKVRAFNGWVMPVLMHSFGVLKWTQTELDALDRRVRTLLTAYRMHHPRSSVMRLYIPRKCGGRGFLNAKTLHNREICSLREYFLAVDVGMHRDVVTVDKGLTPLSLANENWRKPAVLDTNDRRAVWQSKELHGRFFRALHGPDVDQLASVAWLRFGDLFGETEGFVCAIMDEVIMTNNYRRFIVKDGTVDICRACHRPGESIRHIVSGCSRLANGEYLHRHNLVARIIHQQLALKYSLVESEVPYYRYAPDPVLDNGNITLYWDRSIITDRTIVANKPDIVVVDRIERRAMIVDITVPHDENLVKAEKDKQIKYIDLAREVVDMWDVDSAIIVPIVVSANGLIATSLDQHLRRLSLGSWIKGLIQKAVLLDTARIVRRFLSLEP

SEQ ID NO: 13894 - protein, 1198 aa, Mamestra brassicae
MLTRAAAQRARLPPPASSLSSASPPPEPSPTVSAVIPAVAVASSSSDEYFSPPTSPPPARRRRGRRPPDGLGPRGPPASDRVPAPGGSVQRMRWTQTINENVMRSYYGATEGGTNLTAYRGRMLSLFQVLEPAVNVSAQRLSDQVRVIQRNRMLDDAVLDRLRLESRNGRVSAASPPAAVQIQFSVSPRPNIVGEDDDDGAISVSTQCNERLRSALEDAFREYRSTPPELRPRLPRLPMHNKNKALVCALDSQLANCFDSSEDLADTHSILYCAAAAACRVAHVKFPNSDRATRPAVPAWQCRIERRIGEARALIGKLICFREGNTRRRVMRFVRRAFSGTDTSPRDYLTRVTERIDFLKQKIYAWANRIRRYKRRVERYTQNRTFQSNERWVYRAWERPDQGVTDTRLPDDDVMCSFWRNIWSVPVSHTEGDWTREVERACDPIPEMGAITISPQDVARAVRPLPNWKSPGPDGLHNFWIKWFKKSHARLASQFQSALESGSLPQFLTTGITHLLHKSGSTAEPKNYRPITCLPTVYKVLTSILRAKINQHIETNSIMSASQNGCRNRSRGTKELLLIDVAISQQVRRSRRDLSTCWIDYKKAYDSVPHTWLMRVLELYKVDAVLRTFLMSCMGQWRTVLRYPGCRQIQANSDPIRIERGIFQGDSLSPLWFCLALNPLSTLLEGSGQGYRLRRGGQVISHLLYMDDLKLFAPNNLQLMKLLKVTETFSSAISMEFGVDKCAVMHVKRGEIMESVGTQLSDSIHLRSLSSTETYKYLGMSEALGINANDVKQSLKERFFGRLNKVLNSLLSGGNKVRAFNGWVMPVLMYSFGILKWTQTELDALDRRVRSLLTANRMHHPRSSVMRLYIPRKCGGRGFLNAKTLHNREICSLREFFLEADVGMHRDVVAVDKGLTALSLANENWRKPVVLDTNDRREVWQSKELHGRFYRVLHGPDVDFLASVAWLRFGDLFGETEGFVCAIMDEVMMTNNYRKYIVKDGTVDICRACHRPGESIRHIISGCSSLANGDYLHRHNLVARIIHQQLALKYNLVESEVPYYRYVPDPVLENGNCTLYWDRSIITDRTIIANKPDIVVIDRLERRAMIVDIAVPHDVNLVKTEKDKQTKYLDLAREVVDMWDVNTAVIVPIVVTANGIIAKSLDQHLKRLSLGSWIKGLIQKAVLLDTARIVRRFLSQGP

SEQ ID NO: 13895 - protein, 1198 aa, Mamestra brassicae
MLTRAAAQRARLPPPASSLSSASPPPEPSPTVSAVIPAVAVASSSSDEYFSPPTSPPPARRRRGRRPPDGLGPRGPPASDRVPAPGGSVQRMRWTQTINENVMRSYYGATEGGTNLTAYRGRMLSLFQVLEPAVNVSAQRLSDQVRVIQRNRMLDDAVLDRLRLESRNGRVSAASPPAAVQIQFSVSPRPNIVGEDDDDGAISVSTQCNERLRSALEDAFREYRSTPPELRPRLPRLPMHYKNRALVCALDSQLANCFDSSEDLADTHSILYCAAAAACRVAHVKFPNSDRATRPAVPAWQCRIERRIGEARALIGKLICFREGNTRRRVMRFVRRAFSGTDTSPRDYLTRVTERIDFLKQKIYAWANRIRRYKRRVERYTQNRTFQSNERWVYRAWERPDQGVTDTRLPDDDVMCSFWRNIWSVPVSHTEGDWTREVERACDPIPEMGAITISPQDVARAVRPLPNWKSPGPDGLHNFWIKWFKRSHARLASQFQSALESGSLPQFLTTGITHLLHKSGSTAEPKNYRPITCLPTVYKVLTSILRAKINQHIETNSIMSASQNGCRNRSRGTKELLLIDVAISQQVRRSRRDLSTCWIDYKKAYDSVPHTWLMRVLELYKVDAVLRTFLMSCMGQWRTVLRYPGCRQIQANSDPIRIERGIFQGDSLSPLWFCLALNPLSTLLEGSGQGYRLRRGGQVISHLLYMDDLKLFAPNNLQLMKLLKVTETFSSAISMEFGVDKCAVMHVKRGEIMESVGTQLSDSIHLRSLSSTETYKYLGMSEALGINANDVKQSLKERFFGRLNKVLNSLLSGGNKVRAFNGWVMPVLMYSFGILKWTQTELDALDRRVRSLLTANRMHHPRSSVMRLYIPRKCGGRGFLNAKTLHNREICSLREFFLEADVGMHRDVVAVDKGLTALSLANENWRKPVVLDTNDRREVWQSKELHGRFYRVLHGPDVDFLASVAWLRFGDLFGETEGFVCAIMDEVMMTNNYRKYIVKDGTVDICRACHRPGESIRHIISGCSSLANGDYLHRHNLVARIIHQQLALQYNLVESEVPYYRYVPDPVLENGNCTLYWDRSIITDRTIIANKPDIVVIDRLERRAMIVDIAVPHDVNLVKTEKDKQTKYLDLAREVVDMWDVNTAVIVPIVVTTNGIIAKSLDQHLKRLSLGSWIKGLIQKAVLLDTARIVRRFLSQGP

SEQ ID NO: 13896 - protein, 961 aa, Mamestra brassicae
MHNKNRALVAALDSQLSKYFDDCEDFTDTHSIMYCAAVAACRVAHVKMTNDRVTRPKPAVPAWQCRIERRIGGARALIGKLICFREGNTRPRVMRFVRRAFSGTDISPRDYMSRVTERIDFLKQKVYAWANRIRRYRRRVERYTQNRTFRSNERWVYRVWEQPDHGVTDTRLPDDDAMCSFWRNIWSVPVSHTEGDWIREVERACDPLPEMGAITISPQDVARAVRPLPNWKSPGPDGLHNFWIKWLQRSHGRLASQYQSALESGSLPKFLTTGVTHLLHKSGSTAEPKNYRPITCLPTVYKVLTSILRAKINNHINSSNIMSVSQNGCRNGSRGTKELLLIDMAISQQVRRSRKDLSTCWIDYKKAYDSVPHTWLRRVLELYKIDTMLRTFLMSCMGQWRTVLRYPGCRNIQRNSEPVRIERGIFQGDSLSPLWFCLALNPLSTLLENSGLGYRLKRGGQVISHLLYMDDLKLFAPSNLQLMELLKVTETFSSAIRMGFGVDKCAVMHVKRGEIMESVGIQLSDSINLRSLSSTETYKYLGMSEALGINVTDMKQSLKERFFGRLKKVFNSLLSGGNKVRAFNGWVMPVLMYSFGVLKWIQTELDALDRRVRTLLTAYRMHHPRSSVMRLYIPRKCGGRGFLNAKTLHNREICSLREYFLAVDVGIHRDVVAVDKGLTPLSLANENWRKPAVLDTDDRRAVWQSKELHGRYFRALHGPDVDQLASVAWLRFGDLFGETEGFVCAIMDEVIMTNNYRRFIVKDGTVDICRACHRPGESIRHIVSGCSRLANGEYLHRHNLVARIIHQQLALKYSLVESEVPYYRYVPDPVLDNGNITLYWDRSIITDRTIVANKPDIVVVDRIERRAMIVDITVPHDENLVKAEKDKQIKYIDLAREVVDMWDVDSAIIVPIVVSANGLIATSLDQHLRRLSLGSWIKGLIQKAVLLDTARIVRRFLSLEP

SEQ ID NO: 13897 - protein, 1197 aa, Mamestra brassicae
MLTRSRARHLATHPSPSASSLSSASPPPEPSPTVSAVTPAVAVASSSSDEYFSPPTTPPPARRRRGRRPPDGLGPRGPPASDRVPAPGGSVQRMRWTQSINENVMRSYFGATEGGTNLTAYRGRMLSLFQVLEPAVNVSAQRLSDQVRVIQRNRMLDDSVLDRLRMEMCGHVITPPSQTVAPPQSQISSHADEESNDRVTNVSTQCNEELRSALECAIREYRYIPPELRPRLPRLPMHNKNRALVAALDSQLSNYFDDCEDLTDTHSIMYCAAVAACRVAHVKMTNDRVTRPKPAVPAWQCRIERRIGGARALIGKLICFREGNTRPRVMRFVRRAFSGTDISPRDYMSRVTERIDFLKQKVYAWANRIRRYRRRVERYTQNRTFRSNERWVYRVWEQPDQGVTDTRLPDDDAMCSFWRNIWSVPVSHTEGGWIREVERACDPLPEMGAITISPQDVARAVRPLPNWKSPGPDGLHNFWIKWLQRSHARLASQYQTALESGSLPEFLTTGVTHLLHKSGSTAEPKNYRPITCLPTVYKVLTSILRAKINNHINSNNIMSVSQNGCRNGSRGTKELLLIDMAISQQVRRSRKDLSTCWIDYKKAYDSVPHTWLIRVLELYKIDTMLRTFLMSCMGQWRTVLRYPGCRNIQRNSEPVRIERGIFQGDSLSPLWFYLALNPLSTLLENSGLGYRLKRGGQVISHLLYMDDLKLFAPSNLQLMELLKVTETFSSAIRMKFGVDKCAVMHVKRGEIMESVGTQLSDSINLRSLSLTETYKYLGMSEALGINVTDMKQSLRERFFGRLKKVFNSLLSGGNKVRAFNGWVMPVLMHSFGVLKWTQTELDALDRRVRTLLTAYRMHHPRSSVMRLYIPRKCGGRGFLNAKTLHNREICSLREYFLAVDVGMHRDVVTVDKGLTPLSLANENWRKPAVLDTNDRRAVWQSKELHGRFFRALHGPDVDQLASVAWLRFGDLFGETEGFVCAIMDEVIMTNNYRRFIVKDGTVDICRACHRPGESIRHIVSGCSRLANGEYLHRHNLVARIIHQQLALKYSLVESEVPYYRYAPDPVLDNGNITLYWDRSIITDRTIVANKLDIVVVDRIERRAMIVDITVPHDENLVKAEKDKQIKYIDLAREVVDMWDVDSAIIVPIVVSANGLIATSLDQHLRRLSLGSWIKGLIQKAVLLDTARIVRRFLSLEP

SEQ ID NO: 13898 - protein, 1198 aa, Noctua fimbriata
MLTRSAARRARLSPPDPSLSSASPPPESSPVVSAVTPAVAVASTSSDEYFSPPTTPPPVRRRGGRRPPDGLGPRGPPASDRVPAPGGSVQRMRWTQSINANVMRAYYGATEGGNNLTAYRVRMLSLFQVLEPAVNVSAQRLSDQVRVIQRNRMLDDTVLDRLRTEMQSSHVIATPPPQAVVPPQSTIIPNRDNDVSNDIVTNVSTQCNEEMRSALEGAIREYRFMQPDLRPRIPRLPMHNKNRALVAVLDSQLSNYFDNCEDLTDAHSILYCAAVAACRVAHVKFSDDRATRPKPAVPPWQYRIERRIGGTRALIGKLICFREGNTRPRVMRFVRRAFSGTDISPRDYMSRITERIDFLKQKVYAWANRIRRYKRRVDRYTQNRTFQRDERWVYRAWERPDQGVADTRLPDDDAMCSFWRSIWSVPVSHTEGEWTQGVERACDLVPEMGAITISPQDVVRAVRPLPNWKSPGPDGLHNFWIKWFTRSHARLAILFQSALESGSLPEFLTTGITHLLHKSGSTAEPKNYRPITCLPTVYKVLTSILRAKINKHIDANSIMSASQNGCRNGSRGTKELLLIDMAISQQVRRSRSDLSTCWIDYKKAYDSVPHTWLMRVLELYKVDATLRTFLMSCMGQWRTVLRYPGCRQIQRNSEPIRIERGIFQGDSLSPLWFCLALNPLSTLLEDSGLGYRLRRGGQVISHLLYMDDLKLFAPNDLQLMELLKVTETFSSAIRMEFGVDKCAVMHVKRGEIVESVGTQLSDSINLRSLSATETYKYLGMSEALGINVADMKQSLKERFFGRLKKVFNSLLSGGNKVRAFNGWVMPVLMYSFGILKWTQTELDALDRRVRTLLTAYRMHHPRSSVMRLYIPRKCGGRGFLNAKTLHNREICSLREYFLETDVGMHRDVVAVDKGLTPLSLAKENWRKPLVLDTNDRMEVWQSKELHGRFFRALHGPDVDLSASVAWLRSGDLFGETEGFVCAIMDEVMMTNNYRRFIVKDGTVDICRACHRPGESIRHIISGCSRLANGEYLHRHNLVARIIHQQLALKYNLVESEVPYYKYVPDPVLENGSITFYWDQSIFTDRTIVANKPDIVVVDRSERRTMIVDITVPHDENLVKAEKDKKIKYLDLAREVVDMWDVDSAIIVPIVVSAHGLIAKSLDQYLRRLSLGSWIKGLIQKAVLLDTARIVRRFLSLEP

SEQ ID NO: 13899 - protein, 1197 aa, Noctua fimbriata
MLTRAAAKRARLSPPDPSLSSASPPPESSPVVSAVTPAVAVASSSSDEYFSPPTTPPPVRRRGGRRPPDGLGPRGPPASDRVPAPGGSVQRMRWTQSINENVMRSYYGATEGGNNLTAYRVRMLSLFQVLEPAVNVSAQRLSDQVRVIQRNRMLDDTVLDRLRTETQSSHVITPSAQAVVLPQSSTIPNRDNDVSNDMVTNVSTQCNEEMRSALEGAIREYRFMQPDLRPRIPRLPMHNKNRALVAVLDSQLSNYFDNCEDLTDAHSILYCAAVAACRIAHVKFSDDRATRPKPAVPPWQYRIERRIGGARALIGKLICFREGNTRPRVMRFVRRAFSGTDISPRDYMSRITERIDFLKQKVYAWASRIRRYKRRVDRYTQNRTFQRDERWEYRTWERPDQGVADTRIPDDDAMCSFWRSIWSVPVSHTEGEWTREVERACDLVPEMGAITISPQDVVRAVRPLPNWKSPGPDGLHNFWIKWFTRSHARLAILFQSALESGSLPEFLTTGITHLLHKSGSTAEPKNYRPITCLPTVYKVLTSILRAKINKHIDDNSIMSASQNGCRNGSRGTKELLLIDMAISQQVRRSRRDLSTCWIDYKKAYDSVPHTWLMRVLELYKVDATLRTFLMSCMGQWRTVLRYPRCWQIQRNSEPIRIERGIFQGDSLSPLWFCLALNPLSTLLEDSGLGYQLRRGGQVISHLLYMDDLKLFAPNDLQLMELLKVTETFSSAIRMEFGVDKCAVMHVKRGEIVESVGTQLSDSINLRSLSATETYKYLGMSEALGINVADMKQSLKERFFGRLKKVFNSLLSGGNKVRAFNGWVMPVLMYSFGILKWTQTELDALDRRVRTLLTAYRMHHPRSSVMRLYIPRKCGGRGFLNAKTLHNREICSLREYFLETDVGMHRDVVAMDKGLTPLSLAKENWRKPLVLDTNDRMEVWQSKELHGRFFRALHGPDVDLSASVAWLRSGDLFGETEGFVCAIMDEVMMTNNYRRFIVKDGTVDICRACHRPGESIRHIISGCSRLANGEYLHRHNLVARIIHQQLALKYNLVESEVPYYKYVPDPVLENGSITLYWDQSIITDRTIVANKPDIVVVDRSERRTMIVDITVPHDENLVKAEKDKKIKYLDLAREVVDMWDVDSAIIVPIVVSAHGLIAKSLDQYLRRLSLGSWIKGLIQKAVLLDTARIVRRFLSLEP

SEQ ID NO: 13900 - protein, 1198 aa, Noctua fimbriata
MLTRAAAKRARLSPPDPSLSSASPPPESSPVMSAVTPAVAVASSSSDEYFSPPTTPPPVRRRGGRRPTDGLGPRGPPASDRVPAPGGSVQRMRWTQSINENVMRSYYGATEGGNNLTAYRVRMLSLFQVLEPAVNVSAQRLSDQVRVIQRNRMLDDTVLDRLRTEMQSSHVIATPPPQAVVPPQSTIIPNRDNDVSNDIVTNVSTQCNEEMRSALEGAIREYRFMQPDLRPRIPRLPMHNKNRALVAVLDSQLSNYFDNCEDLTDAHSILYCAAVAACRVAHVKFSNDRATRPKPAVPPWQYRIERRIGGARALIGKLICFREGNTRPRVMRFVRRAFSGTDISPRDYMSRITERIDFLKQKVYAWANRIRRYKRRVDRYTQNRTFQRDERWVYRAWERPDQGVADTRLPDDDAMCSFWRSIWSVPVSHTEGEWTQGVERACDLVPEMGAITISPQDVVRAVRPLPNWKSPGPDGLHNFWIKWFTRSHARLAILFQSALESGSLPEFLTTGITHLLHKSGSTAEPKNYRPITCLPTVYKVLTSILRAKINKHIDDNSIMSASQNGCRNGSRGTKELLLIDMAISQQVRRSRRDLSTCWIDYKKAYDSVPHTWLMRVLELYKVDATLRTFLMSCMGQWRTVLRYPGCRQIQRNSEPIRIERGIFQGDSLSPLWFCLALNPLSTLLEDSGLGYRLRRGGQVISHLLYMDDLKLFAPNDLQLMEPLKVTETFSSAIRMEFGVDKCAVMHVKRGEIVESVGTQLSDSINLRSLSATETYKYLGMSEALGINVADMKQSLKERFFGRLKKVFNSLLSGGNKVRAFNGWVMPVLMYSFGILKWTQTELDALDRRVRTLLTAYRMHHPRSSIMRLYIPRKCGGRGFLNAKTLHNREICSLREYFLETDVGMHRDVVAVDKGLTPLSLAKENWRKPLVLDTNDRMEVWQSKELHGRFFRALHGPDVDLSASVAWLRSGDLFGETEGFVCAIMDEVMMTNNYRRFIVKDGTVDICRACHRPGESIRHIISGCSRLANGEYLHRHNLVARIIHQQLALKYNLVESEVPYYKYVPDPVLENGSITLYWDQSIITDRTIVANKPDIVVVDRSERRTMIVDITVPHDENLVKAEKDKKIKYLDLAREVVDMWDVDSAIIVPIVVSAHGLIAKSLDQYLRRLSLGSWIKGLIQKAVLLDTARIVRRFLSLEP

SEQ ID NO: 13901 - protein, 1198 aa, Noctua fimbriata
MLTRSAARRARLSPPDPSLSSASPPPESSPVVSAVTPAVAVASSSSDEYFSPPTTPPPVRRRGGRRPPDGLGPRGPPASDRVPAPGGSVQRMRWTQSINANVMRAYYGATEGGNNLTAYRVRMLSLFQVLEPAVNVSAQRLSDQVRVIQRNRMLDDTVLDRLRTEMQSSHVIATPPPQAVVPPQSTIIPNRDNDVSNDIVTNVSTQCNEEMRSALEGAIREYRFMQPDLRPRIPRLPMHNKNRALVAVLDSQLSNYFDNCEDLTDAHSILYCAAVAACRVAHVKFSDDRATRPKPAVPPWQYRIERRIGGARALIGKLICFREGNTRPRVMRFVRRAFSGTDISPRDYMSRITERIDFLKQKVYAWANRIRRYKRRVDRYTQNRTFQRDERWVYRAWERPDQGVADTRLPDDDAMCSFWRSIWSVPVSHTEGEWTQGVERACDLVPEMRAITISPQDVVRAVRPLPNWKSPGPDGLHNFWIKWFTRSHARLAILFQSALESGSLPEFLTTGITHLLHKSGSTAEPKNYRPITCLPTVYKVLTSILRAKINKHIDDNSIMSASQNGCRNGSRGTKELLLIDMAISQQVRRSRSDLSTCWIDYKKAYDSVPHTWLMRVLELYKVDATLRTFLMSCMGQWRTVLRYPGCRQIQRNSEPIRIERGIFQGDSLSPLWFCLALNPLSTLLEDSGLGYRLRRGGQVISHLLYMDDLKLFAPNDLQLMELLKVTETFSSAIRMEFGVDKCAVMHVKRGEIVESVGTQLSDSINLRSLSATETYKYLGMSEALGINVADMKQSLKERFFGRLKKVFNSLLSGGNKVRAFNGWVMPVLMYSFGILKWTQTELDALDRRVRTLLTAYRMHHPRSSVMRLYIPRKCGGRGFLNAKTLHNREICSLREYFLETDVGMHRDVVAVDKGLTPLSLAKENWRKPVVFDTNYRMEVWQSKELHGRFFRALHGPDVDLSASVAWLRSGDLFGETEGFVCAIMDEVMMTNNYRRFIVKDGTVDICRACHRPGESIRHIISGCSRLANGEYLHRHNLVARIIHQQLALKYNLVELEVPYYKYVPDPVLENGSITLYWDQSIITDRTIVANKPDIVVVDRSERRTMIIDITVPHDENLVKAEKDKKIKYLDLAREVVDMWDVDSAIIVPIVVSAHGLIAKSLDQYLRRLSLGSWIKSLIQKAVLLDTARIVRRFLSLEP

SEQ ID NO: 13902 - protein, 1198 aa, Noctua fimbriata
MLTRAAAKRARLSPPDPSLSSASPPPKSSPVVSAVTPAVAVASSSSDEYFSPPTTPPPVRRRGGRRPPDGLGPRGPPASDRVPAPGGSVQRMRWTQSINANVMRAYYGATEGGNNLTAYRVRMLSLFQVLEPAVNVSAQRLSDQVRVIQRNRMLDDTVLDRLRTEMQSSHVIATPPPQAVVPPQSTIIPNRNNDVSNDIVTNVSTQCNEEMRSALEGAIREYRFMQPDLRPRIPRLPMHNKNRALVAVLDSQLSNYFDNCEDLTDAHSILYCAAVAACRVAHVKFSDDRATRPKPAVPPWQYRIERRIGGARALIGKLICFREGNTRPRVMRFVRRAFSGTDISPRDYMSRITERIDFLKQKVYAWANRIRRYKRRVDRYTQNRTFQRDERWVYRAWERPDQGVADTRLPDDDAMCSFWRSIWSVPVSHTEGEWTQEVERACDLVPEMGAITISPQDVVRAVRPLPNWKSPGPDGLHNFWIKWFTRSHARLAILFQSALESGSLPEFLTTGITHLLHKSGSTAEPKNYRPITCLPTVYKVLTSILRAKINKHIDDNSIMSASQNGCRNGSRGTKELLLIDMAISQQVRRSRSDLSTCWIDYKKAYDSVPHTWLMRVLELYKVDATLRTFLMSCMGQWRTVLRYPGCRQIQRNSEPIRIERGIFQGDSLSPLWFCLALNPLSTLLEDSGLGYRLRRGGQVISHLLYMDDLKLFAPNDLQLMELLKVTETFSSAIRMEFGVDKCAVMHVKRGEIVESVGTQLSDSINLRSLSATETYKYLGMSEALGINVADMKQSLKERFFGRLKKVFNSLLSGGNKVRAFNGWVMPVLMYSFGILKWTQTELDALDRRVRTLLTAYRMHHPRSSVMRLYIPRKCGGRGFLNAKTLHNREICSLREYFLETDVGMHRDVVAVDKGLTPLSLAKENWRKPLVPDTNDRMEVWQSKELHGRFFRALHGPDVDLSASVAWLRCGDLFGETEGFVCAIMDEVMMTNNYRRFIVKDGTVDICRACHRPGESIRHIISGCSRLANGEYLHRHNLVARIIHQQLALKYNLVESEVPYYKYVPDPVLENGSITLYWDQSIITDRTIVANKPDIVVVDRSERRTMIVDITVPHDENLVKAEKDKKIKYLDLAREVVDMWDVDSAIIVPIVVSAHGLIAKSLDQYLRRLSLGSWIKGLIQKAVLLDTARIVRRFLSLEL

SEQ ID NO: 13903 - protein, 1198 aa, Noctua fimbriata
MLTRSAAARRARLLSPDPPLRSASPPPESSPIVSAVTPAVAVASSSSDEYFSPPTTPPPVRRRGGRRPPDGLGPRGPPASDRVPAPGGSVQRMRWTQSINENVMRSYYGATEGGNNLTAYRVRMLSLFQVLEPAVNVSAQRLSDQVRVIQRNRMLDDTVLDRLRTEMQSSHVITPSAQAVVLPQSSTITNRDNDVSNDMVTNVSTQCNEEMRSALEGAIREYRFMQPDLRPRIPRLPMHNKNRALVAVLDSQLSNYFDNCEDLTDAHSILYCAAVAACRVAHVKFFDDRATRPKPVVPPWQYRIERRIGGARALIGKLICFREGNTRPRVMRFVRRAFSGTDISPRDYMSRITERIDFLKQKVYAWASRIRRYKRRVNRYTQNRTFQRDERWLYRTWERPDQGVADTRIPDDDAMCSFWRSIWSVPVSHTEGEWTREVERACDLVPEMGAITISPQDVVRAVRPLPNWKSPGPDGLHNFWIKWFTRSHARLAILFQSALESGSLPEFLTTGITHLLHKSGSTAEPKNYRPITCLPTVYKVLTSILRAKINKHIDDNSIMSASQNGCRNGSRGTKELLLIDMAISQQVRRSRRDLSTCWIDYKKAYDSVPHTWLMRVLELYKVDATLRTFLMSCMGQWRTVLRYPGCRQIQRNSEPIRIERGIFQGDSLSPLWFCLALNPLSTLLEDSGLGYQLRRGGQVISHLLYMDDLKLFAPNDLQLMELLKVTETFSSAIRMEFGVDKCAVMHVKRGEIVESVGTQLSDSINLRSLSATETYKYLGMSEALGINVADMKQSLKERFFGRLKKVFNSLLSGGNKVRAFNGWVMPVLMYSFGILKWTQTELDALDRRVRTLLTAYRMHHPRSSVMRLYIPRKCGGRGFLNAKTLHNREICSLREYFLETDLGMHRDVVAMDKGLTPLSLAKENWRKPLVLDTNDRMEVWQSKELHGRFFRALHGPDVDLSASVAWLRSGNLFGETEGFVCAIMDEVMMTNNYRRFIVKDGTVDICRACHRPGESIRHIISGCSRLANGEYLHRHNLVARIIHQQLALKYNLVESEVPYYKYVPDPVLENGSITLYWDQSIITDRTIVANKPDIVVVDRSERRTMIVDITVPHDENLVKAEKDKKIKYLDLAREVVDMWDVDSAIIVPIVVSAHGLIAKSLDQYLRRLSLGSWIKGLIQKAVLLDTARIVRRFLSLEP

SEQ ID NO: 13904 - protein, 1198 aa, Noctua fimbriata
MLTRAAAKRARLSPPDPSLSSASPPPESSPVMSAVTPAVAVASSSSDEYFSPPTTPPPVRRRGGRRPPDGLGPRGPPASDRVPAPGGSVQRMRWTQSINENVMRSYYGATEGGNNLTAYRVRMLSLFQVLEPAVNVSAQRLSDQVRVIQRNRMLDDTVLDRLRTEMQSSHVIATPPPQAVVPPQSTIIPNRDNDVSNDIVTNVSTQCNEEMRSALEGAIREYRFMQPDLRPRIPRLPMHNKNRALVAVLDSQLSNYFDNCEDLTDAHSILYCAAVAACRVAHVKFSNDRATRPKPAVPPWQYRIERRIGGARALIGKLICFREGNTRPRVMRFVRRAFSGTDISPRDYMSRITERIDFLKQKVYAWANRIRRYKRRVDRYTQNRTFQRDERWVYRAWERPDQGVADTRLPDDDAMCSFWRSIWSVPVSHTEGEWTQGVERACDLVPEMGAITISPQDVVRAVRPLPNWKSPGPDGLHNFWIKWFTRSLARLAILFQSALESGSLPEFLTTGITHLLHKSGSTAEPKNYRPITCLPTVYKVLTSILRAKINKHIDDNSIMSASQNGCRNGSRGTKELLLIDMAISQQVRRSRRDLSTCWIDYKKAYDSVPHTWLMRVLELYKVDATLRTFLMSCMGQWRTVLRYPGCRQIQRNSEPIRIERGIFQGDSLSPLWFCLALNPLSTLLEDSGLGYRLRRGGQVISHLLYMDDLKLFAPNDLQLMELLKVTETFSSAIRMEFGVDKCAVMHVKRGEIVESVGTQLSDSINLRSLSATETYKYLGMSEALGINVADMKQSLKERFFGRLKKVFNSLLSGGNKVRAFNGWVMPVLMYSFGILKWTQTELDALDRRVRTLLTAYRMHHPRSSIMRLYIPRKCGGRGFLNAKTLHNREICSLREYFLETDVGMHRDVVAVDKGLTPLSLAKENWRKPLVLDTNDRMEVWQSKELHGRFFRALHGPDVDLSASVAWLRSGDLFGETEGFVCAIMDEVMMTNNYRRFIVKDGTVDICRACHRPGESIRHIISGCSRLANGEYLHRHNLVARIIHQQLALKYNLVESEVPYYKYVPDPVLENGSITLYWDQSIITDRTIVANKPDIVVVDRSERRTMIVDITVPHDENLVKAEKDKKIKYLDLAREVVDMWDVDSAIIVPIVVSAHGLIAKSLDQYLRRLSLGSWIKGLIQKAVLLDTARIVRRFLSLEP

SEQ ID NO: 13905 - protein, 1198 aa, Atethmia centrago
MLTRSAAVRARLPPPDSSLSSASPPPVPSPTVCAVTTPTAAVASSSSDEYFSPPTTPPPVRRRGGRRPPDGLGSRGPPASDRVPAPGGSVKRMRWTQSVNENVMRSYYGATEGGNNLTAYRVRMLSLFQVLEPAVNVSAQRLSDQVRVIQRNHMLDDTVLDRLRSEMQRSHVIVPPSQTVVHSPQLSTNQADEGSDDRATNVSTQCNVELRSALEDAIREYRLMSPELRPRLPRLPMHKKNRALVAALDSQLSNYFDDCEDLTDTHSILYCAAVAVCRVAHVKFAKDSRTTRPKPTVPAWQCRIESHIGGARVLIGKLICFREGNTRPRVMRFVRRAFSGTDIGPQDYMTRVTERIDFLKQKVYAWANRIRRYKRRVERYTQNRTFQSDERWVYRGWERPDQDVTDTRLPDDDVMCSFWRSIWSVPVSHTEGDWARKVERACDPIPEMGAITICPQDVARAVRPLPNWKSPGPDGLHNFWLKWFLRSHARLAAQYQTALESGSLPQFLTTGVTHLLHKSGSTAEPKYYRPITCLPTVYKLLTSILRAKINKHIDTNSIMSASQNGCKNGSRGTKELLLIDMTISQQVRRSRKDLSTCWIDYKKAYDSVPHTWLMRVLELYKVDATLRTFLISCMGQWRTVLRYPGCRNIQRNSEPIRIERGIFQGDSLSPLWFCLALNPLSTLLEDSGLGYRMRRGSQVISHLLYMDDLKLFASNNLQLMELLKITESFSSAIRMEFGVDKCAVMHVKRGKIVESVGTQLSDSINLRTLSASETYKYLGMSEALGINVTDMKQSLKERFFGRLKKVFNSLLSGGNKVRAFNGWVMPVLMYSFGILKWTQTELDALDRRVRTLLTAYRMHHPRSSVMRLYIPRKCGGRGFLNAKILHNREVCSLREYFLEADVGMHRDVVAVDKGLTPLSLAKENWRKLVVLDTNDRREVWQSKELHGRFFRALHEPDVDFQASVAWLRFGDLFGETEGFVCAIMDEVIMTKNYRRFIVKDGTVDVCRACHRPGESIRHIISGCSRLANEEYLHRHNLVARIIHQQLALKYSLVESEVPYYRYVPDPVLDNGNITLYWDRSIITDRTIVANKPDIVVVDRTERRAMIVDITVPHDGNLVKAEKDKQIKYLDLAREVVDMWDVDSAIIVPIVVSANGLIAKSLDQHLKRLTLDGWIKGLIQKAVLLDTARIVRRFLSLEP

SEQ ID NO: 13906 - protein, 1198 aa, Atethmia centrago
MLTRSAAVRARLPPPDSSLSSASPPPVPSPTVCAVTTPTAAVASSSSDEYFSPPTTPPPVRRRGGRRPPDGLGSRGPPASDRVPAPGGSVKRMRWTQSVNENVMRSYYGATEGGNNLTAYRVRMLSLFQVLEPAVNVSAQRLSDQVRVIQRNHMLDDTVLDRLRSEMQRSHVIVPPSQTVVHSPQLSTNQADEGSDDRATNVSTQCNVELRSALEDAIREYRLMSPELRPRLPRLPMHKKNRALVAALDSQLSNYFDDCEDLTDTHSILYCAAVAVCRVAHVKFAKDSRTTRPKPTVPAWQCRIESRIGGARALIGKLICFREGNTRPRVMRFVRRAFSGTDIGPQDYMTRVTERIDFLKQKVYAWANRIRRYKRRVERYTQNRTFQSDERWVYRGWERPDQDVTDTRLPDDDVMCSFWRSIWSVPVSHTEGDWAQKVERACDPIPEMGAITICPQDVARAVRPLPNWKSPGPDGLHNFWLKWFLRSHARLAAQYQTALESGSLPQFLTTGVTHLLHKSGSTAEPKNYRPITCLPTVYKLLTSILRAKINKHIDTNSIMSASQNGCRNGSRGTKELLLIDMTISQQVRRSRKDLSTCWIDYKKAYDSVPHTWLMRVLELYKVDATLRTFLISCMGQWRTVLRYPGCRNIQRNSEPIRIERGIFQGDSLSPLWFCLALNPLSTLLEDSGLGYRMRRGGQVISHLLYMDDLKLFASNNLQLMELLKITESFSSAIRMEFGVDKCAVMHVKRGKIVESVGTQLSDSINLRTLSASETYKYLGMSEALGINVTDMKQSLKERFFGRLKKVFNSLLSGGNKVRAFNGWVMPVLMYSFGILKWTQTELDALDRRVRTLLTAYRMHHPRSSVMRLYIPRKCGGRGFLNAKILHNREVCSLREYFLEADVGMHRDVVAVDKGLTPLSLAKENWRKLVVLDTNDRREVWQSKELHGRFFRALHEPDVDFQASVAWLRFGDLFGETEGFVCAIMDEVIMTKNYRRFIVKDGTVDVCRACHRPGESIRHIISGCSRLANEEYLHRHNLVARIIHQQLALKYSLVESEVPYYRYVPDPVLDNGNITLYWDRSIITDRTIVANKPDIVVVDRTERRAMIVDITIPHDGNLVKAEKDKQIKYLDLAREVVDMWDVDSAIIVPIVVSANGLIAKSLDQHLKRLTLDGWIKGLIQKAVLLDTARIVRRFLSLEP

SEQ ID NO: 13907 - protein, 1198 aa, Atethmia centrago
MLTRSAAVRARLPPPDSSLSSASPPPVPSPTVCAVTTPTAAVASSSSDEYFSPPTTPPPVRRRGGRRPPDGLGSRGPPASDRVPAPGGSVKRMRWTQSVNENVMRSYYGATEGGNNLTAYRVRMLSLFQVLEPAVNVSAQRLSDQVRVIQRNHMLDDTVLDRLRSEMQRSHVIVPPSQTVVHSPQLSTNQADEGSDDRATNVSTQCNVELRSALEDAIREYRLMSPELRPRLPRLPMHKKNRALVAALDSQLSNYFDDCEDLTDTHSILYCAAVAVCRVAHVKFAKDSRTTRPKPTVPAWQCRIESRIGGARALIGKLICFREGNTRPRVMRFVRRAFSGTDIGPQDYMTRVTERIDFLKQKVYAWANRIRRYKRRVERYTQNRTFQSDERWVYRGWERPDQDVTDTRLPDDDVMCSFWRSIWSVPVSHTEGDWARKVERACDPILEMGAITICPQDVARAVRPLPNWKSPGPDGLHNFWLKWFLRSHARLAAQYQTALESGSLPQFLTTGVTHLLHKSGSTAEPKNYRPITCLPTVYKLLTSILRAKINKHIDTNSIMSASQNGCRNGSRGTKELLLIDMTISQQVRRSRKDLSTCWIDYKKAYDSVPHTWLMRVLELYKVDATLRTFLISCMGQWRTVLRYPGCRNIQRNSEPIRIERGIFQGDSLSPLWFCLALNPLSTLLEDSDLGYRMRRGGQVISHLLYMDDLKLFASNNLQLMELLKITESFSSAIRMEFGVDKCAVMHVKRGKIVESMGTQLSDSINLRTLSASETYKYLGMSEALGINVTDMKQSLKERFFGRLKKVFNSLLSGGNKVRAFNGWVMPVLMYSFGILKWTQTELDALDRRVRTLLTAYRMHHPRSSVMRLYIPRKCGGRGFLNAKTLHNREVCSLREYFLEADVGMHRDVVAVDKGLTPLFLAKENWRKLVVLDTNDRREVWQSKELHGRFFRALHEPDVDFQASVAWLRFGDLFGETEGFVCAIMDEVIMTKNYRRFIVTDGTVDVCRACHRPGESIRHIISGCSRLANEEYLHRHNLVARIIHQQLALKYSLVESEVPYYRYVPDPVLDNGNITLYWDRSIITDRTIVANKPDIVVVDRTERRAMIVDITVPHDGNLVKAEKDKQIKYLDLAREVVDMWDVDSAIIVPIVVSANGLIAKSLDQHLKRLTLDGWIKGLIQKAVLLDTARIVRRFLSLEP

SEQ ID NO: 13908 - protein, 975 aa, Atethmia centrago
MSPELRPRLPRLPMHKKNRALVAALDSQLSNYFDDCEDLTDTHSILYCAAVAVCRVAHVKFAKDSRTTRPKPTVPAWQCRIESRIGGARALIGKLICFREGNTRPRVMRFVRRAFSGTDIGPHDYMTRVTERIDFLKQKVYAWANRIRRYKRRVERYTQNRTFQSDERWVYRGWERPDQDVTDTRLPDDDVMCSFWRSIWSVPVSHTEGDWARKVERACDPIPEMGAITICPQDVARAVRPLPNWKSPGPDGLHNFWLKWFLRSHARLAAQYQTALESGSLPQFLTTGVTHLLHKSGSTAEPKNYRPITCLPTVYKLLTSILRAKINKHIDTNSIMSASQNGCRNGSRGTKELLLIDMTISQQVRRSRKDLSTCWIDYKKAYDSVPHTWLMRVLELYKVDATLRTFLISCMGQWRTVLRYPGCRNIQRNSEPIRIERGIFQGDSLSPLWFCLALNPLSTLLEDSGLGYRMRRGGQVISHLLYMDDLKLFASNNLQLMELLKITESFSSAIRMEFGVDKCAVMHVKRGKIVESVGTQLSDSINLRTLSASETYKYLGMSEALGINVTDMKQSLKERFFGRLKKVFNSLLSGGNKVRAFNGWVMPVLMYSFGILKWTQTELDALDRRVRTLLTAYRMHHPRSSVMRLYIPRKCGGRGFLNAKILHNREVCSLREYFLEADVGMHRDVVAVDKGLTPLSLAKENWRKLVVLDTNDRREVWQSKELHGRFFRALHEPDVDFQASVAWLRFGDLFGETEGFVCAIMDEVIMTKNYRRFIVKDGTVDVCRACHRPGESIRHIISGCSRLANEEYLHRHNLVARIIHQQLALKYSLVESEVPYYRYVPDPVLDNGNITLYWDRSIITDRTIVANKPDIVVVDRTERRAMIVDITVPHDGNLVKAEKDKQIKYLDLAREVVDMWDVDSAIIVPIVVSANGLIAKSLDQHLKRLTLDGWIKGLIQKAVLLDTARIVRRFLSLEP

SEQ ID NO: 13909 - protein, 1194 aa, Autographa gamma
MLTRSKTRTPARPPSPDPSPSSASQLPDHVPAPAPEVASSSSDEYYSPPTTPTPVRRQGRRRPPSSLAPAGQPASSRAPAPGGDVRRMKWTLSINENVMRAYYGATEGGTNLTAYRARMLSLFRGLEPDVNVSAQRLSDQVRVIQRNHRLDDATLDRLRSEVQRSPATSTPSPAVVPVTGSPPTNLVDGEEEDGAITVSTQCSENIRSTLEDTIREFRSTPPDIRPRLPRLPMHNRNKAIMGVLDSLLLAYFGSSEDLSDTHSILYCAALAACRVANVKMNNQNLDTRPKPAVPAWQCRIERRVAEARALIGKLIAFKDGNSRPRVMRFVRRAFTGTSISPSEYTARVTERIDFFKQKVCAWANRIRRYKRRVDRFHLNRMFQRDQRWVFRTWERPVLGVDDGRLPDEDATNSFWRNIWSVPVSHSEGDWMRDVEESCGPIQEMGAITISPQDVANAIRPMSNWKAPGPDGLQNFWLKWFKSSHGCLASQFQCAIESESLPQFFTTGSTHLLHKTGSTTDPKNYRPITCLPTIYKLLTSILRVKINEHIDSNAIMSASQNGCRNGSRGTKELLLIDMAICQQVRRSKKNLSTCWIDYKKAYDSVPHSWLMRVLELYKINTTLRAFLLSCMRRWTTVLRYPGCRDIQQSGGPIRIERGIFQGDSLSPLWFCLALNPLSTLLENSRLGYSLRRGSQVISHLLYMDDLKLFASNELQLMGLLKITESFSNSIRMEFGVDKCAVMHVKQGGIVESQGIQLSDSINLRSLSAADTYKYLGMSEALGINVADMKQSLLTRFFGRLNKVLKSLLSGGNRVRAFNGWVMPVLMYSFGILKWTQTELDALDRRVRTLLTANRMHHPRSSVMRLYIPRKCGGRGFLNAKTLHNREVCNLREYFLQVDVGMHRDVVVVDKGFTPLSLGKENWHKPVVLSVKDRKDVWQSKELHGRYYRSLHGPDVDFLASVAWLRFGDLFGETEGFVCAIMDEVVMTNNYRKYIIKDGTVDICRACHCPGESIRHIISGCSRLANGEYLHRHNQVARIIHQQLALRYKLVEAEVPYYRYVPDPVLDNGHVTLYWDRSIITDRTIVANKPDIVVIDRSERRAMIVDVTIPHDENLVKAEKEKQLKYLDLAHEVVDMWEVDSAVIVPIVVTANGIIAKSLDQHLKRLSLGIWVKGLMQKAVLLDTARIVRRFLSLEP

SEQ ID NO: 13910 - protein, 961 aa, Apamea monoglypha
MHNKNRVLVAVLDAQLSSYFDVCEDLTDTHSILYCAAVAACRVAHVKFVSDSRATRPKPAIPPWQCRIERRIGGARALIGKLICFREGNTRPRVMRFVRRAFSGTDISSQDYLSRVTERIDFLKQKVYAWANRIRRYKRRVDRYTQNRTFQSDERWVYRGWERPDQGVADTCLPDDDAMYSFWRSIWSVPVSHTGSDWSREVERACDPIPEMEAITICAQDVARAVRPLPNWKSPGPDGLHNFWFKWLTRSHARLASQFQIALESGSLPQFLTTGVTHLLHKSASTAEPKNYRPITCLPTVYKVLTSILRAKINKHIDTNSIMSASQNGCKNGSRGTKELLLIDMAISQQVRRSRKDLSTCWIDYKKAYDSVPHTWLMRVLELYKVDTTLRTFLMTCMGQWRTVLRYPGCRNIQRNSEPIRIERGIFQGDSLSPLWFCLALNPLSTLLEDSGLGYRLRRGGQVISHLLYMDDLKLFAPNNFQLMELLKITETFSSAIRMEFGVDKCAVMHVKRGEIVESVGTQLSDSTNLRALSATETYKYLGMSEALGINVTDMKQSLKERFFGRLKKVLNSLLSGGNKVRAFNSWVMPVLMYSYGILKWTQTELDALDRRVRTLLTANRLHHPRSSVMRLYIPRKCGGRGFLNAKTLHNREICSLREYFLETDVGMHRDVVAVDKGLTLLSLAKENWRKPVLDTNDRMEVWQSKELHGRFYRALHGPDVDLLASVAWLRFGDLFGETEGFVCAIMDEVMMTNNYRRFIVKDGTVDMCRACHRPGESIRHNISGCSRLANGEYLHRHNLVARIIHQQLALKYNLVESEVPYYRYVPDPVLENGNITLYWDRSIITDRTIVANKPDIVVVDRSERRAMIVDITVPHDENLVKAEKDKQIKSLDLAREVVDMWHVDSAIIVPIVVTANGLIAKSLDQHLRRLSLGSWIKGLIQKAVLLDTARIVRRFLSLEP

SEQ ID NO: 13911 - protein, 839 aa, Atethmia centrago
MRFVRRAFSGTDISPQGYMSRVTERIDFLKQKVYAWANRIRRYKRRVDRYTQNRTFQSDERWIYRGWEQRDQGVTDTRLPDDDVMCSFWRSIWSVPVSHTEGDWARKVERACDPLPEMGAITICPQDVARAVRPLPNWKSPGPDGLHNFWLKWFLGSHARLAAQYQTALESGSLPQFLTIGVTHLLHKSGSTAEPKNYIPITCLPTVYKVVTSILRAKINKHIDTNSIMSASQNGCRNGSRGTKELLLIDMTISQQVRRFRKDLSTCWIDYKKAYDSVPHTWLMRVLELYKVDATLRTFLMSCMGQWRTVLRYPGCRNIQRNSEPIRIERGIFQGDSLSPLWFCLALNPLSTLLEDSGLGYRLRRGGQVISHLLYMDDLKLFASNNLQLMELLKITETFSSAIRMEFGVDKCAVMHVKRGEIVESVGTQLSDSINLRALSASETYKYLGMSEALGINVTDMKQSLKQRFFDRLKKVFNSLLSGGNKVRAFNGWVMPALDRRVRTRLTAYRMHHPRSSVMRLYIPRKCGGRGFLNAKTLHNREVCSLREYFLEADVGMHRDVVAVDKGLTPLSLAKENWRKLVVLDTNDRREVWQSKELHERFFRALHEPDVDFQASVAWLRFGDLFGETEGFVCAIMDEVIMTKNYRRFIVKDSTVDMCRACHRPGESIRHIISGCSRLANEEYLHRHNLVARIIHQQLALKYSLVESEVPYYRYVPDPVLDNGNITLYWDRSIITDRTIVANKPDIVVVDRTERRAMIVDITVPHDGNLVKAEKDKQIKYLDLAIIVPIVVSANGLIAKSLDQHLRRLTLDGWIKGLIQKAVLLDTARIVRRFLSLEP

SEQ ID NO: 13912 - protein, 988 aa, Clostera curtula
MLIVIVLIFVIVLCFSILRGHLMADNVVDDISLSVPPPEEGLYWCTQCSPKRSFNSQRGFKIHKGKVHKSLQSCRQAIQPLALCSNLNTGHNADPFWKTLSNLKQTTPVLKRIPRGARFTIAKNLSNLIKKVVSVNSKQAWEELLTFPYRILHVNNDPNNKNSITKKLKDNCSRDSLYTSLNNPLENPAKHVKNSFKFCLVERKISDGDVRGAAKLLFSTDSLAPNTPETLSSLISKHPPPAADSCLPAPPSASDDFLAVTVEQVSQAVHSFPNGSAGGLDSLTPQHLKDLLSNSSGTAGIALLEELAALINFMLSGRVNNEIVDILYGANLCALTKKDGGIRPIAVGTTYRRLTAKVCCKVKRDFISGYFTPKQLGYGSRGGCEAAVHALRTCLKSNAAEVLLKVDIKNAFNSVDRGALLTRLKDKIPDVFGFIWQCYSLPTKLVYRGNLIESAVGCQQGDPLGPVLFSLAIHPIIDQLTSKFNIWYLDDGTLGGDANIVKDDFLKLQRDFQNIGLSLNFSKCELFISDRCNDQHNVIKQFNDIAPNINIVKKESLRLLGSPVLDEAVPSFVDEKIENFQNAAVHLSKINVHMAFYIIRYCLFVPKFTYFLRCCPLWKYTQLTQSLDHIVRDTLIHVLNTNLDERSWLQLSLPIRFGGLGIRKISSVALPAFLSSVHGNTNLINKILAPLHAQTEISDIQEATNSWRNACPNTCTPINPSSQKQWDEPLSKQLQSYLINTAETRVEKARLLAVSQWESGVWLQALPSTNIGTLMDSTSFRLAVCLRIGAKCVVPHHCRCGDLVDALGHHGLSCLRSAGRINRHASINDIIRRAFTTANVPAALEPTGLVRDDGKRPDGMTLIPWKMGRPLVWDATCVDTLAPSHLPGTAVEAGSAAFSAESHKRRKYNTLDSSCLFVPFAVETLGPWGPGAHQVFSDLSRRLIEVTGEQKAGSYLAQRLGIAIQRGNAASLLGTLPCDSGLAHLYNL

SEQ ID NO: 13913 - protein, 943 aa, Clostera curtula
MLIVIVLIFVIVLCFSILRGHLMADNVVDDISLSVPPPEEGLYWCTQCSPKRSFNSQRGFKIHKGKVHKSLQSCRQAIQPLALCSNLNTGHNADPFWKTLSNLKQTTPVLKRIPRGARFTIAKNLSNLIKKVVSVNSKQAWEELLTFPYRILHVNNDPNNKNSITKKLKDNCSRDSLYTSLNNPLENPAKHVKNSFKFCLVERKISDGDVRGAAKLLFSTDSLAPNTPETLSSLISKHPPPAADSCLPAPPSASDDFLAVTVEQVSQAVHSFANGSAGGLDSLTPQHLKDLLSNSSGTAGIALLEELAALINFMLSGRVNNEIVDILYGANLCALTKKDGGIRPIAVGTTYRRLTAKVCCKVKRDFISSYFTPKQLGYGSRGGCEAAVHALRTCLKSNAAEVLLKVDIKNAFNSVDRGALLTRLKDKIPDVFGFIWQCYSLPTKLVYRGNLIESAVGCQQGDPLGPVLFSLAIHPIIDQLTSKFNIWYLDDGTLGGDANIVKDDFLKLQRDFQNIGLSLNFSKCELFISDRCNDQHNVIKQFNDIAPNINIVKKESLRLLGSPVLDEAVPSFVDEKIENFQNAAVHLSKINVHMAFYIIRYCLFVPKFTYFLRCCPLWKYTQLTQSLDHIVRDTLIHVLNTNLDERSWLQLSLPIRFGGLGIRKISSVALPAFLSSVHGNTNLINKILAPLHAQTEISDIQEATNSWRNDCPNTCTPINPSSQKQWDEPLSKQLQSYLINTAETRVEKARLLAVSQWESGVWLQALPSTNIGTLMDSTSFRLAVCLRIGAKCVVPHHCRCGDLVDALGHHGLSCLRSAGRINRHASINDIIRRAFTTANVPAALEPTGLVRDDGKRPDGMTLIPWKMGRPLVWDATCVDTLAPSHLPGTAVEAGSAAFSAESHKRRKYNTLDSSCLFVPFAVDVGTVGPGCPSSLLGFVKEAD

SEQ ID NO: 13914 - protein, 976 aa, Clostera curtula
MLIVIVLIFVIVLCFSILRGHLMADNVVDDISLSVPPPEEGLYWCTQCSPKRSFNSQRGFKIHKGKVHKSLQSCRQAIQPLALCSNLNTGHNADPFWKTLSNLKQTTPVLKRIPRGARFTIAKNLSNLIKKVVSVNSKQAWEELLTFPYRILHVNNDPNNKNSITKKLKDNCSRDSLYTSLNNPLENPAKHVKNSFKFCLVERKISDGDVRGAAKLLFSTDSLAPNTPETLSSLISKHPPPAADSCLPAPPSASDDFLAVTVEQVSQAVHSFPNGSAGGLDSLTPQHLKDLLSNSSGTAGIALLEELAALINFMLSGRVNNEIVDILYGANLCALTKKDGGIRPIAVGTTYRRLTAKVCCKVKRDFISGYFTPKQLGYGSRGGCEAAVHALRTCLKSNAAEVLLKVDIKNAFNSVDRGALLTRLKDKIPDVFGFIWQCYSLPTKLVYRGNLIESAVGCQQGDPLGPVLFSLAIHPIIDQLTSKFNIWYLDDGTLGGDANIVKDDFLKLQRDFQNIGLSLNFSKCELFISDRCNDQHNVIKQFNDIAPNINIVKKESLRLLGSPVLDEAVPSFVDEKIENFQNAAVHLSKINVHMAFYIIRYCLFVPKFTYFLRCCPLWKYTQLTQSLDHIVRDTLIHVLNTNLDERSWLQLSLPIRFGGLGIRKISSVALPAFLSSVHGNTNLINKILAPLHAQTEISDIQEATNSWRNACPNTCTPINPSSQKQWDEPLSKQLQSYLINTAETRVEKARLLAVSQWESGVWLQALPSTNIGTLMDSTSFRLAVCLRIGAKCVVPHHCRCGDLVDALGHHGLSCLRSAGRINRHASINDIIRRAFTTANVPAALEPTGLVRDDGKRPDGMTLIPWKMGRPLVWDATCVDTLAPSHLPGTAVEAGSAAFSAESHKRRKYNTLDSSCLFVPFAVETLGPSRRLIEVTGEQKAGSYLAQRLGIAIQRGNAASLLGTLPCDSGLAHLYNL

SEQ ID NO: 13915 - protein, 675 aa, Clostera curtula
MLSGRVNNEIVDILYGANLCALTKKDGGIRPIAVGTTYRRLTAKVCCKVKRDFISSYFTPKQLGYGSRGGCEAAVHALRTCLKSNAAEVLLKVDIKNAFNSVDRGALLTRLKDKIPDVFGFIWQCYSLPTKLVYRGNLIESAVGCQQGDPLGPVLFSLAIHPIIDQLTSKFNIWYLDDGTLGGDANIVKDDFLKLQRDFQNIGLSLNFSKCELFISDRCNDQHNVIKQFNDIAPNINIVKKESLRLLGSPVLDEAVPSFVDEKIENFQNAAVHLSKINVHMAFYIIRYCLFVPKFTYFLRCCPLWKYTQLTQSLDHIVRDTLIHVLNTNLDERSWLQLSLPIRFGGLGIRKISSVALPAFLSSVHGNTNLINKILAPLHAQTEISDIQEATNSWRNACPNTCTPINPSSQKQWDEPLSKQLQSYLINTAETRVEKARLLAVSQWESGVWLQALPSTNIGTLMDSTSFRLAVCLRIGAKCVVPHHCRCGDLVDALGHHGLSCLRSAGRINRHASINDIIRRAFTTANVPAALEPTGLVRDDGKRPDGMTLIPWKMGRPLVWDATCVDTLAPSHLPGTAVEAGSAAFSAESHKRRKCNTLDSSCLFVPFAVETLGPWGPGAHQVFSDLSRRLIEVTGELKAGSYLAQRLGIAIQRGNAASLLGTLPCDSGLAHLYNL

SEQ ID NO: 13916 - protein, 988 aa, Clostera curtula
MLIVIVLIFVIVLCFSILRGHLMADNVVDDISLSVPPPEEGLYWCTQCSPKRSFNSQRGFKIHKGKVHKSLQSCRQAIQPLALCSNLNTGHNADPFWKTLSNLKQTTPVLKRIPRGARFTIAKNLSNLIKKVVSVNSKQAWEELLTFPYRILHVNNDPNNKNSITKKLKDNCSRDSLYTSLNNPLENPAKHVKNSFKFCLVERKISDGDVRGAAKLLFSTDSLAPNTPETLSSLISKHPPPAADSCLPAPPSASDDFLAVTVEQVSQAVHSFPNGSAGGLDSLTPQHLKDLLSNSSGTAGIALLEELAALINFMLSGRVNNEIVDILYGANLCALTKKDGGIRPIAVGTTYRRLTAKVCCKVKRDFISSYFTPKQLGYGSRGGCEAAVHALRTCLKSNAAEVLLKVDIKNAFNSVDRGALLTRLKDKIPDVFGFIWQCYSLPTKLVYRGNLIESAVGCQQGDPLGPVLFSLAIHPIIDQLTSKFNIWYLDDGTLGGDANIVKDDFLKLQRDFQNIGLSLNFSKCELFISDRCNDQHNVIKQFNDIAPNINIVKKESLRLLGSPVLDEAVPSFVDEKIENFQNAAVHLSKINVHMAFYIIRYCLFVPKFTYFLRCCPLWKYTQLTQSLDHIVRDTLIHVLNTNLDERSWLQLSLPIRFGGLGIRKISSVALPAFLSSVHGNTNLINKILAPLHTQTEISDIQEATNSWRNACPNTCTPINPSSQKQWDEPLSKQLQSYLINTAETRVEKARLLAVSQWESGVWLQALPSTNIGTLMDSTSFRLAVCLRIGAKCVVPHHCRCGDLVDALGHHGLSCLRSAGRINRHASINDIIRRAFTTANVPAALEPTGLVRDDGKRPDGMTLIPWKMGRPLVWDATCVDTLAPSHLPGTAVEAGSAAFSAESHKRRKYNTLDSSCLFVPFAVETLGPWGPGAHQVFSDLSRRLIEVTGEQKAGSYLAQRLGIAIQRGNAASLLGTLPCDSGLAHLYNL

SEQ ID NO: 13917 - protein, 1013 aa, Hermetia illucens
MNPVVRRSLVTADVDPIYNEPLTAFQVAFTEYAEILPDARPRIPKLKFTSATTNIIAAVDRILADRLASEITATEGHSLIYVAAATVIRLHNQHLRANNRGMRRRTLPFWVFRLNKRVEKLRKEIGRVTQALLGNPSPRVHRCVANIIGNYHLSNDMPIEEILEVLKQKLAVCSNRIRRYQKSFQRRTNNTLFFQNQRGFYKNLINSGRESNLNLDQAEDFWRSVWSESSRCNLEAPWLPHLMRSCKALPEMTMPDVTEVDVKAVLDKAGNWKAPGVDKIHNFWLKRFKSTHRILANQFNQMIADPDLVPPFFTKGITFLIPKEQGVSCPSKCRPITCLPTIYKVFTSVLCANISTHLDVHKLIAEEQKGCAKGSRGCKEQLIIDTVAVKQAVHEKRNISTAYIDYKSAFDSISLSWLLQMLRLYKINPNVVLLLRTVMKNWSTKLSVSSQTSGEIPIRPGIFQGDSLSPLWFCLALNPLSHLLHESKYGFQVKHGILSKCTLSHLMYIDDIKLYAKDENQLRSLLDITIQFSRDIGMQLGLEKCRIKTIVRGKHNDNEGYCQNNTDNEGYSRIEGMDSDDVYKYLRILQATTPAVAIIKSKLLGEFERRLDLVLKTELYGKNKIMAINTFAIPVLLYTFGVIQWSNTDLESVNRRVRVVLANNNMHNRAAEKLRITIPRHQGGRGVLDLKTLHYNQVHSLREFFYEKQSSSQIHQATVMADNKLSPLNLRSREWDPMSNVTSVQQKIDMWKEKPIHGGHIKNLLLSGIDIEASNKWLTNCVLFYETEAFLTSIQDASLPTRNYKRYILHDSSITNSSCRLCNCEEETIQHITSACRMLSGTEYTSRHNSVCKILHQNLALKYNLVATYHPYYKYTPQRILENDRAKLLWDHTIATDHSVNHNRPDLVLLLKEERACFIIDVAVPLDRNTVEKQHEKIRNYGPLADDMKQTWRLQKIQIVPVIISVTGLVPQNLHKALKTLDLRAGLYMEMQKAVILATCAIVRRVLSGNNLT

SEQ ID NO: 13918 - protein, 1123 aa, Hermetia illucens
MPSTTRDGRPRHRMVWTNQLNEFIVRAYYRVTDLERNPSGYRHRLHDAFITRFPELSHVPEQNVVNQYRVIVNNNRVALPTRQQIFQEVSLELGLESSNYRTSQRSNTSTPPVRHPMNPVVRRSLVTGDVDPIYNEALTAFQVAFTEYAEILPDARPRIPKLKFTSATTNIIAAVDRILADRLASEITATEVHSLIYVAAATVIRLHNQHLRANNRGMRRRTLPFWVFRLNKRVEKLRKEIGRVTQALLGNPSPRVHRCVANIIGNYHLSNDMPIEEILEVLKQKLAVCSNRIRRYQKSFQRRTDNTLFFQNQRGFYKNLINSGRESNLNLDQAEDFWRSVWSESSRCNLEAAWLPHLMRSCEALPEMTMPDVTEVDVKAVLDKAGNWKAPGVDKIHNFWLKRFKSTHRILANQFNQMIADPDLVPPFFTKGITFLIPKEQGVSCPSKCRPITCLPTIYKVFTSVLCANISKHLDVHKLIAEEQKGCAKGSRGCKEQLIIDTVAVKQAVHQKRNISTAYIDYKSAFDSISHSWLLQVLRLYKINPNVVLLLRTVMKNWSTKLSVSSQTSGEIPIRRGIFQGDSLSPLWFCLALNPLSHLLHESKYGFQVKHGILSKCTLSHLMYIDDIKLYAKDENQLRSLLDITIQFSRDIGMQLGLEKCRIKTIVRGKHTDNEGYSQNNIRIEGMDSDDVYKYLGILQATTPAVAIIKSKLLGEFERRLDLVLKTELYGKNKIMAINIFAIPVLLYTFGVIQWSNTDLESVNRRVRVVLANNNMHNRAAEKLRLTIPRHQGGRGVLDLKTLHYNQVHSLREFFYEKQSSSQIHQATVMADNKLSPLNLRSREWDPMSNVTSVQQKIDMWKEKPIHGGHIKNLLLSGIDIEASNKWLTNGVLFYETEAFLTSIQDASLPTKNYKRYILHDSSITNSSCRLCNCEEETIQHITSACRMLSGTEYTNRHNSVCKILHQNLALKYNLVATYHPYYKYTPQRILENDRVKLLWDHTIATDHSVNHNRPDLVLLLKEERACFIIDVAVPLDRNTVEKQHEKIRNYGPLADDMKQTWRLQKIQVVPVIISATGLVPQNLHKALKTLDLRAGLYMEMQKAVILATCAIVRRVLSGNNLT

SEQ ID NO: 13919 - protein, 1123 aa, Hermetia illucens
MPSTTRDGRPRRRMVWTNQLNEFIVRAYYRVTDLERNPSGYRHRLHDAFITRFPELSHVPEQNVVNQYRVIVNNNRVALPTRQQIFQEVSLELGLESSNYRTSQRSNTSTPPVRHSMNPVVRRSLVTGDVDPIYNEALTAFQVAFTEYAEILPDARPRIPKLKFTSATANIIAAVDRILADRLASEITATEVHSLIYVAAATVIRLHNQHLRANNRGMRRRTLPFWVFRLNKRVEKLRKEIGRVTQALLGNPSPRVHRCVANIIGNYHLSNDMPIEEILEVLKQKLAVCSNRIRRYQKSFQRRTDNTLFFQNQRGFYKNLINSGRESNLNLDQAEDFWRSVWSESSRCNLEAAWLPHLMRSCEALPEMTMPDVTEVDVKAVLDKAGNWKAPGVDKIHNFWLKRFKSTHRILANQFNQMIADPDLVPPFFTKGITFLIPKEQGVSCPSKCRPITCLPTIYKVFTSVLCANISKHLDVHKLIAEEQKGCAKGSRGCKEQLIIDTVAVKQAVHQKRNISTAYIDYKSAFDSISHSWLLQVLRLYKINPNVVLLLRTVMKNWSTKLSVSSQTSGEIPIRRGIFQGDSLSPLWFCLALNPLSHLLHESKYGFQVKHGILSKCTLSHLMYIDDIKLYAKDENQLRSLLDITIQFSRDIGMQLGLKKCRIKTIVRGKHTDNEGYSQNNIRIEGMDSDDVYKYLGILQATTPAVAIMKSKLLGEFERRLDLVLKTELYGKNKIMAINTFAIPVLLYTFGVIQWSNTDLESVNRRVRVVLANNNMHNRAAEKLRITIPRHQGGRGVLDLKTLHYNQVHSLREFFYEKQSSSQIHQATVMADNKLSPLNLRSREWDPMSNVTSVQQKIDMWKEKPIHGGHIKNLLLSGIDIEASNKWLTNGVLFYETEAFLTSIQDASLPTKNYKRYILHDSSITNSSCRLCNCEEETIQHITSACRMLSGTEYTNRHNSVCKILHQNLALKYNLVATYHPYYKYTPQRILENDRVKLLWDHTIATDHSVNHNRPDLVLLLKEERACFIIDVAVPLDRNTVEKQHEKIRNYGPLADDMKQTWRLQKIQVVPVIISATGLVPQNLHKALKMLDLRAGLYMEMQKAVILATCAIVRRVLSGNNLT

SEQ ID NO: 13920 - protein, 1123 aa, Hermetia illucens
MPSTTRDGRPRRRMVWTNQLNEFIVRAYYRVTDLERNPSGYRHRLHDAFITRFPELSHVPEQNVVNQYRVIVNNNRVALPTRQQIFQEVSLELGLESSNYRTSQRSNTSTPPVRHSMNPVVRRSLVTGDVDPIYNEALTAFQVAFTEYAEILPDARPRIPKLKFTSATANIIAAVDRILADRLASEITATEVHSLIYVAAATVIRLHNQHLRANNRGMRRRTLPFWVFRLNKRVEKLRKEIGRVTQALLGNPSPRVHRCVANIIGNYHLSNDMPIEEILEVLKQKLAVCSNRIRRYQKSFQRRTDNTLFFQNQRGFYKNLINSGRESNLNLDQAEDFWRSVWSESSRCNLEAAWLPHLMRSCEALPEMTMPDVTEVDVKAVLDKAGNWKAPGVDKIHNFWLKRFKSTHRILANQFNQMIADPDLVPPFFTKGITFLIPKEQGVSCPSKCRPITCLPTIYKVFTSVLCANISKHLDVHKLIAEEQKGCAKGSRGCKEQLIIDTVAVKQAVHQKRNISTAYIDYNSAFDSISHSWLLQVLRLYKINPNVVLLLRTVMKNWSTKLSVSSQTSGEIPIRRGIFQGDSLSPLWFCLALNPLSHLLHESKYGFQVKHGILSKCTLSHLMYIDDIKLYAKDENQLRSLLDITIQFSRDIGMQLGLEKCRIKTIVRGKHTDNEGYSQNNIRIEGMDSDDVYKYLGILQATTPAVAIIKSKLLGEFERRLDLVLKTELYGKNKIMAINTFAIPVLLYTFGVIQWSNTDLESVNRRVRVVLANNNMHNRAAEKLRITIPRHQGGRGVLDLKTMHYNQVHSLREFFYEKQSSSQIHQATVMADNKLSPLNLRSREWDPMSNVTSVQQKIDMWKEKPIHGGHIKNLLLSGIDIEASNKWLTNGVLFYETEAFLTSIQDASLPTKNYKRYILHDSSITNSSCRLCNCEEETIQHITSACRMLSGTEYTNRHNSVCKILHQNLALKYNLVATYHPYYKYTPQRILENDRVKLLWDHTIATDHSVNHNRPDLVLLLKEERACFIIDVAVPLDRNTVEKQHEKIRNYGPLADDMKQTWRLQKIQVVPVIISATGLVPQNLHKALKTLDLRAGLYMEMQKAVILATCAMVRRVLSGNNLT

SEQ ID NO: 13921 - protein, 891 aa, Hermetia illucens
MNPVVRRSLVTGDVDPIYNEALTAFQVAFTEYAKILPDARSRIPKLKFTSATTKIIAAVDRILADRLASEITATEVHSLIYVAAATVIRLHNQHLRANNRGMRRRTLPFWVFRLNKRVEKLRKEIGRVTQAGNYHLSNDMPIEEILEVLKQKLVVCSNHIRRYQKSFQRRTDNTLFFQNQRGFYKNLINSGRESNLNLDQAEDFWRSVWSESSRCNLEAAWLPHLMRSCEALPEMTMPDVTEVDVKAVLDKAGNWKVPGVDKIHNFWLKRFKSTQRILANQFNQMIADPDLVPPFFIKGITFLIPKEQGVSCPSKCRPITCLPTIYKVFTSVLCANISKHLDVHKLIAEEQKGCAKGSRGCKDQLIIDTVAVKQAVHQKRNISTAYIDYKSAFDSISHSWLLQVLRLYKINPNVVLLLRTVMKNWSMKLSVSSQTSGEIPIRRGIFQGDSLSPLWFCLVLNPLSHLLHESKYGFQVKHGILSKCTLSHLIYIDDIKLYAKDENQLRSLLDITIQFSRDIGMQLSLEKCRIKTIVRGKHTDHEGYSQNNIRIEGMDSDDVYKYLGILQATTPAVAIIKSKLLGEFERRLDLVLKTQLYGKNKMMAINTITIPVLLYTFGVIQWSNTDLESVNRRIRVVLANNNMHNRDAEKLRITIPRHQGGRGVLDLKTMHYNQVHSLREFFYEKQSSSQIHQATVMADNKLSPLNLRSREWDPMSNVTSVQQKIDMWKEKPIHGGHIKNLLLSGIDIEASNKWLTNGVLFYETEAFLTSIQDASLPTKNYKRYILHDSSITNSSCRLCNCEEETIQHITSACRMLSGTEYTNRHNSVCKILHHNLAMKYNLVATYHPYYKYTPQRILENDRVKLLWDHTIATDHSVNHNRPDLVLLLKEE

SEQ ID NO: 13922 - protein, 1123 aa, Hermetia illucens
MPSTTRDGRPRRRMVWTSQLNEFIVRAYYRVTDLERNPSGYRHRLHDAFITRFPELSHVPEQNVVNQYRVIVNNNRVALPTRQQIFQEVSLELGLESSNYRTSQRSNTSTPPVRHSMNPVVRRSLVTGDVDPIYNEALTAFQVAFTEYAEILPDARPRIPKLKFTSATTNIIAAVDRILADRLASEITATEVHSLIYVAAATVIRLHNQHLRANNRGMRRRTLPFWVFRLNKRVEKLRKEIGRVTQALLGNPSPRVHRCVANIIGNYHLSNDMPIEEILEVLKQKLAVCSNRIRRYQKSFQRRADNTLFFQNQRGFYKNLINSGRESNLNLDQAEDFWRSVWSESSRCNLEAAWLPHLMRSCEALPEMTMPDVTEVDVKAVLDKAGNWKAPGVDKIHNFWLKRFKSTHRILANQFNQMIADPDLVPPFFTKGITFLIPKEQGVSCPSKCRPITCLPTIYKVFTSVLCANISKHLDVHKLIAEEQKGCAKGSRGCKEQLIIDTVAVKQAVHQKRNISTAYIDYKSAFDSISHSWLLQVLRLYKINPNVVLLLRTVMKNWSTKLSVSSQTSGEIPIRRGIFQGDSLSPLWFCLALNPLSHLLHESKYGFQVKHGILSKCTLSHLMYIDDIKLYAKDENQLRSLLDITIQFSRDIGMQLGLEKCRIKTIVRGKHTDNEGYSQNNIRIEGMDSDDVYKYLGILQATTPAVAIIKSKLLGEFERRLDLVLKTELYGKNKIMAINTFAIPVLLYTFGVIQWSNTDLESVNRRVRVVLANNNMHNRAAEKLRITIPRHQGGRGVLDLKTMHYNQVHSLREFFYEKQSSSQIHQATVMADNKLSPLNLRSREWDPMSNVTSVQQKIDMWKEKPIHGGHIKNLLLSGIDIEASNKWLTNGVLFYETEAFLTSIQDASLPTKNYKRYILHDSSITNSSCRLCNCEEETIQHITSACRMLSGTEYTNRHNSVCKILHQNLALKYNLVATYHPYYKYTPQRILENDRVKLLWDHTIATDHSVNHNRPDLVLLLKEERACFIIDVAVPLDRNTVEKQHEKIRNYGPLADDMKQTWRLQKIQVVPVIISATGLVPQNLHKALKTLDLRAGLYMEMQKAVILATCAIVRRVLSGNNLT

SEQ ID NO: 13923 - protein, 1153 aa, Hermetia illucens
MGPKGHEDPTRLRVVQQHQSGSSPLDVLAVMPSTTRDGRPRRRMVWTSQLNEFIVRAYYRVTDLERNPSGYRHRLHDAFITRFPELSHVPEQNVVNQYRVIVNNNRVALPTRQQIFQEVSLELGLESSNYRTSQRSNTSTPPVRHSMNPVVRRSLVTGDVDPIYNEALTAFQVAFTEYAEILPDARPRIPKLKFTSATTNIIAAVDRILADRLASEITATEVHSLIYVAAATVIRLHNQHLRANNRSMRRRTLPFWVFRLNKRVEKLRKEIGRVTQALLGNPSPRVHRCVANIIGNYHLSNDMPIEEILEVLKQKLAVCSNRIRRYQKSCQRRTDNTLFFQNQRGFYKNLINSGRESNLNLDQAEDFWRSVWSESSRCNLEAAWLPHLMRSCEALPEMTMPDVTEVDVKAVLDKAGNWKAPGVDKIYNFWLKRFKSTHRILANQFNQMIADPHLVPPFFTKGITFLIPKEQGASCPSKCRPITCLPTIYKVFTSVLCANISKHLDVHKLIAEEQKGCAKGSRGCKEQLIIDTVAVKQAVHQKRNISTAYIDYKSAFDSISHSWLLQVLRLYKINPNVVLLLRTVMKNWSTKLSVSSQTSGEIPIRRGIFQGDSLSPLWFCLALNPLSHLLHESKYGFQVKHGILSKCTLSHLMYIDDIKLYAKDENQLRSLLDITIQFSRDIGMQLGLEKCRIKTIVRGKHTDNEGYSQNNIRIEGMDSDDVYKYLGILQATTPAVAIMKSKLLGEFERRLDLVLKTKLYGKNKIMAINTFAIPVLLYTFGVIQWSNTDLESVNRRVRVVLANNNMHNRAAEKLRITIPRHQGGRGVLDLKTMHYNQVHSLREFFYEKQSSSQIHQATVMADNKLSPLNLRSREWDPMSNVTSVQQKIDMWKEKPIHGGHIKNLLLSGIDIEASNKWLTNGVLFYETEAFLTSIQDASLPTKNYKRYILHDSSITNSSCRLCNCEEETIQHITSACRMLSGTEYTNRHNSVCKILHQNLALKYNLVATYHPYYKYTPQRILENDRVKLLWDHTIATDHSVNHNRPDLVLLLKEERACFIIDVAIPLDRNTVEKQHEKIRNYGPLADDMKQTWRLQKIQVVPVIISATGLVPQNLHKALKTLDLRAGLYMEMQKAVILATCAIVRRVLSGNNLT

SEQ ID NO: 13924 - protein, 1211 aa, Hermetia illucens
MNCSDVTLYFSGSPPNTFPTFGGNHGALQHWGSVAGLTASPILVGIKIGENNLNSLNGTPGTRRQYPTRLRVVQQHQSGSSPLDVLAVMPSTTRDGRPRRRMVWTNQLNEFIVRAYYRVTDLERNPSGYRHRLHDAFITRFPELSHVPEQNVVNQYRVIVNNNRVALPTRQQIFQEVSLELGLESSNYRTSQRSNTSTPPVRHSMNPVVRRSLVTGDVDPIYNEALTASQVAFTEYAEILPDARPRIPKLKFTSATTNIIAAIDRILADRLAGEITATEVHSLIYVAAATVIRLHNQHLRANNRGMRRRTLPFWVFRLNKRVEKLRKEIGRVTQALLGNPSPRVHRCVANIIGNYHLSNDMPIEEILEVLKQKLAVCSNRIRRYQKSFQRRTDNTLFFQNQRGFYKNLINSGRESNLNLDQAEDFWKSVWSESSRCNLEAAWLPHLMRSCEALPEMTMPDVTEVDVKAVLDKAGNWKAPGVDKIHNFWLKRFKSTHRILASQFNQMIADPDLVPPFFTKGITFLIPKEQGVSCPAKCRPITCLPTIYKVFTSVLCANISKHLDVHKLIAEEQKGCAKGSRGCKEQLIIDTVAVKQAVHQKRNISTAYIDYKSAFDSISHSWLLQVLRLYKINPNVVLLLRTVMKNWSTKLSVSSQTSGEIPIRRGIFQGDSLSPLWFCLALNPLSHLLHESKYGFQVKHGILSKCTLSHLMYIDDIKLYAKDENQLRSLLDITIQFSRDIGMQLGLEKCRIKTIVRGKHTDNEGYSHNNIRIEGMDSDDVYKYLGILQATTPAVAIIKSKLLGEFERRLDLVLKTELYGKNKIMAINTFAIPVLLYTFGVIQWSNTDLESVNRRVRVVLANNNMHNRAAEKLRITIPRHQGGRGVLDLKTLHYNQVHSLREFFYEKQSSSQIHQATVMADNKLSPLNLRSREWDPMSNVTSVQQKIDMWKEKPIHGGHIKNLLLSGIDIEASNKWLTNGVLFYETEAFLTSIQDASLPTKNYKRYILHDSSITNSSCRLCNCEEETIQHITSACRMLSGTEYTNRHNSVCKILHQNLALKYNLVATYHPYYKYTPQRILENDRVKLLWDHTIATDHSVNHNRPDLVLLLKEERACFIIDVAVPLDRNTVEKQHEKIRNYGPLADDMKQTWRLQKIQVVPVIISATGLVPQNLHKALKTLDLRAGLYMEMQKAVILATCAIVRRVLSGNNLT

SEQ ID NO: 13925 - protein, 1123 aa, Hermetia illucens
MPSTTRDGRPRRRMVWTNQLNEFIVRAYYRVTDLERNPSGYRHRLHDAFITRFPELSHVPEQNVVNQYRVIVNNNRVALPTRQQIFQEVSLELGLESSNYRTSQRSNTSTPPVRHSMNPVVRRSLVTGDVDPIYNEALTAFQVAFTEYAKILPDAWPRIPKLKFTSATANIIAAVDRILADRLASEITATEVHSLIYVAAATVIRLHNQHLRANNIGMRRRTLPFWVFRLNKRVEKLRKEIGRVTQALLGNPSPRVHRCVANIIGNYHLSNDMPIEEILEVLKQKLAVCSNRIRRYQKSFQRRTDNTLFFQNERGFYKNLINSGRESNLNLDQAEDFWRSVWSESSRCNLEAAWLPHLMRSCEALPVMTMPDVTEVDVKAVLDKAGNWKAPGVDKIHNFWLKRFKSTHRILANQFNQMIADPDLVPPFFTKGITFLIPKEQGVSCPSKCRPITCLPTIYKVFTSVLCANISKHLDVHKLIAEEQKGCAKGSRGCKEQLIIDTVAVKQAVHQKRNISTAYIDYKSAFDSISHSWLLQVLRLYKINPNVVLLLRTVMKNWSTKLSVSSQTSGEIPIRRGIFQGDSLSPLWFCLALNPLSHLLHESKYGFQVKHGILSKCTLSHLMYIDDIKLYAKDENQLRSLLDITIQFSRDIGMQLGLEKCRIKTIVRGKHTDNEGYSQNNIRIEGMDSDDVYKYLGILQATTPAVAIIKSKLLGEFERRLDLVLKTELYGKNKIMAINTFAIPVLLYTFGVIQWSNTDLESVNRRVRVVLANNNMHNRAAEKLRITIPRHQGGRGVLDLKTMHYNQVHSLREFFYEKQSSSQIHQATVMADNKLSPLNLRSREWDPMSNVTSVQQKIDMWKEKPIHGGHIKNLLLSGIDIEASNKWLTNGVLFYETEAFLTSIQDASLPTKNYKRYILHDSSITNSSCRLCNCEEETIQHITSASRMLSGTEYTNRHNSVCKILHQNLALKYNLVATYHPYYKYTPQRILENDRVKLLWDHTIATDHSVNHNRPDLVLLLKEERACFIIDVAVPLDRNTVEKQHEKIRNYGPLADDMKQTWRLQKIQVVPVIISATGLVPQNLHKALKTLDLRAGLYMEMQKAVILATCAIVRRVLSGNNLT

SEQ ID NO: 13926 - protein, 1184 aa, Hermetia illucens
MVVPRGWGWRDRGWFLVGVNPTRARCCSAVRAAELRRTCLSKIFHLRVRTKKKKKKKKGIYIYIYGRDGRPRRRMVWTNQLNEFIVRAYYRVTDLERNPSGYRHRLHDAFITRFPELSHVPEQNVVNQYRVIVNNNRVALPTRQQIFQEVSLELGLESSNYRTSQRSNTSTPPVRHSMNPVVRRSLVTGDVDPIYNEALTAFQVAFTEYAEILPDARPRIPKLKFTSATTNIIAAVDRILADRLASEITVTEVHSLIYIAAATVIRLHNQHLRANNRSMRRRTLPFWVFRHNKRVEKLRKEIGRVTQALLGNPSPRVHRCVANIIGNYHLSNDMPIEEILEVLKQKLAVCSNRIRRYQKSFQRRTDNTLFFQNQRGFYKNLINSGRESNLNLDQAEDFWRSVWSESSRCNLEAAWLPHLMRSCEALPEMTMPDVTEVDVKAVLDKAGNWKAPGVDKIHNFWLKRFKSTHRILANQFNQMIADPDLVPPFFTKGITFFIPKEQGASCPSKCRPITCLPTIYKVFTSVLCANISKHLDVHKLIAEEQKGCAKGSRGCKEQLIIDTVAVKQAVHQKRNISTAYIDYKSAFDSISHSWLLQVLRLYKINPNVVLLLRTVMKNWSTKLSVSSQTSGEIPIRRGIFQGDSLSPLWFCLALNPLSHLLHESKYGFQVKHGILSKCTLSHLMYIDDIKLYAKDENQLRFLLDITIQFSRDIGMQLGLEKCRIKIIVRGKHTDNEGYSQNNIRIEGMDSDDVYKYLGILQATTPAVAIIKSKLLGEFERRLDLVLKTELYGKNKIMAINTFAIPVLLYTFGVIQWSNTDLESVNRRVRVVLANNNMHNRAAEKLRITIPRHQGGRGVLDLKTLHYNQVHSLREFFYEKQSSSQIHQATVMADNKLSPLNLRSREWDPMSNVTSVQQKIDMWKEKPIHGGHIKNLLLSGIDIEASNKWLTNGVLFYETEAFLTSIQDASLPTKNYKRYILHDSSITNSSCRLCNCEEETIQHITSACRMLSGTEYTNRHNSVCKILHQNLALKYNLVATYHPYYKYTPQRILENDRVKLLWDHTIATDHSVNHNRPDLVLLLKEERACFIIDVAVPLDRNTVEKQHEKIRNYGPLADHMKQTWRLQKIEVVPVVISATGLVPQNLHKALKTLDLRAGLYMEMQKAVILATCAIVRRVLSGNNLT

SEQ ID NO: 13927 - protein, 1123 aa, Hermetia illucens
MPSTTRDGRPRRRMVWTNQLNEFIVRAYYRVTDLERNPSGYRHRLHDAFITRFPELSHVPEQNVVNQYRVIVNNNRVALPTRQQIFQEVSLELGLESSNYRTSQRSDISTPPVRHSMNLVVRRSLVTGDVDPIYNEALTAFQVAFTEYAEILPDARPKIPKLKFTSATTNIIAAVDRILADRLASEITATEVHSLIYVAAATVIRLHNQHLRANNRGMRRRTLPFWVFRLNKRVEKLRKEIGRVTQALLGNPSPRVHRCVANIIGNYHLSNDMPIEEILEVLKQKLAVCSNRIRRYQKSFQRRTDNTLFFQNQRGFYKNLINSGRESNLNLDQAEDFWRSVWSESSRCNLEAAWLPHLMRSCEALPEMTMPDVTEVDVKAVLDKAGNWKAPGVDKIHNFWLKRFKSTHRILANQFNQMIADPDSVPPFFTKGITFLIPKEQGFSCPSKCRPITCLPTIYKVFTSVLCANISKHLDVHKLIAEEQKGCAKGSRGCREQLIIDTVAVKQAVHQKRNISTAYIDYKSAFDSISHSWLLQVLRLYKINPNVVLLLRTVMKNWSTKLSVSSRTSGEIPIRRGIFQGDSLSPLWFCLALNPLSHLLHESKYGFQVKHGILSKCTLSHLMYIDDIKLYAKDENQLRSLLDITIQFSRDIGMQLGLEKCRIKTIVRGKHTDNEGYSQNNIRIEGMDSDDVYKYLGILQATTPAVAIIKSKLLGEFERRLDLVLKTELYGKNKIMAINIFAIPVLLYTFGVIQWSNTDLESVNRRVRVVLANNNMHNRAAEKLRLTIPRHQGGRGVLDLKTLHYNQVHSLREFFYEKQSSSQIHQATVMADNKLSPLNLRSREWDPMSNVTSVQQKIDMWKEKPIHGGHIKNLLLSGIDIEASNKWLTNGVLFYETEAFLTSIQDASLPTKNYKRYILHDSSITNSSCRLCNCEEETIQHITSACRMLSGTEYTNRHNSICKILHQNLALKYNLVATYHPYYKYTPQRILENDRVKLLWDHTIATDHSVNHNRPDLVLLLKEERACFIIDVAVPLDRNTVEKQHEKIRNYGPLADDMKQTWRLQKIQVVPVIISATGLVPQNLHKALKTLDLRAGLYMEMQKAVILATCAIVRRVLSGNNLT

SEQ ID NO: 13928 - protein, 1007 aa, Hermetia illucens
MNPVVRRSLVTGDVDPIYNEALTAFQVAFTEYAEILPDARPRIPKLKFTSATANIIAAVDRILADRLASEITATEVHSLIYVAAATVIRLHNQHLRANNRGMRRRTLPFWVFRLNKRVEKLRKEIGRVTQALLGNPSPRVHRCVANIIGNYHLSNDMPIEEILEVLKQKLAVCSNRIRRYQKSFQRRTDNTLFFQNQRGFYKNLINSGRESNLNLDQAEDFWRSVWSESSRCNLEAAWLPHLMRSCEALPEMTMPDVTEVDVKAVLDKAGNWKAPGVDKIHNFWLKRFKSTHRILANQFNQMIADPDLVPPFFTKGITFLIPKEQGVSCPSKCRPITCLPTIYKVFTSVLCANISKHLDVHKLIAEEQKGCAKGSRGCKEQLIIDTVAVKQAVHQKRNISTAYIDYKSAFDSISHSWLLQVLRLYKINPNVVLLLRTVMKNWSTKLSVSSQTSGEIPIRRGIFQGDSLSPLWFCLALNPLSHLLHESKYGFQVKHGILSKCTLSHLMYIDDIKLYAKDENQLRSLLDITIQFSRDIGMQLGLEKCRIKTIVRGKHTDNEGYSQNNIRIEGMDSDDVYKYLGILQATTPAVAIMKSKLLGEFERRLDLVLKTELYGKNKIMAINTFAIPVLLYTFGVIQWSNTDLESVNRRVRVVLANNNMHNRAAEKLRITIPRHQGGRGVLDLKTLHYNQVHSLREFFYEKQSSSQIHQATVMADNKLSPLNLRSREWDPMSNVTSVQQKIDMWKEKPIHGGHIKNLLLSGIDIEASNKWLTNGVLFYETEAFLTSIQDASLPTKNYKRYILHDSSITNSSCRLCNCEEETIQHITSACRMLSGTEYTNRHNSVCKILHQNLALKYNLVATYHPYYKYTPQRILENDRVKLLWDHTIATDHSVNHNRPDLVLLLKEERACFIIDVAVPLDRNTVEKQHEKIRNYGPLADDMKQTWRLQKIQVVPVIISATGLVPQNLHKALKTLDLRAGLYMEMQKAVILATCAIVRRVLSGNNLT

SEQ ID NO: 13929 - protein, 1123 aa, Hermetia illucens
MPSTTRDGRPRRRMVWTSQLNEFIVRAYYRVTDLERNPSGYRHRLHDAFITRFPELSHVPEQNVVNQYRVIVNNNRVALPTRQQIFQEVSLELGLESSNYRTSQRSNTSTPPVRHSMNPVVRRSLVTGDVDPIYNEALTAFQVAFTEYAEILPDARPRIPKLKFTSATTNIIAAVDRILADRLASEITATEVHSLIYVAAATVIRLHNQHLRANNRGMRKRTLPFWVFRLNKRVEKLRKEIGRVTQALLGNPSPRVHRCVANIIGNYHLSNDMPIEEILEVLKQKLAVCSNRIRRYQKSFQRRTDNTLFFQNQRGFYKNLINSGRESNLNLDQAEDFWRSVWSESSRCNLEAAWLPHLMRSCEALPEMTMPDVTEVDVKAVLDKAGNWKAPGVDKIHNFWLKRFKSTHRILANQFNQMIADPDLVPPFFTKGITFLIPKEQGVSCPSKCRPITCLPTIYKVFTSVLCANISKHLDVHKLIAEEQKGCAKGSRGCKEQLIIDTVAVKQAVHQKRNISTAYIDYKSAFDSISHSWLLQVLRLYKINPNVVLLLRTVMKNWSTKLSVSSQTSGEIPIRRGIFQGDSLSPLWFCLALNPLSHLLHESKYGFQVKHGILSKCTLSHLMYIDDIKLYAKDENQLRSLLDITIQFSRDIGMQLGLEKCRIKTIVRGKHTDNEGYSQNNIRIEGMDSDDVYKYLGILQATTPAVAIIKSKLLGEFERRLDLVLKTELYGKNKIMAINTFAIPVLLYTFGVIQWSNTDLESVNRRVRVVLANNNMHNRAAEKLRITIPRHQGGRGVLDLKTLHYNQVHSLREFFYEKQSSSQIHQATVMADNKLSPLNLRSREWDPMSNVTSVQQKIDMWKEKPIHGGHIKNLLLSGIDIEASNKWLTNGVLFYETEAFLTSIQDASLPTKNYKRYILHDSSITNSSCRLCNCEEETIQHITSACRMLSGTEYTNRHNSVCKILHQNLALKYNLVATYHPYYKYTPQRILENDRVKLLWDHTIATDHSVNHNRPDLVLLLKEERACFIIDVAVPLDRNTVEKQHEKIRNYGPLADDMKQTWRLQKIQVVPVIISATGLVPQNLHKALKTLDLRAGLYMEMQKAVILATCAIVRRVLSGNNLT

SEQ ID NO: 13930 - protein, 906 aa, Hermetia illucens
MRRRTLPFWVFRLNKRVEKLRKEIGRVTQALLGNPSPRVHRCVANIIGNYHLSNDMPIEEILEVLKQKLAVCSNRIRRYQKSFQRRTDNTLFFQNQRGFYKNLINSGRDSNLNLDQAEDFWRSVWSESSRCNLEAAWLPHLMRSCEALPEMTMPDVTEVDVKAVLDKAGNWKAPGVDKIHNFWLKRFKSTHRILANQFNQMIADPDLVPPFFTKGITFLIPKEQGVSCPSKCLPITCLPTIYKVFTSVLCANISKHLDVHKLIAEEQKGCAKGSRGCKEQLIIDTVAVKQAVHQKRNISTAYIDYKSAFDSISHSWLLQVLRLYKINPNVVLLLRTVMKHWSTKLSVSSQTSGEIPIRRGIFQGDSLSPLWFCLALNPLSHLLHESKYGFQVKHGILSKCTLSHLMYIDDIKLYAKDENQLRSLLDITIQFSRDIGMQLGLEKCRIKTIVRGKHTDNEGYSQNNIRIEGMDSDDVYKYLGILQATTPAVAIIKSKLLGEFERRLDLVLKTELYGKNKIMAINTFAIPVLLYTFGVIQWSNTDLESVNRRVRVVLANNNMHNRAAEKLRITIPRHQGGRRVLDLKTLHYNQVHSLREFFYEKQSSSQIHQATVMADNKLSPLNLRSREWDPMSNVTSVQQKIDMWKEKPIHGGHIKNLLLSGIDIEASNKWLTNGVLFYETEAFLTSIQDASLPTKNYKRYILHDSSITNSSCRLCNCEEETIQHITSACRMLSGTEYTNRHNSVCKILHQNLALKYNLVATYHPYYKYTPQRILENDRVKLLWDHTIATDHSVNHNRPDLVLLLKEERACFIIDVAVPLDRNTVEKQHEKIRNYGPLADDMKQTWRLQKIQVVPVIISATGLVPQNLHKALKTLDLRAGLYMEMQKAVILATCAIVRRVLSGNNLT

SEQ ID NO: 13931 - protein, 1123 aa, Hermetia illucens
MPSTTRDGRPRRRMVWTNQLNEFIVRAYYRVTDLERNPSGYRHRLHDAFITRFPELSHVPEQNVVNQYRVIVNNNRVALPTRQQIFQEVSLELGLESSNYRTSQRSNTSTPPVRHSMNPVVRRSLVTGDVDPIYNEALTAFQVAFTEYAEILPDARPRIPKLKFTSATTNIIAAVDRILADRLASEITATEVHSLIYVAAATVIRLHNQHLRANNRGMRRRTLPFWVFRLNKRVEKLRKEIGRVTQALLGNPSPRVHRCVANIIGNYHLSNDMPIEEILEVLKQKLAVCSNRIRRYQKSFQRRTDNTLFFQNQRGFYKNLINSGRESNLNLDQAEDFWRSVWSESSRCNLEAAWLPHLMRSCEALPEMTMPDVTEVDVKAVLDKAGNWKAPGVDKIHNFWLKRFKSTHRILANQFNQMIADPDLVPPFFTKGITFLIPKEQGVSCPSKCRPITCLPTIYKVFTSVLCANISKHLDVHKLIAEEQKGCAKGSRGCKEQLIIDTVAVKQAVHQKRNISTAYIDYKSAFDSISHSWLLQVLRLYKINPNVVLLLRTVMKNWSTKLSVSSQTSGEIPIRRGIFQGDSLSPLWFCLALNPLSHLLHESKYGFQVKHGILSKCTLSHLMYIDDIKLYAKDENQLRSLLDITIQFSRDIGMQLGLEKCRIKTIVRGKHTDNEGYSQNNIRIEGMDSDDVYKYLGILQATTPAVAIIKSKLLGEFERRLDLVLKTELYGKNKIMAINTFAIPVLLYTFGVIQWSNTDLESVNRRVRVVLANNNMHNRAAEKLRITIPRHQGGRGVLDLKTLHYNQVHSLREFFYEKQSSSQIHQATVMADNKLSPLNLRSREWDPMSNVTSVQQKIDMWKEKPIHGGHIKNLLLSGIDIEASNKWLTNGVLFYETEAFLTSIQDASLPTKNYKRYILHDSSITNSSCRLCNCEEETIQHITSACRMLSGTEYTNRHNSVCKILHQNLALKYNLVATYHPYYKYTPQRILENDRVKLLWDHTIATDHSVNHNRPDLVLLLKEERACFIIDVAVPLDRNTVEKQHEKIRNYGPLADDMKQTWRLQKIEVVPVIISATGLVPQNLHKALKTLDLRAGLYMEMQKAVILATCAIVRRVLSGNNLT

SEQ ID NO: 13932 - protein, 1007 aa, Hermetia illucens
MNPVVRRSLVTGDVDPIYNEALTAFQVAFTEYAEILPDARPRIPKLKFTSATTNIIAAVDRILADRLASEITATEVHSLIYVAAATVIRLHNQHLRANNRGMRRRTLPFWVFRLNKRVEKMRKEIGRVTQALLGNPSPRVHRCVANIIGNYHLSNDMPIEEILEVLKQKLAVCSNRIRRYQKSFQRRTDNTLFFQNQRGFYKNLINSGRESNLNLDQAEDFWRSVWSESSRCNLEAAWRPHLMRSCEALPEMTMPDVTEVDVEAALDKAGNWKAPGVDKIHNFWLKRFKSTHRILANQFNQMIADPDLVPPFFTKGITFLIPKEQGVSCPSKCRPITCLPTIYKVFTSVLCANISKHLDVHKLIAEEQKGCAKGSRGCKEQLIIDTVAVKQAVHQKRNISTAYIDYKSAFDSISHSWLLQVLRLYKINPNVVLLLRTVMKNWSTKLSVSSQTSGEIPIRRGIFQGDSLSPLWFCLALNPLSHLLHESKYGFQVKHGILSKCTLSHLMYIDDIKLYAKDENQLRSLLDITIQFSRDIGMQLGLEKCRIKTIVRGKHTDNEGYSQNNIRIEGMDSDDVYKYLGILQATTPAVAIIKSKLLGEFERRLDLVLKTELYGKNKIMAINTFAIPVLLYTFGVIQWSNTDLESVNRRVRVVLANNNMHNRAAEKLRITIPRHQGGRGVLDLKTLHYNQVHSLREFFYKKQSSSQIHQATVMADNKLSPLNLRSREWDPMSKVTSVQQKIDMWKEKPIHGGHIKNLLLSGIDIEASNKWLTNGVLFYETEAFLTSIQDASLPTKNYKRYILHDSSITNSSCRLCNCEEETIQHITSACRMLSGTEYTNRHNSVCKILHQNLALKYNLVATYHPYYKYTPQRILENDRVKLLWDHTIATDHSVNHNRPDLVLLLKEERACFIIDVAVPLDRNTVEKQHEKIRNYGPLADDMKQTWRLQKIQVVPVIISATGLVPQNLHKALKTLDLRAGLYMEMQKAVILATCAIVRRVLSGNNLT

SEQ ID NO: 13933 - protein, 1120 aa, Hermetia illucens
MFWRLCRQPPGTGDLGVVWFGRTNSTNLSSAPITVSRIWNGIHQGTDIDYIKKKKNKKKKKKKKKKKKKKKKKLALPTRQQIFQEVSLELGLESSNYRTSQRSNTSTPPVRHSMNPVVRRSLVTGDVDPIYNEALTAFQVAFTEYAEILPDARPRIPKLKFTSATTNIIAAVDRILADRLASEITATEVHSLIYVAAATVIRLHNQHLRANNRGMRRRTLPFWVFRLNKRVEKLRKEIGRVTQALLGNPSPRVHRCVANIIGNYHLSNDMPIEEILEVLKQKLAVCCNRIRRYQKSFQRRTDNTLFFQNQRGFYKNLINSGRESNLNLDQAEDFWRSVWSESSRCNLEAAWLPHLMRSCEALPEMTMPDVTEVDVKAVLDKAGNWKAPGVDKIHNFWLKRFKSTHRILANQFNQMIADPDLVPPFFTKGITFLIPKEQGVSCPSKCRPITCLPTIYKVFTSVLCANISKHLDVHKLIAEEQKGCAKGSRGCKEQLIIDTVAVKQAVHQKRNISTAYIDYKSAFDSISHSWLLQVLRLYKINPNVVLLLRTVMKNWSTKLSVSSQTSGEIPIRRGIFQGDSLSPLWFCLALNPLSHLLHESKYGFQVKHGILSKCTLSHLMYIDDIKLYAKDENQLRSLLDITIQFSRDIGMQLGLEKCRIKTIVRGKHTDNEGYSQNNIRIEGMDSDDVYKYLGILQATTPAVAIIKSKLLGEFERRLDLVLKTELYGKNKIMAINTFAIPVLLYTFGVIQWSNTDLESVNRRVRVVLANNNMHNRAAEKLRITIPRHQGGRGVLDLKTLHYNQVHSLREFFYEKQSSSQIHQATVMADNKLSPLNLRSREWDPMSNVTSVQQKIDMWKEKPIHGGHIKNLLLSGIDIEASNKWLTNGVLFYETEAFLTSIQDASLPTKNYKRYILHDSSITNSSCRLCNCEEETIQHITSACRMLSGTEYTNRHNSVCKILHQNLALKYNLVATYHPYYKYTPQRILENDRVKLLWDHTIATDHSVNHNRPDLVLLLKEERACFIIDVAVPLDRNTVEKQHEKIRNYGPLADDMKQTWRLQKIQVVPVIISATGLVPQNLHKALKTLDLRAGLYMEMQKAVILATCAIVRRVLSGNNLT

SEQ ID NO: 13934 - protein, 1211 aa, Hermetia illucens
MNCSDVTLYFSGSPPNTFPIFGGNHGALQHWGSVAGLTASPILVGIKIGENNLNSLNGTPGTRRQYPTRLRVVQQHQSGSSPLDVLAVMPSTTRDGRPRRRMVWTNQLNEFIVRAYYRVTDLERNPSGYRHRLHDAFITRFPELSHVPEQNVVNQYRVIVNNNRVALPTRQQIFQEVSLELGLESSNYRTSQRSETSTPPVRHSMNPVVRRSLLTGDVDPIYNEALTAFQVAFTEYAEILPDARPKIPKLKFTSATTNIIAAVDRILADRLASEITATEVHSLIYVAAATVIRLHNQHLRANNRGMRRRTLPFWVFRLNKRVEKLRKEIGRVTQALLGNPSPRVHRCVANIIGNYHLSNDMPIEEILEVLKQKLAVCSNRIRRYQKSFQRRTDNTLFFQNQRGFYKNLTSSDRESNLDLDQAEDFWRSVWSESSRCNLEAAWLPHLMRSCEALPEMTMPDVTEVDVEAALDKAGNWKAPGVDKMHNFWLKRFKSTHRILANQFNQMIADPDLVPPFFTKGITFLIPKEQGVSCPSKCRPITCLPTIYKVFTSVLCANISKHLDVHKLIAEEQKGCAKGSRGCKERLIIDTVAVKQAVHQKRNISTAYIDYKSAFDSISHSWLLQVLRLYKINPNVVLLLRTVMKNWSTKLSVSSQTSGEIPIRRGIFQGDSLSPLWFCLALNRLSHLLHERKYGFQVKHGILSKCTLSHLMHIDDIKLYAKDENQLRSLLDITIQFSRDIGMQLGLEKCRIKTIVRGKHTDNEGYSQNNIRIEGMDSDDVYKYLGILQATTPAVAIIKSKLLGEFERRLDLVLKTELYGKNKIMAINTFAIPVLLYTFGVIQWSNTDLESVNRRVRVVLANNNMHNRAAEKLRITIPRHQGGRGVLDLKTLHYNQVHSLREFFYEKQSSSQIHQATVMADNKLSPLNLRSREWDPMSNVTSVQQKIDMWKEKPIHGGHIKNLLLSGIDIEASNKWLTNGVLFYETEAFLTSIQDASLPTKNYKRYILHDSSITNSSCRLCNCEEETIQHITSACRMLSGTEYTNRHNSVCKILHQNLALKYNLVATYHPYYKYTPQRTLENDRLKLLWDHTIATDHSVNHNRPDLVLLLKEERACFIIDVAVPLDRNTVEKQHEKIRNYGPLADDMKQTWRLQKIQVVPVIISATGLVPQNLHKALKTLDLRAGLYMEMQKAVILATCAIVRRVLSGNNLT

SEQ ID NO: 13935 - protein, 1123 aa, Hermetia illucens
MPSTTRDGRPRRRMVWTNQLNEFIVRAYYRVTDLERNPSGYRHRLHDAFITRFPELSHVPEQNVVNQYRVIVNNNRVALPTRQQIFQEVSLELGLESSNYRTSQRSNTSTPPVRHSMNPVVRRSLVTGDVDPIYNEALTAFQVAFTEYAEILPDARPKIPKLKFTSATTNIIAAVDRILADRLASEITATEVHSLIYVAAATVIRLHNQHLRANNRGMRRRTLPFWVFRLNKRVEKLRKEIGRVTQALLGNPSPRVHRCVANIIGNYHLSNDMPIEEILEVLKQKLAVCSNRIRRYQKSFQRRTDNTLFFQNQRGFYKNLINSGRESNLNLDQAEDFWRSVWSESSRCNLEAAWLPHLMRSCEALPEMTMPDVTEVDVKAVLDKAGNWKAPGVDKIHNFWLKRFKSTHRILANQFNQMIADPDLVPPFFTKGITFLIPKEQGVSCPSKCRPITCLPTIYKVFTSVLCANISKHLDVHKLIAEEQKGCAKGSRGCKEQLIIDTVAVKQAVHQKRNISTAYIDYKSAFDSISHSWLLQVLRLYKINPNVVLLLRTVMKNWSTKLSVSSQTSGEIPIRRGIFQGDSLSPLWFCLALNPLSHLLHESKYGFQVKHGILSKCTLSHLMYIDDIKLYAKDENQLRSLLDITIQFSRDIGMQLGLEKCRIKTIVRGKHTDNEGYSQNNIRIEGMDSDDVYKYLGILQATTPAVAIIKSKLLGEFERRLDLVLKTELHGKNKIMAINTFAIPVLLYTFGVIQWSNTDLESVNRRVRVVLANNNMHNRAAEKLRITIPRHQGGRGVLDLKTLHYNQVHSLREFFYEKQSSSQIHQATVMADNKLSPLNLRSREWDPMSNVTSVQQKIDMWKEKPIHGGHIKNLLLSGIDIEASNKWLTNGVLFYETEAFLTSIQDASLPTKNYKRYILHDSSITNSSCRLCNCEEETIQHITSACRMLSGTEYTNRHNSVCKILHQNLALKYNLVATYHPYYKYTPQKILENDRVKLLWDHTIATDHSVNHNRPDLVLLLKEERACFIIDVAVPLDRNTVEKQHEKIRNYGPLADDMKQTWRLQKIQVVPVIISATGLVPQNLHKALKTLDLRAGLYMEMQKAVILATCAIVRRVLSGNNLT

SEQ ID NO: 13936 - protein, 1075 aa, Hermetia illucens
MFWRLCRQPPGTGDLGVVWFGRTSLTNLSSAPITVSRIWNGIHQGTDIDYMTRTSQRSNTSTPPVRHSMNPVVRRSLVTGDVDPIYNEALTAFQVAFTEYAEILPDARPRIPKLKFTSATTNIIAAVDRILADRLASEITATEVHSLIYVAAATVIRLHNQHLRANNRGMRRRTLPFWVFRLNKRVEKLRKEIGRVTQALLGNPSPRVHRCAANIIGNYHLSNDTPIEEILEVLKQKLAVCSNRIRRYQKSFQRRTDNTLFFQNQRGFYKNLINSGRESNLNLDQAEDFWRSVWSESSRCNLEAAWLPHLMRSCEALPEMTMPDVTEVDVKAVLDKAGNWKAPGVDKIHNFWLKRFKSTHRILANQFNQMIADPDLVPPFFTKGITFLIPKEQGVSCPSKCRPITCLPTIYKVFTSVLCANISKHLDVHKLIAEEQKGCAKGSRGCKEQLIIDTVAVKQAVHQKRNISTAYIDYKSAFDSISHSWLLQVLRLYKINPNVVLLLRTVMKNWSTKLSVSSQTSGEIPIRRGIFQGDSLSPLWFCLALNPLSHLLHESKYGFQVKHGILSKCTLSHLMYIDDIKLYAKDENQLRSLLDITIQFSRDIGMQLGLEKCRIKTIVRGKHTDNEGYSQNNIRIEGMDSDDVYKYLGILQATTPAVAIIKSKLLGEFERRLDFVLKTELYGKNKIMAINTFAIPVLLYTFGVIQWSNTDLEAVNRRVRVVLANNNMHNRAAEKLRITIPRHQGGRGVLDLKTLHYNQVHSLREFFYEKQSSSQIHQATVMADNKLSPLNLRSREWDPMSNVTSVQQKIDMWKEKPIHGGHIKNLLLSGIDIEASNKWLTNGVLFYETEAFLTSIQDASLPTKNYKRYILHDSSITNSSCRLCNCEEETIQHITSACRMLSGTEYTNRHNSVCKILHQNLALKYNLVATYHPYYKYTPQRILENDRVKLLWDHTIATDHSVNHNRPDLVLLLKEERACFIIDVAVPLDRNTVEKQHEKIRNYGPLADDMKQTWRLQKIQVVPVIISATGLVPQNLHKALKTLDLRAGLYMEMQKAVILATCVIVRRVLSGNNLT

SEQ ID NO: 13937 - protein, 854 aa, Hermetia illucens
MRRRTLPFWVFRLNKRVEKLRKEIGRVTQALHGNPSPRVHRCVANIIGNNHLSNDMPIEEILEVLKQKLAVCSNRIRRCQKSFQRRTDNTLFFQNQRGFYINLTNSSRESNLDLDQTEDFWRSVWSESSRCNLEAAWLPHLMRSCEALPEMTMPDVTEVDVKAALDKAGNWKAPGVDKIHNFWLKRFKSTHRILANQFNQMIADPDLVPPFFTKGITFLIPKEQGVSCPSKCRPITCLPIIYKVFTSVLCANISKHLDVHKLIAEEQKGCAKGSRGCKEQLIIDTVAVKQAVHQKRNISTAYIDYKSAFDSISHSWLLQVLRLYKINPNVVLLLRTVMKNWSTKLSVSSQTSGEIPIRRGIFQGDSLSPLWFCLALNPLSHLLHESKYGFQVKHGILSKCTLSHLMYIDDIKLYAKDENQLRSLLDITIQFSRDIGMQLGLEKCRIKTIVRGKHTDNEGYSQNNIRIEGMDSDDVYKYLGILQATTPAVAIIKSKLLGEFERRLDLVLKTELYGKNKIMAINTFAIPVLLYTFGVIQWSNTDLESVNRRVRVVLANNNMHNRAAEKLRITIPRHQGGRGVLDLKTLHYNQVHSLREFFYEKQSSSQIHQATVMADNKLSPLNLRSREWDPMSNVTSVQQKIDMWKEKPIHGGHIKNLLLSGIDIEASNKWLTNGVLFYETEAFLTSIQDASLPTKNYKRYILHDSSITNSSCRLCNCEEETIQHITSACRMLSGTEYTNRHNSVCKILHQNLALKYNLVATYHPYYKYTPQRILENDRVKLLRDHTIATDRSVNHNRSDLVLLLKEERACFIIDVAVPLDRNTVEKQHEKIRNYGPLADDMKRFSGGISPAELT

SEQ ID NO: 13938 - protein, 1020 aa, Hermetia illucens
MACNTSTPPVRHSMNPVVRRSLVTGDVDPIYNEALTAFQVAFTEYAEILPDARPGIPKLKFTSATTNIIAAVDRILADRLASETTATEVHSLIYVAAATVIRLHNQHLRANNRGMRRWTLPFWVFRLNKRVEKLRKEIGRVTQALLGNPSPRVHRCVANIIGNYHLSNDMPIEEILEVLKQKLAVCSNRIRRYQKSFQRRTDNTLFFQNQREFYKNLINSGRESNLNLDQAEDFWRSVWSESSRCNLEAAWLPHLMRSCEALPEMTMPDVTEVDVKAALDKAGNWKAPGVDKIHNFWLKRFKSTHRILANQFNQMIADPDLVPPFFTKGITFLIPKEQGVSCPSKCRPITCLPTIYKVFTSVLCANISKHLDVHKLIAEEQKGCAKGSRGCKEQLIIDTVAVKQAVHQKRNISPAYIDYKSAFDSISHSWLLQVLRLYKINPNVVLLLRTVMKNWSTKLSVSSQTSGEIPIRRGIFQGDSLSPLWFCLALNPLSHLLHESKYGFQVKHGILSKCTLSHLVYIDDIKLYAKDENQLRSLLDITIQFSRDIGMQLGLEKCRIKTIVRGKHTDNEGYCQNNIRIEGMDSDDVYKYLGILQATTPAGAIMKSKLLGEFERRLDLVLKTELYGKNKIMAINTFAIPVLLYTFGVIQWSNTDLESVNRRVRVVLANNNMHNRAAEKLRITIPRHQGGRGVLDLKTMHYNQVHSLREFFYEKQSSSQIHQATVMADNKLSPLNLRSREWDPMSNVTSVQQKIDMWKEKPIHGGHIKNLLLSGIDIEASNKWLTNGVLFCETEAFLTSIQDASLPTKNYKRYILHDSSITNSSCRLCNCEEETIQRITSACRMLSGTEYNNRHNSVCKILHQNLALKYNLVATYHPYHKYTPQRILENDRVKLLWDHTIATDHSVNHNRPDLVLLLKEERACFIIDVAVPLDRNTVEKQHEKIRNYGPLADDMKQTWRLQKIQVVPVIISATGLVPQNLHKALKMLDLRAGLYMEMQKAVILATCAIVRRVLSGNNLT

SEQ ID NO: 13939 - protein, 1123 aa, Hermetia illucens
MPSTTRDGRPRRRMVWTNQLNEFIVRAYYRVTDLERNPSGYRHRLHDAFITRFPELSHVPEQNVVNQYRVIVNNNRVALPTRQQIFQEVSLELGLESSNYRTSQRSNTSTPPVRHSMNPVVRRSLVTGDVDPIYNEALTAFQVAFTEYAEILPDARPKIPKLKYTSATTNIIAAVDRILADRLASEITATEVHSLIYVAAATVIRLHNQHLRANNRGMRRRTLPFWVFRLNKRVEKLRKEIGRVTQALLGNPSPRVHRCVANIIGNYHLSNDMPIEEILEVLKQKLAVCSNRIRRYQKSFQRRTDNTLFFQNQRGFYKNLINSGRESNLNLDQAEDFWRSVWSESSRCNLEAAWLPHLMRSCEALPEMTMPDVTEVDVKAVLDKAGNWKAPGVDKIHNFWLKRFKSTHRILANQFNQMIADPDLVPPFFTKGITFLIPKEQGVSCPSKCRPITCLPTIYKVFTSVLCANISKHLDVHKLIAEEQKGCAKGSRGCKEQLIIDTVAVKQAVHQKRNISTAYIDYKSAFDSISHSWLLQVLRLYKINPNVVLLLRTVMKNWSTKLSVSSQTSGEIPIRRGIFQGDSLSPLWFCLALNPLSHLLHESKYGFQVKHGILSKCTLSHLMYIDDIKLYAKDENQLRSLLDITIQFSRDIGMQLGLEKCRIKTIVRGKHTDNEGYSQNNIRIEGMDSDDVYKYLGILQATTPAVAIIKSKLLGEFERRLDLVLKTELYGKNKIMAINTFAIPVLLYTFGVIQWSNTDLESVNRRVRVVLANNNMHNRAAEKLRITIPRHQGGRGVLDLKTMHYNQVHSLREFFYEKQSSSQIHQATVMADNKLSPLNLRSREWDPMSNVTSVQQKIDMWKEKPIHGGHIKNLLLSGIDIEASNKWLTNGVLFYETEAFLTSIQDASLPTKNYKRYILHDSSITNSSCRLCNCEEETIQHITSACRMLSGTEYTNRHNSVCKILHQNLALKYNLVATYHPYYKYTPQRILENDRVKLLWDHTIATDHSVNHNRPDLVLLLKEERACFIIDVAVPLDRNTVEKQHEKIRNYGPLADDMKQTWRLQKIQVVPVIISATGLVPQNLHKALKTLDLRAGLYMEMQKAVILATCAIVRRVLSGNNLT

SEQ ID NO: 13940 - protein, 1110 aa, Hermetia illucens
MVWTNQLNEFIVRAYYRVTDLERNPSGYRHRLHDAFITRFPELSHVPEQNVVNQYRVIVNNNRVALPTRQQIFQEVSLELGLESSNYRTSQRSNTSTPPVRHSMNPVVRRSLVTGDVDPIYNEALTAFQVAFTEYAEILPDARPRIPKLKFTSATTNIIAAVDRILADRLASEITATEVHSLIYVAAATVIRLHNQHLRANNRGMRRRTLPFWVFRLNKRVEKLRKEIGRVTQALLGNPSPRVHRCVANIIGNYHLSNDMPIEEILEVLKQKLAVCSNRIRRYQKSFQRRTDNTLFFQNQRGFYKNLINSGRESNLNLDQAEDFWRSVWSESSRCNLEAAWLPHLMRSCEALPEMTMPDVTEVDVKAVLDKAGNWKAPGVDKIHNFWLKRFKSTHRILANQFNQMIADPDLVPPFFTKGITFLIPKEQGVSCPSKCRPITCLPTIYKVFTSVLCANISKHLDVHKLIAEEQKGCAKGSRGCKEQLIIDTVAVKQAVHQKRNISTAYIDYKSAFDSISHSWLLQVLRLYKINPNVVLLLRTVMKNWSTKLSVSSQTSGEIPIRRGIFQGDSLSPLWFCLALNPLSHLLHESKYGFQVKHGILSKCTLSHLMYIDDIKLYAKDENQLRSLLDITIQFSRDIGMQLGLEKCRIKTIVRGKHTDNEGYSQNNIRIEGMDSDDVYKYLGILQATTPAVAIIKSKLLGEFERRLDLVLKTELYGKNKIMAINTFAIPVLLYTFGVIQWSNTDLESVNRRVRVVLANNNMHNRAAEKLRITIPRHQGGRGVLDLKTMHYNQVHSLREFFYKKQSSSQIHQATVMADNKLSPLNLRSREWDPMSNVTSVQQKIDMWKEKPIHGGHIKNLLLSGIDIEASNKWLTNGVLFYETEAFLTSIQDASLPTKNYKRYILHDSSITNSSCRLCNCEEETIQHITSVCRMLSGTEYTNRHNSVCKILHQNLALKYNLVATYHPYYKYTPQRILENDRVKLLWDHTIATDHSVNHNRLDLVLLLKEERACFIIDVAVPLDRNTVEKQHEKIRNYGPLADDMKQTWRLQKIQVVPVIISATGLVPQNLHKALKTLDLRAGLYMEMQKAVILATCAIVRRVLSGNNLT

SEQ ID NO: 13941 - protein, 1007 aa, Hermetia illucens
MNPVVRRSLVTGDVDPIYNEALTAFQVAFTEYAEILPDARPRIPKLKFTSATTNIIAAVDRILADRLASEITATEVHSLIYVAAATVIRLHNQHLRANNRGMRRRTLPFWVFRLNKRVEKLRKEIGRVTQALLGNPSPRVHRCVANIIGNYHLSNDMPIEEILEVLKQKLAVCSNRIRRYQKSFQRRADNTLFFQNQRGFYKNLINSGRESNLNLDQAEDFWRSVWSESSRCNLEAAWLPHLMRSCEALPEMTMPDVTEVDVKAVLDKAGNWKAPGVDKIHNFWLKRFKSTHRILANQFNQMIADPDLVPPYFTKGITFLIPKEQGVSCPSKCRPITCLPTIYRVFTSVLCANISKHLDVHKLIAEEQKGCAKGSRGCKEQLIIDTVAVKQAVHQKRNISTAYIDYKSAFDSISHSWLLQVLRLYKINPNVVLLLRTVMKNWSTKLSVSSQTSGEIPIRRGIFQGDSLCPLWFCLALNPLSHLLHESKYGFQVKHGILSKCTLSHLMYIDDIKLYAKDENQLRSLLDITIQFSRDIGMQLGLEKCRIKTIVRGKHTDNEGYSQNNIRIEGMDSDDVYKYLGILQATTPAVAIMKSKLLGEFERRLDLVLKTELYGKNKIMAINTFAIPVLLYTFGVIQWSNTDLESVNRRVRVVLANNNMHNRAAEKLRITIPRHQGGRGVLDLKTLHYNQVHSLREFFYEKQSSSQIHQATVMADNKLSPLNLRSREWDPMSNVTSVQQKIDMWKEKPIHGGHIKNLLLSGIDIEASNKWLTNGVLFYETEAFLTSIQDASLPTKNYKRYILHDSSITNSSCRLCNCEEETIQHITSACRMLSGTEYTNRHNSVCKILHQNLALKYNLVATYHPYYKYTPQRILENDRVKLLWDHTIATDHSVNHNRPDLVLLLKEERACFIIDVAVPLDRNTVEKQHEKIRNYGPLADDMKQTWRLQKIQVVPVIISATGLVPQNLHKALKTLDLRAGLYMEMQKAVILATCAIVRRVLSGNNLT

SEQ ID NO: 13942 - protein, 1123 aa, Hermetia illucens
MPSTTRDGRPRRRMVWTSQLNEFIVRAYYRVTDLERNPSGYRHRLHDAFITRFPELSHVPEQNVVNQYRVIVNNNRVALPTRQQIFQEVSLELGLESSNYRTSQRSNTSTPPVRHSMNPVVRRSLVTGDVDPIYNEALTAFQVAFTEYAEILPDARPRIPKLKFTSATTNIIAAVDRILADRLASEITATEVHSLIYVAAATVIRLHNQHLRANNRGMRRRTLPFWVFRLNKRVEKLRKEIGRVMQALLGNPSPRVHRCVANIIGNYHLSNDMPIEEILEVLKQKLAVCSNRIRRYQKSFQRRTDNTLFFQNQRGFYKNLINSGRESNLNLDQAEDFWRSVWSESSRCNLEAAWLPHLMRSCEALPEMTMPDVTEVDVKAVLDKAGNWKAPGVDKIHNFWLKRFKSTHRILANQFNQMIADPDLVPPFFTKGITFLIPKEQGVSCPSKCRPITCLPTIYKVFTSVLCANISKHLDVHKLIAEEQKGCAKGSRGCKEQLIIDTVAVKQAVHQKRNISTAYIDYKSAFDSISHSWLLQVLRLYKINPNVVLLLRTVMKNWSTKLSVSSQTSGEIPIRRGIFQGDSLSPLWFCLALNPLSHLLHESKYGFQVKDGILSKCTLSHLMYIDDIKLYAKDENQLRSLLDITIQFSRDIGMQLGLEKCRIKTIVRGKHTDNEGYSQNNIRIEGMDSDDVYKYLGILQATTPAVAIIKSKLLGEFERRLDLVLKTELYGKNKIMAINTFAIPVLLYTFGVIQWSNTDLESVNRRVRVVLANNNMHNRAAEKLRITIPRHQGGRGVLDLKTLHYNQVHSLREFFYEKQSSSQIHQATVMADNKLSPLNLRSREWDPMSNVTSVQQKIDMWKEKPIHGGHIKNLLLSGIDIEASNKWLTNGVLFYETEAFLTSIQDASLPTKNYKRYILHDSSITNSSCRLCNCEEETIQHITSACRMLSGTEYTNRHNSVCKILHQNLALKYNLVATYHPYYKYTPQRILENDRVKLLWDHTIATDHSVNHNRPDLVLLLKEERACFIIDVAVPLDRSTVEKQHEKIRNYGPLADDMKQTWRLQKIQVVPVIISATGLVPQNLHKALKTLDLRAGLYMEMQKAVILATCAIVRRVLSGNNLT

SEQ ID NO: 13943 - protein, 1123 aa, Hermetia illucens
MPSTTRDGRPRRRMVWTNQLNEFIVRAYYRVTDLERNPSGYRHRLHDAFITRFPELSHVPEQNVVNQYRVIVNNNRVALPTRQQIFQEVSLELGLESSNYRTSQRSNTSTPPVRHSMNPVVRRSLVTGDVDPIYKEALTAFQVAFTEYAEILPDARPRIPKLKFTSATTNIIAAVDRILADRLASEITATEVHSLIYVAAATVIRLHNQHLRANNRGMRRRTLPFWVFRLNKRVEKLRKEIGRVTQALLGNPSPRVHRCVANIIGNYHLSNDMPIEEILEVLKQKLAVCSNRIRRYQKSFQRRTDNTLFFQNQRGFYKNLINSGRESNLNLDQAEDFWRSVWSESSRCNLEAAWLPHLMRSCEALPEMTMPDVTEVDVKAVLDKAGNWKAPGVDKIHNFWLKRFKSTHRILANQFNQMIADPDLVPPFFTKGITFLIPKEQGVSCPSKCRPITCLPTIYKVFTSVLCANISKHLDVHKLIAEEQKGCAKGSRGCKEQLIIDTVAVKQAVHQKRNISTAYIDYKSAFDSISHSWLLQVLRLYKINPNVVLLLRTVMKNWSTKLSVSSQTSGEIPIRRGIFQGDSLSPLWFCLALNPLSHLLHESKYGFQVKHGILSKCTLSHLMYIDDIKLYAKDENQLRSLLDITIQFSRDIGMQLGLEKCRIKTIVRGKHTDNEGYSQNNIRIEGMDSDDVYKYLGILQATTPAVAIMKSKLLGEFERRLDLVLKTELYGKNKIMAINTFAIPVLLYTFGVIQWSNTDLESVNRRVRVVLANNNMHNRAAEKLRITIPRHQGGRGVLDLKTLHYNQVHSLREFFYEKQSSSQIHQATVMADNKLSPLNLRSREWDPMSNVTSVQQKIDMWKEKPIHGGHIKNLLLSGIDIEASNKWLTNGVLFYETEAFLTSIQDASLPTKNYKRYILHDSSITNSSCRLCNCEEETIQHITSACRMLSGTEYTNRHNSVCKILHQNLALKYNLVATYHPYYKYTPQRILENDRVKLLWDHTIATDHSVNHNRPDLVLLLKEERACFIIDVAVPLDRNTVEKQHEKIRNYGPLADDMKQTWRLQKIQVVPVIISATGLVPQNLHKALKTLDLRAGLYMEMQKAVILATCAIVRRVLSGNNLT

SEQ ID NO: 13944 - protein, 1123 aa, Hermetia illucens
MPSTTRDGRPRRRMVWTNQLNEFIVRAYYRVTDLERNPSGYRHRLHDAFITRFPELSHVPEQNVVNQYRVIVNNNRVALPTRQQIFQEVSLELGLESSNYRTSQRSDTSTPPVRHSMNPVVRRSLVTGDVDPIYNEALTAFQVAFTEYAEILPDARPRIPKLKFTSATTNIIAAVDRILADRLASEITATEVHSLIYVAAATVIRLHNQHLRANNRGMRRRTLPFWVFRLNKRVEKLRKEIGRVTQALLGNPSPRVHRCVANIIGNYHLSNDMPIEEILEVLKQKLAVCSNRIRRYQKSFQRRTDNTLFFQNQRGFYKNLINSGRESNLNLDQAEDFWRSVWSESSRCNLEAAWLPHLMRSCEALPEMTMPDVTEVDVKAVLDKAGNWKAPGVDKIHNFWLKRFKSTHRILANQFNQMIADPDLVPPFFTKGITFLIPKEQGASCPSKCRPITCLPTIYRVFTSVLCANISKHLDVHKLIAEEQKGCAKGSRGCKEQLIIDTVAVKQAVHQKRNISTVYIDYKSAFDSISHSWLLQVLRLYKINPNVVLLLRTVMKNWSTKLSVSSQTSGEIPIRRGIFQGDSLSPLWFCLALNPLSHLLHESKYGFQVRHGILSKCTLSHLMYIDDIKLYAKDENQLRSLLDITIQFSRGIGMQLGLEKCRIKTIVRGKHTDNEGYSQNNIRIAGMDSDDVYKYLGILQATTPAVAIIKSKLLGEFERRLDLVLKTELYGKNKVMAINTFAIPVLLYTFGVIQWSNTDLESVNRRVRVVLANNNMHNRAAEKLRITIPRHQGGRGVLDLKTLHYNQVHSLREFFYEKQSSSQIHQATVMADNKLSPLNLRSREWDPMSNVTSVQQKIDMWKEKPIHGGHIKNLLLSGIDIEASNKWLTNGVLFYETEAFLTSIQDASLPTKNYKRYILHDSSITNSSCRLCNYEEETIQHITSACRMLSGTEYTNRHNSVCKILHQNLALKYNLVATYHPYYKYTPQRILENDRVKLLWDHTIATDHSVNHNRSDLVLLLKEERACFIIDVAVPLDRNTVEKQHEKIRNYGPLADDMKQTWRLQKIQVVPVIISATGLVPQNLHKALKTLDLRAGLYMEMQKAVILATCAIVRRVLSGNNLT

SEQ ID NO: 13945 - protein, 1115 aa, Hermetia illucens
MPSTTRDGRPRRRMVWTNQLNEFIVRAYYRVTDLERNPSGYRHRLHDAFITRFPELSHVPEQNVVNQYRVIVNNNRVALPTRQQIFQEVSLELGLESSNYRTSQRRHSMNPVVRRSLVTGDVDPIYNEALTAFHVAFTEYAEILPDARPKIPKLKFTSATTNIIAAVDRILADRLASKITATEVHSLIYVAAATVIRLHNQHLRANNRGMRRRTLPFWVFRLNKRVEKLRKEIGRVTQALLGNPSPRVHRCVANIIGNYHLSNDMPIEEILEVLKQKLAVCSNRIRRYQKSFQRRTDNTLFFQNQRGFYKNLINSGRDSNLNLDQAEDFWRSVWSESSRCNLEAAWLPHLMRSCEALPEMTMPDVTEVDVKAVLDKAGNWKAPGVDKIHNFWLKRFKSTHRILANQFNQMIADPDLVPPFFTKGITFLIPKEQGVSCPSKCRPITCLPTIYKVFTSVLCANISKHLDVHKLIAEEQKGCAKGSRGCKEQLIIDTVAVKQAVHQKRNISTAYIDYKSAFDSISHSWLLQVLRLYKINPNVVLLLRTVMKNWSTKLSVSSQTSGEIPIKRGIFQGDSLSPLWFCLALNPLSHLLHESKYGFQVKHGILSKCTLSHLMYIDDIKLYAKDENQLRSLLDITIQFSRDIGMQLGLEKCRIKTIVRGKHTDNEGYSQNNIRIEGMDSDDVYKYLGILQATTPAVAIIKSKLLGEFERRLDLVLKTELYGKNKIMAINTFAIPVLLYTFGVIQWSNTDLESVNRRVRVVLANNNMHNRAAEKLRITVPRHQGGRGVLDLKTMHYNQVHSLREFFYEKQSSSQIHQATVMADNKLSPLNLRSREWDPMSNVTSVQQKIDMWKEKPIHGGHIKNLLLSGIDIEASNKWLTNGVLFYETEAFLTSIQDASLPTKNYKRYILHDSSITNSSCRLCNCEEETIQHITSACRMLSGTEYTNRHNSVCKILHQNLALKYNLVATYHPYYKYTPQRILENDRVKLLWDHTIATDHSVNHNRPDLVLLLKEERACFIIDVAVPLDRNTVEKQHEKIRNYGPLADDMKQTWRLQKIQVVPVIISATGLVPQNLHKALKTLDLRAGLYMEMQKAVILATCAIVRRVLSGNNLT

SEQ ID NO: 13946 - protein, 1123 aa, Hermetia illucens
MPSTTRDGRPRRRMVWTNQLNEFIVRAYYRVTDLERNPSGYRHRLHDAFITRFPELSHVPEQNVVNQYRVIVNNNRVALPTRQQIFQEVSLELGLESSNYRTSQRSNTSTSPVRHSMNPVVRRSLVTGDVDPIYNEALTAFQVAFTEYAEILPDARPKIPKLKFTSATTNIIAAVDRILADRLASETTATEVHSLIYVAAATVIRLHNQHLRANNRGMRRGTLPFWVFRLNKRVEKLRKEIGRVTQALLGNPSPRVHRCVANIIGNYHLSNDMPIEEILEVLKQKLAVCSNRIRRYQKSFQRRTDNTLFFQNQRGFYKNLTSSDRESNLNLDEAEDFWRSVWSESSRCNLEAAWLPHLMHSCEALPEMTIPDVTEVDVKAALDKAGNWKAPGVDKIHNFWLKRFKSTHRILANQFNQMIADPDLVPPFFTKGITFLIPKEQGASCPSKCRPITCLPTIYKVFTSVLCANISKHLDVHKLIAEEQKGCAKGSRGCKEQLIIDTVAVKQAVHQKRNISTAYIDYKSAFDSISHSWLLQVLRLYKINPNVVLLLRTVMKNWSTKLSVSSQTSGEIPIRRGIFQGDSLSPLWFCLALNPLSHLLHESKYGFQVKHGILSKCTLSHLMYIDDIKLYAKDENQLRSLLDITIQFSRDIGMQLGLEKCRIKTIVRGKHTDNEGYSQNNIRIEGMDSDDVYKYLGILQATTPAVAIIKSKLLGEFERRLDLVLKTELYGKNKIMAINTFAIPVLLYTFGVIQWSNTDLESVNRRVRVVLANNNMHNRAAEKLRITIPRHQGGRGVLDLKTLHYNQVHSLREFFYEKQSSSQIHQATVMADNKLSPLNLRSREWDPMSNVTSVQQKIDMWKEKPIHGGHIKNLLLSGIDIEASNKWLTNGVLFYETEAFLTSIQDASLPTKNYKRYILHDSSITNSSCRLCNCEEETIQHITSACRMLSSTEYTNRHNSVCKILHQNLAMKYNLVATYHPYYKYTPQRILENDRVKLLWDHTIATDHSVNHNRPDLVLLLKEERACFIIDVAVPLDRNTVEKQHEKIRNYGPLADDMKQTWRLQKIQVVPVIISATGLVPQNLHKALKTLDLRAGLYMEMQKAVILATCAIVRRVLSGNNLT

SEQ ID NO: 13947 - protein, 1123 aa, Hermetia illucens
MPSTTRDGRPRRRMVWTNQLNEFIVRAYYRVTDLERNPSGYRHRLHDAFITRFPELSHVPEQNVVNQYRVIVNNNRVALPTRQQIFQEVSLELGLESSNYRTSPRSNTSTPPVRHSMNPVVRRSLVTGDVDPIYNEALTAFQVAFTEYAEILPDARPRIPKLKFTSATTNIISAVDRILADRLASEITATEVHSLIYVAAATVIRLHNQHLRANNRGMRRRTLPFWVFRLNKRVEKLRKEIGRVTQALLGNPSPRVHRCVANIIGNYHLSNDMPIEEILEVLKQKLAVCSNRIRRYQKSFQRRTDNTLFFQNQRGFYKNLINSGRDSNLNLDQAEDFWRSVWSESSRCNLEAAWLPHLMRSCEALPEMTMPDVTEVDVKAVLDKAGNWKAPGVDKIHNFWLKRFKSTHRILANQFNQMIADPDLVPPFFTKGITFLIPKEQGVSCPSKCRPITCLPTIYKVFTSVLCANISKHLDVHKLIAEEQKGCAKGSRGCKEQLIIDTVAVKQAVHQKRNISTAYIDYKSAFDSISHSWLLQVLRLYKINRNVVLLLRTVMKNWSTKLSVSSQTSGEIPIRRGIFQGDSLSPLWFCLALNPLSHLLHESKYGFQVKHGILSKCTLSHLMYIDDIKLYAKDENQLRSLLDITIQFSRDIGMQLGLEKCRIKTIVRGKHTDNEGYSQNNIRIEGMDSDDVYKYLGILQATTPAVAIIKSKLLGEFERRLDLVLKTELYGKNKIMAINTFAIPVLLYTFGVIQWSNTDLESVNRRVRVVLANNNMHNRAAEKLRITIPRHQGGRGILDLKTMHYNQVHSLREFFYEKQSSSQIHQATVMADNKLSPLNLRSREWDPMSNVTSVQQKIDMWKEKPIHGGHIKNLLLSGIDIEASNKWLTNGVLFYETEAFLTSIQDASLPTKNYKRYILHDSSITNSSCRLCNCEEETIQHITSACRMLSGTEYTNRHNSVCKILHQNLALKYNLVATYHPYYKYTPQRILENDRVKLLWDHTIATDHSVNHNRPDLVLLLKEERACFIIDVAVPLDRNTVEKQHEKIRNYGPLADDMKQTWRLQKIQVVPVIISATGLVPQNLHKALKTLDLRAGLYMEMQKAVILATCAIVRRVLSGNNLT

SEQ ID NO: 13948 - protein, 1123 aa, Hermetia illucens
MPSTTRDGRPRRRMVWTNQLNEFIVRAYYRVTDLERNPSGYRHRLHDAFITRFPELSHVPEQNVVNQYRVIVNNNRVALPTRQQIFQEVSLELGLESSNYRTSQRSNTSTPPVRHSMNPVVRRSLVTGDVDPIYNEALTAFQVAFTEYAEILPDARPKIPKLKFTSATTTIIAAVDRILADRLASEITATEVHSLIYVAAATVIRLHNQHLRANNRGMRRRTLPFWVFRLNKRVGKLRKEIGRVTQALLGNPSPRVHRCVANIIGNYHLSNDMPIEEILEVLKQKLAVCSNRIRRYQKSFQRRTDNTLFFQNQRGFYKNLINSGSESNLNLDQAEDFWRSVWSESSRCNLEAAWLPHLMRSCEALPEMTMPDVTEVDVKAVLDKAGNWKAPGVDKIHNFWLKRFKSTHRILANQFNQMIADPDLVPPFFTKGITFLIPKEQGVSCPSKCRPITCLPTIYKVFTSVLCANISKHLDVHKLIAEEQKGCAKGSRGCKEQLIIDTVAVKQAVHQKRNISTAYIDYKSAFDSISHSWLLQVLRLYKINPNVVLLLRTVMKNWSTKLSVSSQTSGEIPIRRGIFQGDSLSPLWFCLALNPLSHLLHESKYGFQVKHGILSKCTLSHLMYIDDIKLYAKDENQLRSLLDITIQFSRDIGMQFGLEKCRIKTIVRRKHTDNEGYSQNNIRIEGMDSDDVYKYLGILQATTPAVAIIKSKLLGEFERRLDLVLKTELYGKNKIMAINTFAIPVLLYTFGVIQWSNTDLESVNRRVRVVLANNNMHNRAAEKLRITIPRHQGGRGVLDLKTLHYNQVHSLREFFYEKQSSSQIHQATVMADNKLSPLNLRSREWDPMSNVTSVQQKIDMWKEKPIHGGHIKNLLLSGIDIEASNKWLTNGVLFYETEAFLTSIQDASLPTKNYKRYILHDSSITNSSCRLCNCEEETIQHITSACRMLNGTEYTNRHNSVCKILHQNLALKYNLVATYHPYYKYTPQRILENDRVKLLWDHTIATDHSVNHNRPDLVLLLKEERACFIIDVAVPLDRNTVEKQHEKIRNYGPLADDMKQTWRLQKIQVVPVIISATGLVPQNLHKALKTLDLRAGLYMEMQKAVILATCAIVRRVLSGNNLT

SEQ ID NO: 13949 - protein, 1081 aa, Hermetia illucens
MPSTTRDGRPRRRMVWTNQLNEFIVRAYYRVTDLERNPSGYRHRLHDAFITRFPELSHVPEQNVVNQYRVIVNNNRVALPTRQQIFQEVSLELGLESSNYRTSQRSNTSTPPVRHSMNPVVRRSLVTGDVDPIYNEALTAFQVAFTEYAEILPDARPKIPKLKFTSATTDIIAAVDRILADRLASETTATEVHSLIYVAAATVIRLHNQHLRANNRGMRRRTLPFWVFRLNKRVEKLRKEIGRVTQALLGNPSPRVHRCVANIIGNYHLSNDMPIEEILEMLKQKLAVCSNRIRRYQKSFQRRTDNTLFFQNQRGFYKNLTSSDRESNLNLDQAEDFWRSVWSESSRCNLEAAWLPHLMHSCEALPEMTIPDVTEVDVKAALDKAGNWKAPGVDKIHNFWLKRFKSTHRILANQFNQMIADPDLVPPFFTKGITFLIPKEQGASCPSKCRPITCLPTIYRVFTSVLCANISKHLDVHKLIAEEQKGCAKGSRGCKEQLIIDTVAVKQAVHQKRNISTAYIDYKSAFDSISHSWLLQVLRLYKINPNVVLLLRTVMKNWSTKLSVSSQTSGEIPIRRGIFQGDSLSPLWFCLALNPLSHLLHESKYGFQVRHGILSKCTLSHLMYIDDIKLYAKDENQLRSLLDITIQFSRDIGMQLGLEKCRIKTIVRGKHTDNEGYSQNNIRIEGMDSDDVYKYLGILQATTPAVAIIKSKLLGEFERRLDLVLKTELYGKNKIMAINTFAIPVLLYTFGVIQWSNTDLEAVNRRVRVVLANNNMHNRAAEKLRITIPRHQGGRGVLDLKTLHYNQVHSLREFFYEKQSSSQIHQATVMADNKLSPLNLRSREWDPMSNVTSVQQKIDMWKEKPIHGGHIKNLLLSGIDIEASNKWLTNGVLFYETEAFLTSIQDASLPTKNYKRYILHDSSITNSSCRLCNCEEETIQHITSACRMLSGTEYTNRHNSVCKILHQNLALKYNLVATYHPYYKYTPQRILENDRVKLLWDHTIATDHSVNHNRPDLVLLLKEERACFIIDVAVPLDRNTVEKQHEKIRNYGPLADDMKQTWRLQKIQVVPVIISATGLVP

SEQ ID NO: 13950 - protein, 1123 aa, Hermetia illucens
MPSTTRDGRPRRRMVWTNQLNEFIVRAYYRVTDLERNPSGYRHRLHDAFITRFPELSHVPEQNVVNQYRVIVNNNRVALPTRQQIFQEVSLELGLESSNYRTSQRSNTSTPPVRHSMNPVVRRSLVTGDVDPIYNEALTAFQVAFTEYAEILPDARPRIPKLKFTSATTNIIAAVDRILADRLASEITATEVHSLIYVAAATVIRLHNQHLRANNRGMRRRTLPFWVFRLNKRVEKLRKEIGRVTQALLGNPSPRVHRCVANIIGNYHLSNDMPIEEILEVLKQKLAVCSNRIRRYQKSFQRRTDNTLFFQNQRGFYKNLINSGRDSNLNLDQAEDFWRSVWSESSRCNLEAAWLPHLMRSCEALPEMTMPDVTEVDVKAVLDKAGNWKAPGVDKIHNFWLKRFKSTHRILANQFNQMIADPDLVPPFFTKGITFLIPKEQGVSCPSKCRPITCLPTIYKVFTSVLCANISKHLDVHKLIAEEQKGCAKGSRGCKEQLIIDTVAVKQAVHQKRNISTAYIDYKSAFDSISHSWLLQVLHLYKINPNVVLLLRTVMKNWSTKLSVSSQTSGEIPIRRGIFQGDSLSPLWFCLALNPLSHLLHESKYGFQVKHGILSKCALSHLMYIDDIKLYAKDENQLRSLLDIIIQFSRDIGMQLGLEKCRIKTIVRGKHTDNEGYSQNNIRIEGVDSDDVYKYLGILQATTPAVAIIKSKLLGEFERRLDLVLKTELYGKNKIMAINTFAIPVLLYTFGVIQWSNTDLESFNRRVRVVLANNNMHNRAAEKLRITIPRHQGGRGVLDLKTLHYNQVHSLREFFYEKQSSSQIHQATVMADNKLSPLNLRSREWDPMSNVTSVQQKIDMWKEKPIHGGHIKNLLLSGIDIEASNKWLTNGVLFYETEAFLTSIQDASLPTKNYKRYILHDSSITNSSCRLCNCEEETIQHITSACRMLSGTEYTNRHNSVCKILHQNLALKYNLVATYHPYYKYTPQRILENDRVKLLWDHTIATDHSVNHNRPDLVLLLKEERACFIIDVAVPLDRNTVEKQHEKIRNYGPLADDMKQTWRLQKIQVVPVIISATGLVPQNLHKALKTLDLRAGLYMEMQKAVILATCAIVRRVLSGNNLT

SEQ ID NO: 13951 - protein, 1123 aa, Hermetia illucens
MPSTTRDGRPRRRMVWTNQLNEFIVCAYYRVTDLERNPSGYRHRLHDAFITRSPELSHVPEQNVVNQYRVIVNNNRVALPTRQQIFQEVSLELGLESSNYRTSQRSNTSTPPVRHSMNPVVRRSLVTGDVDPIYNEALTAFQVAFTEYAEILPDARPKIPKLKFTSATTNIIAAVDRILADRLASETTATEVHSLIYVAAATVIRLHNQHLRANNRGMRRWTLPFWVFRLNKRVEKLRKEIGRVTQALLGNPSPRVHRCVANTIGNYHLSNDMPIEEILEVLKQKLAVCSNRIRRYQKSFQRRTDNTLFFQNQRGFYKNLINSGRESNLNLDQAEDFWRSVWSESSRCNLEAAWLPHLMRSCEALPEMTMPDVTEVDVKAALDKAGNWKAPGVDKIHNFWLKRFKSTYRILANQFNQMIADPDLVPPFFTNWITFLIPKEQGVSCASKCRPITCLPTIYKVFTSVLCANISKHLDVHKLIAEEQKGCAKGSRGCKEQLIIDTVAAKQAVHQKRNISTAYIYYKSAFDSVSHSWLLQVLRLYKINPNVVLLLRTVMKNWSTKLSVSSQTSGEIPIRRGILQGDSLSPLWFCLALNPLSHLLHESKYGFQVKHGILSKCTLSHLMYIDDIKLYAKDENQLRSLLDITIQFSRDIGMQLGLEKCRIKTIVRGKHTDNEGCSQNNIRIEGMDSDDVYKYLGILQATTPAVATIKSKLLGEFERHLDLVLKTELYGKNKIMAINTFAIPVLLYTFGVIQWSNTDLESVNRRVRVVLANNNMHNRAAEKLRITIPRHQGGRGVLELKTMHYNQVHSLREFFYEKQSSSQIHQATVMADNKLSPLNLRSREWDPMSNVTSVQQKIDIWKEKPIHGGHIKNLLLSGIDIEASNKWLTNGVLFYDTEAFLTSIQDASLPTKDYKRYILHDSSITNSSCRLCNCEEETIQHITSACRMLSGTEYTNRHNSVCKILHQNLALKYNLVATYHPYYKYTPQRILENDRVKLLWDHTIATDHSVNHNRPDLVLLLKEERACFIIDVAVPLDRNTVEKQHEKIRNYGPLADDMKQTWRLQKIQVVPVIISATGLVSQNLHKALKTLDLRAGLYMEMQKAVILATCAIVRRILSGNNLT

SEQ ID NO: 13952 - protein, 1211 aa, Hermetia illucens
MNCSDVTLYFSGSPPNTFPTFGGNHGALQHWGSVAGLTASPILVGIKIGENNLNSLNGTPGTRRRYPTRLRVVQQHQSGSSPLDVLAVMPSTTRDGRPRRRMVWTNQLNEFIVRAYYRVTDLEWNPSGYRHRLHDAFITRFPELSHVPEQNVVNQYRVIVNNNRVALPTRQQIFQEVSLELGLESSNYRTSQTSNTSTPPVRHSMNPVVRRSLVTGDVDPIYNEALTAFQVAFTEYAEILPDARPKIPKLKFTSATTNIIAAVDRILADRLASEITATEVHSLIYVAAATVIRLHNQHLRANNRGMRRRTLPFWVFRLNKRVEKLRKEIGRVTQALLGNPSPRVHRCVANIIGNYHLSNDVPIEEILEVLKQKLAVCSNRIRRYQKSFQRRTDNTLFFQNQRGFYKNLTSSDRESNLNLDQAEDFWRSVWSESSRCNLEAAWLPHLMRSCEALPEMTMPDVTEVDVKAVLDKAGNWKAPGVDKIHNFWLKRFKSTHRILANQFNQMIADPDLVPPFFTKGITFLIPKEQGVSCPSKCRPITCLPTIYKVFTSVLCANISKHLDVLKLIAEEQKGCAKGSRGCKEQLIIDTVAVKQAVHQKRNISTAYIDYKSAFDSISHSWLLQVLRLYKINPNVVLLLRTLMKNWSTKLSVSSQTSGEIPIRRGIFQGDSLSPLWFCLALNPLSHLLHESKYGFQVKHGILSKCTLSHLMYIDDIKLYAKDENQLRSLLDITIQFSRDIGMQLGLEKCRIKTIVRGKHTDNEGYSQNNIRIEGMDSDDVYKYLGILQATTPAVAIIKSKLLGEFERRLDLVLKTELYGKNKIMAINTFAIPVLLYTFGVIQWSNTDLESVNRRVRVVLANNNMHNRAAEKLRITIPRHQGGRGVLDLKTMHYNQVHSLREFFYEKQSSSQIHQATVMADNKLSPLNLRSREWDPMSNVTSVQQKIDMWKEKPIHGGHIKNLLLSGIDIEASNKWLTNGVLFYETEAFLTSIQDASLPTKNYKRYILHDSSITNSSCRLCNCEEQTIQHITSACRMLSGTEYTNRHNSVCKILHQNLALKYNLVATYHPYYKYTPQRILENDRVKLLWDHTIATDHSVNHNRPDLVLLLKEERACFIIDVAVPLDRNTVEKQHEKIRNYGPLADDMKQTWRLQKIQVVPVIISATGLVPQNLHKALKTLDLRAGLYMEMQKAVILATCAIVRRVLSGNNLT

SEQ ID NO: 13953 - protein, 1123 aa, Hermetia illucens
MPSTTRDGRPRRRMVWTSQLNEFIVRAYYRVTDLERNPSGYRHRLHDAFITRFPELSHVPEQNVVNQYRVIVNNNRVALPTRQQIFQEVSLELGLESSNYRTSQRSNTSTPPVRHSMNPVVRRSLVTGDVDPIYNEALTAFQVAFTEYAEILPDARPRIPKLKFTSATTNIIAAVDRILADRLASEITATEVHSLIYVAAATVIRLHNQHLRANNRGMRRRTLPFWVFRLNKRVEKLRKEIGRVTQALLGNPSPRVHRCVANIIGNYHLSNDMPIEEILEVLKQKLAVCSNRIRRYQKSFQRRTDNTLFFQNQRGFYKNLINSGRESNLNLDQAENFWRSVWSESSRCNLEAAWLPHLMRSCEALPEMTMPDVTEVDVKAVLDKAGNWKAPGVDKIHNFWLKRFKSTHRILANQFNQMIADPDLVPPFFTKGITFLIPKERGVSCPSKCRPITCLPTIYKVFTSVLCANISKHLDVHKLIAEEQKGCAKGSRGCKEQLIIDMVAVKQAVHQKRNISTAYIDYKSAFDSISHSWLLQVLRLYKINPNVVLLLRTVMKNWSTKLSVSSQTSGEIPIRRGIFQGDSLSPLWFCLALNPLSHLLHESKYGFQVKHGILSKCTLSHLMYIDDIKLYAKDENQLRSLLDITIQFSRDIGMQLGLEKCRIKTIVRGKHTDNEGYSQNNIRIEGMDSDDVYKYLGILQATTPAVAIIKSKLLGEFERRLDLVLKTELYGKNKIMAINTFAIPVLLYTFGVIQWSNTDLESVNRRVRVVLANNNMHNRAAEKLRITIPRHQGGRGVLDLKTMHYNQVHSLREFFYEKQSSSQIHQATVMADNKLSPLNLRSREWDPMSNVTSVQQKIDMWKEKPIHGGHIKNLLLSGIDIEASNKWLTNGVLFYETEAFLTSIQDASLPTKNYKRYILHDSSITNSSCRLCNCEEETIQHITSACRMLSGTEYTNRHNSVCKILHQNLALKYNLVATYHPYYKYTPQRILENDRVKLLWDHTIATDHSVNHNRPDLVLLLKEERACFIIDVAVPLDRNTVEKQHEKIRNYGPLADDMKQTWRLQKIQVVPVIISATGLVPQNLHKALKTLDLRAGLYMEMQKAVILATCAIVRRVLSGNNLT

SEQ ID NO: 13954 - protein, 1123 aa, Hermetia illucens
MPSTTRDGRPRRRMVWTNQLNEFIVRAYYRVTDLERNPSGYRHRLHDAFITRFPELSHVPEQNVVNQYRVIVNNNRVALPTRQQIFQEVSLELGLESSNYRTSQRSNTSTPPVRHSMNPVVRRSLVTGDVDPIYNEALTAFQVGFTEYAEILPDARPGIPKLKFTSATTNIIAAVDRILADRLASEITATEVHSLIYVAAATVIRLHNQHLRANNRGMRRRTLPFWVFRLNKRVEKLRKEIGRVTQALLGNPSPRVHRCVANIIGNYHLSNDMPIEEILEVLKQKLAVCSNRIRRYQKSFQRRTDNTLFFQNQRGFYKNLINSGRESNLNLDQVEDFWRSVWSESSRCNLEAAWLPHLMRSCEALPEMTMPDVTEVNVKAVLDKAGNWKAPGVDKIHNFWLKRFKSTHRILANQFNQMIADPDLVPPFFTKGITFLIPKEQGASCPSKCRPITCLPTIYKVFTSVLCANISKHLDVHKLIAEEQKGCAKGSRGCKEQLIIDTVAVKQAVHQKRNISTASIDYKSAFDSISHSWLLQVVRLYKINPNVVLLLRTVMKNWSTKLSVSSQTSGEIPIRRGIFQGDSLSPLWFCLALNPLSHLLHESKYGFQVKHGILSKCTLSHLMYIDDIKLYAKDENQLRSLLDITIQFSRDIGMQLGLEKCRIKTIVRGKHTDNEGYSQNNIRIEGMDSDDVYKYLGILQATTPAVAIMKSKLLGEFERRLDLVLKTELYGKNKIIAINTFAIAVLLYTFGVIQWSNTDLESVNRRVRVVLANNNMHNRAAEKLRITIPRHQGGRGVLDLKTMHYNQVHSLREFFYEKQSSSQIHQATVMADNKLSPLNLRSREWDPMSNVTSVQQKIDMWKEKPIHGGHIKNLLLSGIDIEASNKWLTNGVLFYETEAFLTSIQDASLPTKNYKRYILHDSSITNSSCRLCNCEEETIQHITSACRMLSGTEYTNRHNSVCKILHQNLALKYNLVATYHPYYKYTPQRILENDRVKLLWDHTIATDHSVNHNRPDLVLLLKEERACFIIDVAVPLDRNTVEKQHEKIRNYGPLADDMKQTWRLQKIQVVPVIISATGLVPQNLHKALKTLDLRAGLYMEMQKAVILATCAIVRRVLSGNNLT

SEQ ID NO: 13955 - protein, 1123 aa, Hermetia illucens
MPSTTRDGRPRRRMVWTSQLNEFIVRAYYRVTDLERNPSGYRHRLHDAFITRFPELSHVPEQNVVNQYRVIVNNNRVALPTRQQIFQEVSLELGLESSNYRTSQRSNTSTPPVRHSMNPVVRRSLVTGDVDPIYNETLTAFQVAFTEYAEILPDARPRIPKLKFFSATTNIIAAVDRILADRLASEITATEVHSLFYVAAATVIRLHNQHLRANNRGMRRWTLPFWVFRLNKRVEKLRKEIGRVTQALLGNPSPRVHRCVANIIGNYHLSNDMPIEEILEVLKQKLAVCSNRIRRYQKSFQRRTDNTLFFQNQRGFYKNLINSGRESNLNLDQAEDFWRSVWSESSRCNLEAAWLPHLMRSCEALPEMTMPDVTEIDVKAALDKAGNWKAPGVDKIHNFWLKRFKSTHRILANQFNQMIADPDLVPPFFTKGITFLIPKEQGVSCPSKCRPITCLPTIYKVFTSVLCANISKHLDVHKLIVEEQKGCAKGSRGCKEQLIIDTVAVKQAVHQKRNISTAYIDHKLAFDSISHSWLLQVLRLYKINPNVVLLLRTVMKNWSTKLSVSSQTLGEIPIRRGIFQGDSLSPLWFCLALNPLSHLLHESKYGFQVKHGILSKCTLSHLMYVDDIKLYAKDENQLRFLLDITIQFSRDIGMQLGLEKCRIKTIVRGKHTDNEGYSLNNIRIEGMDSDDVYKYLGILQATTPAVAIIKSKLLGEFERRLDLVLKTELYGKNKIMAINTFTIPVLLYTFGVIQWSNTDLESVNRRVRVVLANNNMRNRAAEKLRITIPRHQGGRGVLDLKTLHYNQVHSLREFFYEKQSSSQIHQATVMADNKLSPLNLRSREWDPMSNVTSVQQKIDMWKEKPIHGGHIKNLLLSGIDIEASNKWLTNGVLFYETEAFLTSIQDASLPTKNYKRYILHDSSITNSSCRLCNCEEETIQHITSACRMLSGTEYINRHNSVCKILHQNHALKCNLVATYHPYYKYTPQRILENDRVKLLWDHTIATDHSVDHNRPDLVLLLKEERACFIIDVAVPLDRNTVEKQDEKIRNYGPLADDMKQTWRLQKIQVVPVIISATGLVPQNLHKALKTLDLRAGLYMEMQKAVILATCAIVRRVLSGNNLT

SEQ ID NO: 13956 - protein, 923 aa, Hermetia illucens
MNPVVRRSLVTGDVDPIYNEALTAFQVAFTEYAEILPDARPKIPKLKFTSATTNIIAAVDRILADRLASEITATEVHSLIYVAAATVICLHNQHLRANNRGMRRRTLPFWVFRLNKRVEKLRKEIGRVTQALLGNPSPRVHRCVANIIGNYHLSNDMPIEEILEVLKQKLAVCSNRIRRYQKSFQRRTDNTLFFQNQRGFYKNLTSSDRESNLNLDQAEDFWRSVWSESSRCNLEAAWLRHLMRSCEALPEMTMPDVTEVDVKAALDKTGNWKAPGVDKIHNFWLKRFKSTHRILANQFNQMIADPDLVPPFFTKGITFLIPKEQGISCPSKCRPITCLPTIYKVFTSVLCANISKHLDVHKLIAEEQKGCAKGSRGCKEQLIIDTVAVKQAVHQKRNISTAYIDYKSAFDSISHSWLLQVLRLYKSNPNVVLLQRTAMKNWSTKLSVSSQTSGEIPIRRGIFQGDSLNPLWFCLALNPLSHFLHESKYGFQVKHGILSKYTLSHLMYIDDIKLYAKDENQLRSLLDITIQFSRDIGMQLGLEKCRIKTIVREKHTDNEGYSQNNIRIEGMDSDDVYKYLGILQATTPTVAIIKSKLLGEFERRLDLVLKTELYGKNKIMAINTFAIPVLLYTFGVIQWSNTDLEAVNRRVRVVLANNNMHNRAAEKLRITIPRHQGGRGVLDLKTLYYNQVHSLREIFYEKQSSSQIHQATVMADNKLSPLNLRSREWDPMSNVTSVQQKIDMWKEKPIHGGHIKNLLLSGIDIEASNKWLTNGVLFYETEAFLTSIQDASLPTKNYKQYILHDSSITNSSCRLCNCEEETIQHITSACRMLSGTEYTNRHNSVCKILHQNLALKYNLVATYHPYYKYTPQRILENDRVKLLWDHTIATDHSVNHNRPDLVLLLKEERACFIIDVACYTIHC

SEQ ID NO: 13957 - protein, 1123 aa, Hermetia illucens
MPSTTRDGRPRRRMVWTNQLNEFIVRAYYRVTDLERNPSGYRHRLHDAFITRFPELSHVPEQNVVNQYRVIVNNNRVALPTRQQIFQEVSLELGLESSNYRTIQRNNTSTPPVRHSMNPVVRRSLVTGDVDPIYNEALTAFQVAFTEYAEILPDARPRIPKLKFTSATNNIIAAVDRILADRLASEITATEVHSLIYVAAATVIRLHNQHLRANNRGMRRRTLPFWVFRLNKRVEKLRKEIGRVTQALLGNLSPRVHRCVANIIGNYHLSNDMPIEEILEVLKQKLAVCSNRIRRYQKSFQRRTDNTLFFQNQRGFYKNLINSGRESNLNLDQAEDFWRSVWSESSRCNLEAAWLPHLMRSCEALPEMTMPDVTEVDVKAVLDKAGNWKAPGVDKIHNFWLKRFKSTHRILANQFNQMIADPDLVPPFFTKGITFLIPKEQGVSCPSKCRPITCLPTIYKVFTSVLCANISKHLDVHKLIAEEQKGCAKGSRGCKEQLIIDTVAVKQAVHQKRNISTAYIDYKSAFDSISHSWLLQVLRLYKINPNVVLLLRTVMKNWSTKLSVSSQTSGEIPIRRGIFQGDSLSPLWFCLALNPLSHLLHESKYGFQVKHGILSKCALSHLMYIDDIKLYAKDENQLRSLLDITIQFSRDIGMQLGLEKCRIKTIVRGKHTDNEGYSQNNIRIEGMDSDDVYKYLGILQATTPAVAIIKSKLLGEFERRLDLVLKTELYGKNKIMAINTFAIPILLYTFGVIQWSNTDLEYVNRRVRVVLANNNMHNRAAEKLRITIPRHQGGRGVLDLKTLHYNQVHSLREFFYERQSSSQIHQATVMADNKLSPLNLRSREWDPMSNVTSVQQKIDMWKEKPIHGGHIKNLLLSGIDIEASNKWLTNGVLFYETEAFLTSIQDASLPTKNYKRYILHDSSITNSSCRLCNCEEETIQHITSACRMLSGTEYTNRHNSVCKILHQNLAVKYNLVATYHPYYKYTPQRILENDRVKLLWNHTIATDHSVNHNRPDLVLLLKEERACFIIDVAVPLDRNTVEKQHEKIRNYGPLADDMKQTWRLQKIEVVPVIISATGLVPQNLHKALKTLDLRAGLYMEMQKAVILATCAIVRRVLSGNNLT

SEQ ID NO: 13958 - protein, 851 aa, Hermetia illucens
MPIEEILEVLKQKLAVCSNRIRRYQKSFQRRTDNTLFFQNQRGFCKNLTNSSRESNLDLDQAEDFWRSVWSESSRCNLEAAWLPHLMRSCEALPEMTMPYVTEVDVKAALDKAGNWKAPGVDKIHNFWLKRFKSTHRILANQFNQMIADPDLVPPFFTKGITFLIPKEQGVSCPSKCRPITCLPTIYKVFTSVLCANISKHLDVHKLIAEEQKGCAKGSRGCKEQLIIDTVAVKQAVHQKRNISTAYIDYKSAFDSISHSWLLQVLRLYKINPNVVLLLRTVMKNWSTKLSVSSQTSGEIPIRRGIFQGDSLSPLWFCLALNPLSHLLHESKYGFQVKHGILSKCTLSHLMYIDDIKLYAKDENQLRSLLDNTIQFSRDIGMQLGLEKCRIKTIVRGKHTDNEGYSQNNIRIEGMDSDDVYKYLGILQATTPAVAIIKSKLLGEFERRLDLVLKTELYGKNKIMAINTFAIPVLLYTFGVIQWSNTDLESVNRRVRVVLANNNMHNRAAEKLRITIPRHQGGRGVLDLKTLHYNQVHSLREFFYEKQSSSQIHQATVMADNKLSPLNLRSREWDPMSNVTSVQQKIDMWKEKPIHGGHIKNLLLSGIDIEASNKWLTNGVLFYETEAFLTSIQDASLPTKNYKRYILHDSSITNSSCRLCNCEEETIQHITSACRMLSGTEYTNRHNSVCKILHQNLALKYNLVATYHPYYKYTPQRILENDRVKLLWDHTIATDHSVNHNRPDLVLLLKEERACFIIDVAVPLDRNTVEKQHKKIRNYGPLADDMKQTWRLQKIQVVPVIISATGLVPQNLHKALKTLDLRAGLYMEMQKAVILATCAIVRRVLSGNNLT

SEQ ID NO: 13959 - protein, 1123 aa, Hermetia illucens
MPSTTRDGRPRRRMVWTNQLNEFIVRAYYRVTDLERNPSGYRHRLHDAFITRFPELSHVPEQNVVNQYRVIVNNNRVALPTRQQIFQEVSLELGLESSNYRTSQRSNTSTPPVRHSMNPVVRRSLVTGDVDPIYNEALTAFQVAFTEYAEILPDARPKIPKLKFTSATTNIIAAVDRILADRLASEITATEVHSLIYVAAATVIRLHNQHLRANNRGMRRRTLPFWVFRLNKRVEKLRKEIGRVTQALLGNPSPRVHRCVANIIGNYHLSNDMPIEEILEVLKQKLAVCSNHIRRYQKSFQRRTDNTLFFQNQRGFYKNLINSGRDSNLNLDQAEDFWRSVWSESSRCNLEAAWLPHLMRSCEALPEMTMPDVTEVDVKAVLDKAGNWKAPGVDKIHNFWLKRFKSTHRILANQFNQMIADPDLVPPFFTKGITFLIPKEQGVSCPSKCRPITCLPTIYKVFTSVLCANISKHLDVHKLIAEEQKGCAKGSRGCKEQLIIDTIAVKQAVHQKRNISTAYIDYKSAFDSISHSWLLQVLRLYKINPNVVLLLRTVMKNWSTKLSVSSQTSGEIPIRRGIFQGDSLSPLWFCLALNPLSHLLHESKYGFQVKHGILSKCTLSHLMYTDDIKLYAKDDNQLRSLLDITIQFSRDIGMQLGLEKCRIKTIVRGKHTDNEGYSQNNIRIEGMDSHDVYKYLGILQATTPAVAIIKSKLLGEFERRLDLVLKTELYGKNKIMAINTFAIPVLLYTFGVIQWSNTDLESVNRRVRVVLANNNMHNRAAEKLRITIPRHQGGRGVLDLKTLHYNQVHSLREFFYEKQSSSQIHQATVMADNKSSPLNLRSREWDPMSNVTSVQQKIDMWKEKPIHGGHIKNLLLSGIDIEASNKWLTNGVLFYETEAFLTSIQDASLPTKNYKRYILHDSSITNSSCRLCNCEEETIQHITSACRMLSGTEYTNRHNSVCKILHQNLALKYNLVATYHPYYKYTPQRILENDRVKLLWDHTIATDHSVNHNRPDLVLLLKEERACFIIDVAVPLDRNTVEKQHEKIRNYGPLADDMKQTWRLQKIQVVPVIISATGLIPQNLHKALKTLDLRAGLYMEMQKAVILATCAIVRRVLSGNNLT

SEQ ID NO: 13960 - protein, 1123 aa, Hermetia illucens
MPSTTRDGRPRRRMVWTSQLNEFIVRAYYRVTDLERNPSGYRHRLHDAFITRFPELSHVPEQNVVNQYRVIVNNNRVALPTRQQIFQEVSLELGLESSNYRTSQRSNTSTPPVRHSMNPVVRRSLVTGDVDPIYNEALTAFQVAFTEYAEILPDARPRIPKLKFTSATTNIIAAVDRILADRLASEITATEVHSLIYVAAATVIRLHNQHLRANNRGMRRRTLPFWVFRLNKRVEKLRKEIGRVTQALLGNPSPRVHRCVANIIGNYHLSNDMPIEEILEVLKQKLAVCSNRIRRYQKSFQRRTDNTLFFQNQRGFYKNLINSGRESNLNMDQAEDFWRSVWSESSRCNLEAAWLPHLMRSCEALPEMTMPDVTEVDVKAVLDKAGNWKAPGVDKIHNFWLKRFKSTHRILANQFNQMIADPDLVPPFFTKGITFLIPKEQGASCPSKCRPITCLPTIYKVFTSVLCANISKHLDVHKLIAEEQKGCAKGSRGCKEQLIIDTVAVKQAVHQKRNISTAYIDYKSAFDSISHSWLLQVLRLYKINPNVVLLLRTVMKNWSTKLSVSSQTSGEIPIRRGIFQGDSLSPLWFCLALNPLSHLLHESKYGFQVKHGILSKCTLSHLMYIDDIKLYAKDENQLRSLLDITIQFSRDIGMQLGLEKCRIKTIVRGKHTDNEGYSQNNIRIEGMDSDDVYKYLGILQATTPAVAIIKSKLLGEFERRLDLVLKTELYGKNKIMAINTFAIPVLLYTFGVIQWSNTDLESVNRRVRVVLANNNMHNRAAEKLRITIPRHQGGRGVLDLKTLHYNQVHSLREFFYEKQSSSQIHQATVMADNKLSPLNLRSREWDPMSNVTSVQQKIDMWKEKPIHGGHIKNLLLSGIDIEASNKWLTNGVLFYETEAFLTSIQDASLPTKNYKRYILHDSSITNSSCRLCNCEEETIQHITSACRMLSGTEYTNRHNSVCKILHQNLALKYNLVATYHPYYKYTPQRILENDRVKLLWDHTIATDHSVNHNRPDLVLLLKEERACFIIDVAVPLDRNTVEKQHEKIRNYGPLADDMKQTWRLQKIQVVPVIISATGLVPQNLHKALKTLDLRAGLYMEMQKAVILATCAMVRRVLSGNNLT

SEQ ID NO: 13961 - protein, 1123 aa, Hermetia illucens
MPSTTRDGRPRRRMVWTNQLNEFIVRAYYRVTDLERNPSGYRHRLHDAFITRFPELSHVPEQNVVNQYRVIVNNNRVALPTRQQIFQEVSLELGLESSNYRTSQRSNTSTPPVRHSMNPVVRRSLVTGDVDPIYNEALTAFQVAFTEYAEILPDARPRIPKLKFTSATTNIIAAVDRILADRLASEITATEVHSLIYVAAATVIRLHNQHLRANNRGMRRRTLPFWVFRLNKRVEKLRKEIGRVTQALLGNPSPRVHRCVANIIGNYHLSNDMPIEEILEVLKQKLAVCSNRIRRYQKSFQRRTDNTLFFQNQRGFYKNLINSGRESNLNLDQAEDFWRSVWSESSRCNLEAAWLPHFMRSCEALPEMTMPDVTEVDVKAVLDKAGNWKAPGVDKIHNFWLKRFKSTHRILANQFNQMIADPDLVPPFFTKGITFLIPKEQGVSCPSKCRPITCLPTIYKVFTSVLCANISKHLDVHKLIAEEQKGCAKGSRGCKEQLIIDTVAVKQAVHQKRNISTAYIDYKSAFDSISHSWLLQVLRLYKINPNVVLLLRTVMKNWSTKLSVSSQTSGEIPIRRGIFQGDSLSPLWFCLALNPLSHLLHESKYGFQVKHGILSKCTLSHLMYIDDIKLYAKDENQLRSLLDITIQFSRDIGMQLGLEKCRIKTIVRGKHTDNEGYSQNNIRIEGMDSDDVYKYLGILQATTPAVAIMKSKLLGEFERRLDLVLKTELYGKNKIMAINTFAIPVLLYTFGVIQWSNTDLESVNRRVRVVLANNNMHNRAAEKLRITIPRHQGGRGVLDLKTLHYNQVHSLREFFYEKQSSSQIHQATVMADNKLSPLNLRSREWDPMSNVTSVQQKIDMWKEKPIHGGHIKNLLLSGIDIEASNKWLTNGVLFYETEAFLTSIQDASLPTKNYKRYILHDSSITNSSCRLCNCEEETIQHITSACRMLSGTEYTNRHNSVCKILHQNLALKYNLVATYHPYYKYTPQRILENDRVKLLWDHTIATDHSVNHNRPDLVLLLKEERACFIIDVAVPLDRNTVEKQHEKIRNYGPLADDMKQTWRLQKIQVVPVIISATGLVPQNLHKALKTLDLRAGLYMEMQKAVILATCAIVRRVLSGNNLT

SEQ ID NO: 13962 - protein, 1211 aa, Hermetia illucens
MNCSDVTLYFSGSPPNTFPTFGGNHGALQHWGSVAGLTASPILVGIKIGENNLNSLNGTPGTRRQYPTRLRVVQQHQSGSSPLDVLAVMPSTTRDGRPRRRMVWTNQLNEFIVRAYYRVTDLERNPSGYRHRLHDAFITRFPELSHVPEQNVVNQYRVIVNNNRVALPTRQQIFQEVSLELGLESSNYRTSQRSDTSTPPVRHSMNPVVRRSLVTGDVDPIYNEALTAFQVAFTEYAEILPDARPKIPKLKFTSATTNIIAAVDRILADRLASEITATEVHSLIYVAAATVIRLHNQHLRANNRGMRRRTLPFWVFRLNKRVEKLRKEIGRVTQALLGNPSPRVHRCVANIIGNYHLSNDMPIEEILEVLKQKLAVCSNRIRRYQKSFQRRTDNTLFFQNQRGFYKNLTSSDRESNLNLDQAEDFWRSVWSESSRCNLEAAWLPHLMRSCEALPEMTMPDVTEVDVKAALDKAGNWKAPGVDKIHNFWLKRFKSTHRILANQFNQMIADPDLVPPFFTKGITFLIPKEQGVSCPSKCRPITCLPTIYKVFTSVLCANISKHLDVHKLIAEEQKGCAKGSRGCKEQLIIDTVAVKQAVHQKRNISTAYIDYKSAFDSISHSWLLQVLRLYKINPNVVLLLRTVMKNWSTKLSVSSQTSGEIPIRRGIFQGDSLSPLWFCLALNPLSHLLHESKYGFQVKHGILSKCTLSHLMYIDDIKLYAKDENQLRSLLDITIQFSRDIGMQLGLEKCRIKTIVRGKHTDNEGYSQNNIRIEGMDSDDVYKYLGILQATTPAVAIIKSKLLGEFERRLDLVLKTELYGKNKIMAINTFAIPVLLYTFGVIQWSNTDLESVNRRVRVVLANNNMHNRAAEKLRITIPRHQGGRGVLDLKTLHYNQVHSLREFFYEKQSSSQIHQATVMADNKLSPLNLRSREWDPMSNVTSVQQKIDMWKEKPIHGGHIKNLLLSGIDIEASNKWLTNGVLFYETEAFLTSIQDASLPTKNYKRYILHDSSITNSSCRLCNCEEETIQHITSACRMLSGTEYTNRHNSVCKILHQNLALKYNLVATYHPYYKYTPQRILENDRVKLLWDHTIATDHSVNHNRPDLVLLLKEERACFIIDVAVPLDRNTVEKQHEKIRNYGPLADDMKQTWRLQKIQVVPVIISATGLVPQNLHKALKTLDLRAGLYMEMQKAVILATCAIVRRVLSGNNLT

SEQ ID NO: 13963 - protein, 1123 aa, Hermetia illucens
MPSTTRDGRPRRRMVWTNQLNEFIVRAYYRVTDLERNPSGYRHRLHDAFITRFPELSHVPEQNVVNQYRVIVNNNRVALPTRQQIFQEVSLELGLESSNYRTSQRSNTSTPPVRHSMNPVVRRSLVTGDVDPIYNEALTAFQVAFTEYAEILPDARPRIPKLKFTSATTNIIAAVDRILADRLASEITATEVHSLIYVAAATVIRLHNQHLRANNRGMRRRTLPFWVFRLNKRVEKLRKEIGRVTQALLGNPSPRVHRCVANIIGNYHLSNDMPIEEILEVLKQKLAVCSNRIRRYQKSFQRRTDNTLFFQNQRGFYKNLINSGRDSNLNLDQAEDFWRSVWSESSRCNLEAAWLPHLMRSCEALPEMTMPDVTEVDVKAVLDKAGNWKAPGVDKIHNFWLKRFKSTHRILANQFNQMIADPDLVPPFFTKGITFLIPKEQGVSCPSKCRPITCLPTIYKVFTSVLCANISKHLDVHKLIAEEQKGCAKGSRGCKEQLIIDTVAVKQAVHQKRNISTAYIDYKSAFDSISHSWLLPVLRLYKINPNVVLLLRTVMKHWSTKLSVSSQTSGEIPIRRGIFQGDSLSPLWFCLALNPLSHLLHESKYGFQVKHGILSKCTLSHLMYIDDIKLYAKDENQLRSLLDITIQFSRDIGMQLGLEKCRIKTIVRGKHTDNEGYSQNNIRIEGMDSDDVYKYLGILQATTPAVAIIKSKLLGEFERRLDLVLKTELYGKNKIMAINTFAIPVLLYTFGVIQWSNTDLESVNRRVRVVLANNNMHNRAAEKLRITIPRHQGGRGVLDLKTLHYNQVHSLREFFYEKQSSSQIHQATVMADNKLSPLNLRSREWDPMSNVTSVQQKIDMWKEKPIHGGHIKNLLLSGIDIEASNKWLTNGVLFYETEAFLTSIQDASLPTKNYKRYILHDSSITNSSCRLCNCEEETIQHITSACRMLSGTEYTNRHNSVCKILHQNLALKYNLVATYHPYYKYTPQRILENDRVKLLWDHTIATDHSVNHNRPDLVLLLKEERACFIIDVAVPLDRNTVEKQHEKIRNYGPLADDMKQTWRLQKIQVVPVIISATGLVPQNLHKALKTLDLRAGLYMEMQKAVILATCAIVRRVLSGNNLT

SEQ ID NO: 13964 - protein, 1123 aa, Hermetia illucens
MPSTTRDGRPRRRMVWTSQLNEFIVRAYYRVTDLERNPSGYRHRLHDAFITRFPELSHVPEQNVVNQYRVIVNNNRVALPTRQQIFQEVSLELGLESSNYRTSQRSNTSTPPVRHSMNPVVRRSLVTGDVDPIYNEALTAFQVAFTEYAEILPDARPRIPKLKFTSATTNIIAAVDRILADRLASEITATEVHSLIYVAAATVIRLHNQHLRANNRGMRRRTLPFWVFRLNKRVEKLRKEIGRVTQALLGNPSPRVHRCVANIIGNYHLSNDMPIEEILEVLKQKLAVCSNRIRRYQKSFQRRTDNTLFFQNQRGFYKNLINSGRESNLNLDQAEDFWRSVWSESSRCNLEAAWLPHLMRSCEALPEMTMPDVTEVDVKAVLDKAGNWKAPGVDKIHNFWLKRFKSTHRILANQFNQMIADPDLVPPFFTKGITFLIPKEQGVSCPSKCRPITCLPTIYKVFTSVLCANISKHLDVHKLIAEEQKGCAKGSRGCKEQLIIDTVAVKQAVHQKRNISTAYIDYKSAFDSISHSWLLQVLRLYKINPNVVLLLRTVMKNWSTKLSVSSQTSGEIPIRRGIFQGDSLSPLWFCLALNPLSHLLHESKYGFQVKHGILSKCTLSHLMYIDDIKLYAKDENQLRSLLDITIQFSRDIGMQLGLEKCRIKTIVRGKHTDNEGYRQNNIRIEGMDSDDVYKYLGILQATTPAVAIIKSKLLGEFERRLDLVLKTELYGKNKIMAINTFAIPVLLYTFGVIQWSNTDLEAVNRRVRVVLANNNMHNRAAEKLRITIPRHQGGRGVLDLKTLHYNQVHSLREFFYEKQSSSQIHQATVMADNKLSPLNLRSREWDPMSNVTSVQQKIDMWKEKPIHGGHIKNLLLSGIDIEASNKWLTNGVLFYETEAFLTSIQDASLPTKNYKRYILHDSSITNSSCRLCNCEEETIQHITSACRMLSGTEYTNRHNSVCKILHQNLALKYNLVATYHPYYKYTPQRILENDRVKLLWDHTIATDHSVNHNRPDLVLLLKEERACFIIDVAVPLDRNTVEKQHEKIRNYGPLADDMKQTWRLQKIQVVPVIISATGLVPQNLHKALKMLDLRAGLYMEMQKAVILATCAIVRRVLSGNNLT

SEQ ID NO: 13965 - protein, 1211 aa, Hermetia illucens
MNCSDVTLYFSGSPPNTFPTFGGNHGALQHWGSVAGLTASPILVGIKIGENNLNSLNGTPGTRRQYPTRLRVVQQHQSGSSPLDVLAVMPSTTRDGRPRRRMVWTSQPNEFIVRAYYRVTDLERNPSGYRHRLHDAFITRFPELSHVPEQNVVNQYRVIVNNNRVALPTRQQIFQEVSLELGLESSNYRTSQRSNTSTPPVRHSMNPVVRRSLVTGDVDPIYNEALTAFQVAFTEYAEILPDARPRIPKLKFTSATTNIIAAVDRILADRLASEITATEVHSLIYVAAATVIRLHNQHLRANNRGMRRRTLPFWVFRLNKRVEKLRKEIGRVTQALLGNPSPRVHRCVANIIGNYHLSNDMPIEEILEVLKQKLAVCSNRIRRYQKSFQRRTDNTLFFQNQRGFYKNLINSGRESNLNLDQAEDFWRSVWSESSRCNLEAAWLPHLMRSCEALPEMTMPDVTEVDVKAVLDKAGNWKAPGVDKIHNFWLKRFKSTHRILANQFNQMIADPDLVPPFFTKGITFLIPKEQGVSCPSKCRPITCLPTIYKVFTSVLCANISKHLDVHKLIAEEQKGCAKGSRGCKEQLIIDTVAVKQAVHQKRNISTAYIDYKSAFDSISHSWLLQVLRLYKINPNVVLLLRTVMKNWSTKLSVSSQTSGEIPIRRGIFQGDSLSPLWFCLALNPLSHLLHESKYGFQVKHGILSKCTLSHLMYIDDIKLYAKDENQLRSLLDITIQFSRDIGMQLGLEKCRIKTIVRGKHTDNEGYSQNNIRIEGMDSDDVYKYLGILQAITPAVAIIKSKLLGEFERRLDLVLKTELYGKNKIMAINTFAIPVLLYTFGVIQWSNTDLESVNRRVRVVLANNNMHNRAAEKLRITIPRHQGGRGVLDLKTLHYNQVHSLREFFYEKQSSSQIHQATVMADNKLSPLNLRSREWDPMSNVTSVQQKIDMWKEKPIHGGHIKNLLLSGIDIEASNKWLTNGVLFYETEAFLTSIQDASLPTKNYKRYILHDSSITNSSCRLCNCEEETIQHITSACRMLSGTEYTNRHNSVCKILHQNLALKYNLVATYHPYYKYTPQRILENDRVKLLWDHTIATDHSVNHNRPDLVLLLKEERACFIIDVAVPLDRNTVEKQHEKIRNYGPLADDMKQTWRLQKIEVVPVVISATRLVPQNLHKALKTLDLRAGLYMEMQKAVILATCAIVRRVLSGNNLT

SEQ ID NO: 13966 - protein, 1051 aa, Hermetia illucens
MPLTTRDGRPKRRMVWMNQLNEFIVRAYYRVTDLERNPSGYAFITRFPELSHVPEQNVVNQYRVIVNNNRVALPTRQQIFQEVSLELGLESSNYRTSQRSDTSTPPVRHSMNPVVRRSLVTGDVDPIYNEALTAFQVAFTEYAEILPDARPKIPKLKFTLTTTNIIAAVDRILADRLASEITATEVHSLIYVAAATVIRLHSQHLRANNRGMRTGTLPFWVFRLNKRVEKLRKEIGRVTQALLGNPSPRVHRCVANIIENYHLSNDMPIEDILEVLKQKLAVCSNRIRRYQKSFQRRTDNTLFFQNQRGFYKSLINSGRESNLNLDQAEDFWRSVWSESSRCNLEAAWLPHLMRSCEPLPEMTMPDVTEVDVKAVLDKAVNWKAPGVDKIHNFWLKRFKSTHRILANQFNQMIADPDLVPPFFTKGITFLIPKEQGVSCPSKCRPITCLPTIYKVFTSVLCANISKHLDVHKLIAEEQKGCAKGSRGCKEQLIIDTVAVKQAVHQKRNISTAYIDYKSAFDSISHSWLLQVLRLYKINLNIVLLLRTVMKNWSTKLSVSSQTSGEIPIRRGIFQGDSLSPLWFCLALNPLSYLLHESKYGFQVKHGILSKCTLSHLMYIDDIKLYAKDENQLRSLLDITIQFSRDIGMQLGLEKCRIKTIVRGKHTDNEGYSQNNIRIEGMDSDDVYKYLGILQATTPAVAIMKSKLLGEFERRLDLVLKTELYGKNKIMAINTFAIPVLLYTFGVIHWSNTDLESVNRRVRVVLANNNMHNRAGEKLRITIPRHQGGRGVLDLKTLHYNQVHSLREFFYEKQSCSQIHQATVMADNKLSPLNLKSREWDLMSNVTSVQQKIDMWKEKPIHGGHIKNLLLSGIDIEASNKWLTNGVLFYETEAFLTSIQDASLPTKNYKRYILHDSSITNSSCRLCNCEEETIQHITSVCRMLSGTEYTNRHNSVCKILHQNLAFKYNLVATYHPYYKYTPQRILENDRVKLLWDHTIATDHSVNYNRPDLVLLLKEERACFIIDVAVPLDRNTVEKQHEKSATTAPWQTI

SEQ ID NO: 13967 - protein, 1055 aa, Hermetia illucens
MPSTTRDGRPRRRMVWTNQLNEFIVRAYYRVTDLERNPSGYRHRLHDAFITRFPELSHVPEQNVVNQYRVIVNNNRVALPTRQQIFQEVSLELGLEASNYRTSQRSDTSTPPVRHSMNPVVRRSLVTGDVDPIYNEALTAFQVAFTEYAEILPDARPKIPKLKFTSATTNIIAAVDRILADRLVSEITATEVHSLIYVAAATVIRLHNQHLRANNRGMHRGTLPFWVFRLNKRVEKLRKEIGRVTQALLGNPSPRVHRCVANIIGNYHLSNDMPIEEILEVLKQKLAVCSNRIRRYQKSFQRRTDNTLFFQNQRGFYKNLASSDRESNLNLDQAEDFWRSVWSESSRCNLEAAWLPHLMRSCEALPEMTMPDVTEVDVKAALDKAGNWKAPGVDKIHNFWLKRFKSTHRILANQFNQMIADPDLVPPFFTKGITFLIPKEQGASCPSKCRPITCLPTIYKVFTSVLCANISKHLDVHKLIAEEQKGCTKGSRGCKEQLIIDTVAVKQAVHQKRNISIAYIDYKSAFDSISHSWLLQVLRLYKINPNVVLLLRTVMKNWSTKLSVSSQTSGEIPIRRGIFQGDSLSPLWFCLALNPLSHLLHESKYGFQVKHGILSKCTLSHLMYTDDIKLYAEDENQLRSLLDITIQFSRDIGMQLGLEKCRIKTIVRGKHTDNEGYSQNNIRIEGMDSDDVYKYLGILQATTPAVAIIKSKLLGEFERRLDLVLKTELYGKNKVMAINTFAIPVLLYTFGVIQWSNTDLESVNRRVRVVLANNNMHNRAAEKLRITIPRHQGGRGVLDLKTLHYNQVHSLREFFYEKQSSSQIHQATVMADNKLSPLNLRSREWDPMSNVTSVQQKIDMWKEKPIHGGHIKNLLLSGIDIEASNKWLTNGVLFYETEAFLTSIQDASLPTKNYKRYILHDSSITNSSCRLCNCEQETIQHITSACRMLSGTEYTNRHNSVCKILHQNLALKYNLVATYHPYYKYTPQRILENDRVKLLWDHTIATDHSVNHNRPDLVLLLKEERACFIIDVAVPLDRNTVEKQHEKIRNYGPLI

SEQ ID NO: 13968 - protein, 1123 aa, Hermetia illucens
MPSTTRDGRPRRRMVWTNQLNEFIVRAYYRVTDLERNPSGYRHRLHDAFITRFPELSHVPEQNVVNQYRVIVNNNRVALPTKQQIFQEVSLELGLESSNYRTSQRSNTSTPPVRHSMNPVVRRSLVTGDVDPIYNEALTAFQVAFTEYAEILPDARPGIPKLKFTSATTNIIAAVDRILADRLASEITATEVHSLIYVAAATVIRLHNQHLRANNRGMRRRTLPFWVFRLNKRVEKLRKEIGRVTQALLGNPSPRVHRCVANIIGNYHLSNDMPIEKILEVLKQKLAVCSNRIRRYQKSFQRRTDNTLFFQNQRGFYKNLINSGRDSNLNLDQAEDFWRSVWSESSRCNLEAAWLPHLMRSCEALPEMTMPDVTEVDVKAVLDKAGNWKAPGVDKIHNFWLKRFKSTHRILANQFNQMIADPDLVPPFFTKGITFLIPKEQGVSCPSKCRPITCLPTIYKVFTSVLCANISKHLDVHKLIAEEQKGCAKGSRGCKEQLIIDTVAVKQAVHQKRNISTAYIDYKSVFDSISHSWLLQVLRLYKINPNVVLLLRTVMKNWSTKLSVSSQTSGEIPIRRGIFQGDSLSPLWFCLALNPLSHLLHESKYGFQVKHGILSKCTLSHLMYIDDIKLYAKDENQLRSLLDITIQFSRDIGMQLGLEKCRIKTIIRGKHTDNEGYSQNNIRIEGMDSDDVYKYLGILQATTPAVAIIKSKLLGEFERRLDLVLKTELYGKNKIMAINTFAIPVLLYTFGVIQWNNTDLESVYRRVRVVLANNNMHNRAAEKLRITIPRHQGGRGVLDLKTLHYNQVHSLREFFYEKQSSSQIHQATVMADNKLSPLNLRSREWDPMSNVTSVQQKIDMWKEKPIHGGHIKNLLLSGIDIEASNKWLTNGVLFYETEAFLTSIQDASLPTKNYKRYILHDSSITNSSCRLCNCEEETIQHITSACRMLSGTEYTNRHNSVCKILHQNLALKYNLVATYHPYYKYIPQRILENDRVKLLWDHTIATDHSVNHNRPDLVLLLKEERACFIIDVAVPLDRNTVEKQHEKIRNYGPLADDMKQTWRLQKIQVVPVIISATGLVPQNLHKALKTLDLRAGLYMEMQKAVILATCAIVRRVLSGNNLT

SEQ ID NO: 13969 - protein, 1123 aa, Hermetia illucens
MPSTIRDGRPRRRMVWTNQLNEFIVRAYYRVTDLERNPSGYRHRLHDAFITRFPELSHVPEQNVVNQYRVIVNNNRVALPTRQQIFQEVSLELGLESSNYRTSQRSNTSTPPVRHSMNPVVRRSLVTGDVDPIYSEALTAFQVAFTEYAEILPDARPRIPKLKFTSATTNIIAAVDRILADRLASEITATEVHSLIYVAAATVIRLHNQHLRANNRGMRRRTLPFWVFRLNKRVEKLRKEIGRVTQALLGNPSPRVHRCVANIIGNYHLSNDMPIEEILEVLKQKLAVCSNRIRRYQKSFQRRTDNTLFFQNQRGFYKNLINSGRESNLNLDQAEDFWRSVWSESSRCNLEAAWLPHLMRSCEALPEMTMPDVTEVDVKAVLDKAGNWKAPGVDKIHNFLLKRFKSTHRILANQFNQMIADPDLVPPFFTKGITFLIPEEQCVSCPSKCRPITCLPTIYKVFTSVLCANISKHLDVHKLIAEEQKGCAKGSRGCKEQLIIDTVAVKQAVHQKRNISTAYIDYKSAFDSISHSWLLQVLRLYKINPNVVLLLRTVMKNWSTKLSVSSQTSGEIPIRRGIFQGDSLSPLWFCLALNPLSHLLHESKYGFQVKHGILSKCSLSHLMYIDDIKLYAKDENHLRSLLDITTQFSRDIGMQLGLEKCRIKTIVRGKHTDNEGYSQNNIRIEGMDSDDVYKYLGILQATTPAVTIIKSKLLGEFERRLDLVLKTELYGKNKIMAINTFAIPVLLYTFGVIQWSNTDLESVNRRVRVVLANNNMHNRAAEKLRITIPRHQGGRGVLDLKTLHYNQVHSLREFFYEKQFSSQIHQATVMADNKLSPLNLRSREWDPMSNVTSVQQKIDMWKEKPIHGGHIKNLLLSGIDIEASNKWLTNGVLFYETEAFLTSIQDASLPTKNYKRYILHDSSITNSSCRLCNCEEETIQHITSACRMLSGTEYTNRHNSVCKILHQNLALKYNLVATYHPYYKYTPQRILENDRVKLLWDHTIATDHSVNHNRPDLVLLLKEERACFIIDVAVPLDRNTVEKQHEKIRNYGPLADDMKQTWRLQKIEVVPVIISATGLVPQNLHKALKTLDLRAGLYMEMQKAVILATCAIVRRVLSGNNLT

SEQ ID NO: 13970 - protein, 1123 aa, Hermetia illucens
MPSTTRDGRPRRRMVWTNQLNEFIVRAYYRVTDLERNPSGYRHRLHDAFITRFPELSHVPEQNVVNQYRVIVNNNRVALPTRQQIFQEVSLELGLESSIYRTSQRSNTSTPPVRHSMNPVVRRSLVTGDVDPIYNEALTAFQVAFTEYAEILPDARPKIPKLRFTSATTNIIAAVDRILADRLAGEITATEVHSLIYVAAATVIRLHNQHLRANNRGVRRGTLPFWVFRLNKRVEKLRKEIGRVTQALLGNPSPRVHRCVANIIGNYHLSNDMPIEEILEVLKQKLAVCSNRIRRYQKSFQRRTDNTLFFQNQRGFYKNLTSSDRESNLNLDQAEDFWRSVWSESSRCNLEAAWLPHLMRSCEALPEMTMPDVTEVDVKAALDKAGNWKAPGVDKIHNFWLKRFKSTHRILANQFNQMIADPDLVPPFFTKGIIFLIPKEQGASCPSKCRPITCLPTIYKAFTSVLCANISKHLDVHKLIAEEQKGCAKGSRGCKEQLIIDTVAVKQAVHQKRNISTAYIDYKSAFDSISHSWLLQVLRLYKINPNVVLLLRTVLKNWSTKLSVSSQTSGEIPIRRGIFQGDSLSPLWFCLAWNPLSHLLHESKYGFQVKHGILSKCTLSHLMYIDDIKLYAKDENQLRSLLDITIQFSRDIGMQLGLEKCRIKTIVGGKHTDNEGYSQNNIRIEGMDSDDVYKYLGILQATTPAVAIIKSKLLGEFERRLDLVLKTELYGKNKIMAINTFAIPVLLYTFGVIQWSNTDLEAVNRRVRVFLANNNMHNRAAEKLRITIPRHQGGRGVLDLKTLHYNQVHSLREFFYEKQSSSQIHQATVMADNKLSPLNLRSREWDPMSNVTSVQQKIDMWKEKPIHGGHIKNLLLSGIDIEASNKWLTNGVLFYETEAFLTSIQDASLPTKNYKRYILHDSSITNSSCRLCNCEEETIQHITSACRMLSGTEYTNRHNSVCKILHQNLALKYNLVATYHPYYKYTPQRILENDRVKLLWDHTIATDHSVNHNRPDLVLLLKEERACFIIDVAVPLDRNTVEKQHEKIRNYGPLADDMKQAWRLQKIEVVPVIISAKGLVPQNLHKALKTLDLRAGLYMEMQKAVILATCAIVRRVLSGNNLP

SEQ ID NO: 13971 - protein, 1110 aa, Hermetia illucens
MVWTNQLNEFIVRAYYRVTDLERNPSGYRHRLHDAFITRFPELSHVPEQNVVNQYQVIVNNNRVALPTRQQIFQEVSLELGLESSNYRTSQRSNTSTPPVRHSMNPVVRRSLVTGDVDPIYNEALTAFQVAFTEYAEILPDARPKIPKLKFTSATTNIIAAVDRILADRLASETTATEVHSLIYVAAATVIRLHNQHLRANNRGMRRWTLPFWVFRLNKRVEKLRKEIGRVTQALLGNPSPRVHRCVANIIGNYHLSNDMPIEEILEVLKQKLAVCSNRIRRYQKSFQRRTDNTLFFQNQRGFYKNLINSGRESNLNLDQAEDFWRSVWSESSRCNLEAAWLPHLMRSCEALPEMTMPDVTEVDVEAALDKAGNWKAPGVDKIHNFWLKRFKSTHRILANQFNQMIADPDLVPPFFTKGITFLIPKEQGVSCPSKCRPITCLPTIYKVFTSVLCANISKHLDVHKLIAEEQKGCAKGSRGCKEQLIIDTVAVKQAVHQKRNISTAYIDYKSAFDSISHSWLLQVLRLYKINPNVVLLLRTVMKNWSTELSVSSQTSGEIPIRHGIFQGDSLSPLWFCLALNPLSHLLHESKYGFQVKHGILSKCTLSHLMYIDDIKLYAKDENQLRSLLDITIQFSRDIGMQLGLEKCRIKTIVRGKHTDNEGYSQNNIRIEGMDSDDVYKYLGILQATTPAVAIIKSKLLGEFERRLDLVLKTELYGKNKIMAINTFAIPVLLYTFGVIQWSNTDLESVNRRVRVVLANNNMHNRAAEKLRITIPRHQGGRGVLDLKTMHYNQVHSLREFFYEKQSSSQIHQATVMADNKLSPLNLRSREWDPMSNVTSVQQKIDMWKEKPIHGGHIKNLLLSGIDIEASNKWLTNGVLFYETEAFLTSIQDASLPTKNYKRYILHDSSITNSSCRLCNCEEETMQHITSACRMLSGTEYTNRHNSVCKILHQNLALKYNLVATYHPYYKYTPQRILENDRVKLLWDHTIATDHSVNHNRPDLVLLLKEERACFIIDVAVPLDRNTVEKQHEKIRNYGPLADDMKQTWRLQKIQVVPVIISATGLVPQNLHKALKTLDLRAGLYMEMQKAIILATCAIVRRVLSGNNLT

SEQ ID NO: 13972 - protein, 1123 aa, Hermetia illucens
MPSTTRDGRPRRRMVWTNQLNEFIVRAYYRVTDLERNPSGYRHRLHDAFITRFPELSHVPEQNVVNQYRVIVNNNRVALPTRQQIFQEVSLELGLESSNYRTSQRSNTSTPPVRHSMNPVVRRSLVTGDVDPIYNEALTAFQVAFTEYAEILPDARPRIPKLKFTSATTNIIAAVDRILADRLASEITATEVHSLIYVAAATVIRLHNQHLRANNRGMRRRTLPFWMFRLNKRVEKLRKEIGRVTQALLGNPSPRVHRCVANIIGNYHLSNDMPIEEILEVLKQKLAVCSNRIRRYQKSFQRRTDNTLFFQNQRGFYKNLINSGRESNLNLDQAEDFWRSVWSESSRCNLEAAWLPHLMRSCEALPEMTMPDVTEVDVKAVLDKAGNWKAPGVDKIHNFWLKRFKSTHRILANQFNQMIADPDLVPPFFTKGITFLIPKEQGVSCPSKCRPITCLPTIYKVFTSVLCANISKHLDVHKLIAEEQKGCAKGSRGCKEQLIIDTVAVKQAVHQKRNISTAYIGYKSAFDSISHSWLLQVLRLYKINPNVVLLLRTVMKNWSTKLSVSSQTSGEIPIRRGIFQGDSLSPLWFCLALNPLSHLLHESKYGFQVRHGILSKCTLSHLMYIDDIKLYAKDENQLRSLLDITIQFSRDIGMQLGLEKCRIKTIVRGKHTDNEGYSQNNIRIEGMDSDDVYKYLGILQATTPAVAIIKSKLLGEFERRLDLVLKTELYGKNKVMAINTFAIPVLLYTFGVIQWSNTDLESVNRRVRVVLANNNMHNRAAEKLRITIPRHQGGRGVLDLKTLHYNQVHSLREFFYEKQSSSQIHQATVMADNKLSPLNLRSREWDPMSNVTSVQQKIDMWKEKPIHGGHIKNLLLSGIDIEASNKWLTNGVLFYETEAFLTSIQDASLPTKNYKRYILHDSSITNSSCRLCNCEEETIQHITSACRMLSGTEYTNRHNSVCKILHQNLALKYNLVATYHPYYKYTPQRILENDRVKLLWDYTIATDHSVNHNRPDLVLLLKEERACFIIDVAVPLDRNTVEKQHEKIRNYGPLADDMKQTWRLQKIQVVPVIISATGLVPQNLHKALKTLDLRAGLYMEMQKAVIFATCAIVRRVLSGNNLT

SEQ ID NO: 13973 - protein, 906 aa, Hermetia illucens
MRRRTLPFWVFRLNKRVEKLRKEIGRVTQALLGNPSPRVHRCVANIIGNYHLSNDMPIEEILEVLKQKLAVCSNRIRRYQKSFQRRTDNTLFFQNQRGFYKNLINSGRESNLNLDQAEDFWRSVWSESSRCNLEAAWLPHLMRSCEALPEMTMPDVTEVDVKAVLDKAGNWKAPGVDKIHNFWLKRFKSTHRILANQFNQMIADPDLVPPFFTKGITFLIPKEQGVSCPSKCRPITCLPTIYKVFTSVLCANISKHLDVHKLIAEEQKGCARGSRGCKEQLIIDTVAVKQAVHQKRNISTAYIDYKSAFDSISHSWLLQVLRLYKINPNVVLLLRTVMKNWSTKLSVSSQTSGEIPIRRGIFQGDSLSPLWFCLALNPLSHLLHESKYGFQVKHGILSKCTLSHLMYIDDIKLYAKDENQLRSLLDITIQFSRNIGMQLGLEKCRIKTIVRGKHTDNEGYSQNNIRIEGMDSDDVYKYLGILQATTPAVAIIKSKLLGEFERRLDLVLKTELYGKNKIMAINTFAIPVLLYTFGVIQWSNTDLESVNRRIRVVLANNNMLNRAAEKLRITIPRHQGGRGVLDLKTMHYNQVHSLREFFYEKQSSSQIHQATVMADNKLSPLNLRSREWDPMSNVTSVQQKIDMWKEKPIHGGHIKNLLLSGIDIEASNKWLTNGILFYETEAFLTSIQDASLPTKNYKRYILHDSSITNSSCRLCNCEEETIQHITSACRMLSGTEYTNRHNSVCKILHQNLALKYNLVATYHPYYKYTPQRILENDRVKLLWDHTIATDHSVNHNRPDLVLLLKEERACFIIDVAVPLDRNTVEKQHEKIRNYGPLADDMKQTWRLQKIQVVPVIISATGLVPQNLHKALKTLDLRAGLYMEMQKAVILATCAIVRRVLSGNNLT

SEQ ID NO: 13974 - protein, 1123 aa, Hermetia illucens
MPSTTRDGRPRRRMVWTSQLNEFIVRAYYRVTDLERNPSGYRHRLHDAFITRFPELSHVPEQNVVNQYRVIVNNNRVALPTRQQIFQEVSLELGLESSNYRTSQRSNTSTSPVRHSMNPVVRRSLVTGDVDPIYNEALTAFQVAFTEYAEILPDARPRIPKLKFTSATTNIIAAVDRILADRLASEITATEVHSLIYVAAATVIRLHNQHLRANNRGMRRRTLPFWVFRLNKRVEKLRKEIGRVTQALLGNPSPRVHRCVANIIGNYHLSNDMPIEEILEVLKQKLAVCSNRIRRYQKSFQRRTDNTLFFQNQRGFYKNLINSGRESNLNLDQAEDFWRSVWSESSRCNLEAAWLPHLMRSCEALPEMTMPDVTEVDVKAVLDKAGNWKAPGVDKIHNFWLKRFKSTHRILANQFNQMIADPDLVPPFFTKGITFLIPKEQGVSCPSKCRPITCLPTIYKVFTSVLCANISKHLDVHKLIAEEQKGCAKGSRGCKEQLIIDTVAVKQAVHQKRNISTAYIDYKSAFDSISHSWLLQVLRLYKINPNVVLLLRTVMRNWSTKLSVSSQTSGEIPIRRGIFQGDSLSPLWFCLALNPLSHLLHESKYGFQVKHGILSKCTLSHLMYIDDIKLYAKDENQLRSLLDITIQFSRDIGMQLGLEKCRIKTIVRGKHTDNEGYRQNNIRIEGMDSDDVYKYLGILQATTPAIAIIKSKLLGEFERRLDLVLKTELYGKNKIMAINTFAIPVLLYTFGVIQWSNTDLESVNRRVRVVLANNNMHNRAAEKLRITIPRHQGGRGVLDLKTLHYNQVHSLREFFYEKQSSSQIHQATVMADNKLSPLNLRSREWDPMSNVTSVQQKIDMWKEKPIHGGHIKNLLLSGIDIEASNKWLTNGVLFYETEAFLTSIQDASLPTKNYKRYILHDSSITNSSCRLCNCEEETIQHITSACRMLSGTEYTNRHNSVCKILHQNLALKYNLVATYHPYYKYTPQRILENDRVKLLWDHTIATDHSVNHNRPDLVLLLKEERACFIIDVAVPLDRNTVEKQHEKIRNYGPLADDMKQTWRLQKIEVVPVIISATGLVPQNLHKTLKTLDLRAGLYMEMQKAVILATCAIVRRVLSGNNLT

SEQ ID NO: 13975 - protein, 1123 aa, Hermetia illucens
MPSTTRDGRPRRRMVWTSQLNEFIVRAYYRVTDLERNPSGYRHPLHDAFITRFPELSHVPEQNVVNQYRVIVNNNRVALPTRQQIFQEVSLELGLESSNYRTSQRSNTSTPPVRHSMNPVVRRSLVTGDVDPIYNEALTAFQVAFTEYAEILPDARPRIPKLKFTSATTNIIAAVDRILADRLASEITATEVHSLIYVAAATVIRLHNQHLRANNRGMRRRTLPFWVFRLNKRVEKLRKEIGRVTQALLGNPSPRVHRCVANIIGNYHLSNDMPIEEILEVLKQKLAVCSNRIRRYQKSFQRRTDNTLFFQNQRGFYKNLINSGRESNLNLDQAEDFWRSIWSESSRCNLEAAWLPHLMRSCEALPEMTMPDVTEVDVKAVLDKAGNWKAPGVDKIHNFWLKRFKSTHRILANQFNQMIADPDLVPPFFTKGITYLIPKEQGVSCPSKCRPITCLPTIYKVFTSVLCANISKHLDVHKLIAEEQKGCAKGSRGCKEQLIIDTVAVKQAVHQKRNISTAYIDYKSAFDSISHSWLLQVLRLYKINPNVVLLLRTVMKNWSTKLSVSSQTSGEIPIRRGIFQGDSLSPLWFCLALNPLSHLLHESKYGFQVKHGILSKCTLSHLMYIDDIKLYAKDENQLRSLLDITIQFSRDIGMQLGLEKCRIKTIVRGKHTDNEGYSQNNIRIEGMDSDDVYKYLGILQATTPAVAIIKSKLLGEFERRLDLVLKTELYGKNKIMAINTFAIPVLLYTFGVIQWSNTDLESVNRRVRVVLANNNMHNRAAEKLRITIPRHQGGRGVLDLKTLHYNQVHSLREFFYEKQSSSEIHQATVMADNKLSPLNLRSREWDPMSNVTSVQRKIDMWKEKPIHGGHIKNLLLSVIDIGASNKWLTNGVLFYETEAFLTSIQDASLPTKNYKRYILHDSSITNSSCRLCNCEEETIQHITSACRMLSGTEYTNRHNSVCKILHQNLALKYNLVATYHPYYKYTPQRILENDRVKLLWDHTIATDHSVNHNRPDLVLLLKEERACFIIDVAVPLDRNTVEKQHEKIRNYGPLADDMKQTWRLQKIQVVPVIISATGLVPQNLHKALKTLDLRAGLYMEMQKAVILATCAIVRRVLSGNNLT

SEQ ID NO: 13976 - protein, 1123 aa, Hermetia illucens
MPSTTRDGRPRRRMVWTSQLNEFIVRAYYRVTDLERNPSGYRHRLHDAFITRFPELSHVPEQNVVNQYRVIVNNNRVALPTRQQIFQEVSLELGLESSNYRTSQRSNTSTPPVRHSMNPVVRRSLVTGDVDPIYNEALTAFQVAFTEYAEILPDARPRIPKLKFTSATTNIIAAVDRILADRLASEITATEVHSLIYVAAATVIRLHNQHLRANNRGMRRRTLPFWVFRLNKRVEKLRKEIGRVTQALLGNPSPRVHRCVANIIGNYHLSNDMPIEEILEVLKQKLAVCSNRIRRYQKSFQRRTDNTLFFQNQRGFYKNLINSGRESNLNLDQAEDFWRSVWSESSRCNLEAAWLPHLMRSCEALPEMTMPDVTEVDVKAALDKAGNWKAPGVDKIHNFWLKRFKSTHRILANQFKQMIADPDLVPPFFTKGITFLIPKEQGVSCPSKCRPITCLPTIYKVFTSVLCANISKYLDVHKLIAEEQKGCAKGSRGCKEQLIIDTVAVKQAVHQKRNISTAYIDYKSAFDSISHSWLLQVLRLYKINPNVVLLLRTVMKNWSTKLSVSSQTSGEIPIRRGIFQGDSLSPLWFCLALNPLSHLLHESKYGFQVKHGILSKCTLSHLMYIDDIKLYAKDENQLRSLLDITIQFSRDIGMQLGLEKCRIKTIVRGKHTDNEGYSQNNIRIEGMDSDDVYKYLGILQATTPAVAIIKSKLLGEFERRLDLVIKTELYGKNKIMAINTFAIPVLLYTFGVIQWSNTDLESVNRRVRVVLANNNMHNRAAEKLRITIPRHQGGRGVLDLKTLHYNQVHSLREFFYEKQSSSQIHQATVMADNKLSPLNLRSREWDPMSNVTSVQQKIDMWKEKPIHGGHIKNLLLSGIDIEASNKWLTNGVLFYETEAFLTSIQDASLPTKNYKRYILHDSSITNSSCRLCNCEEETIQHITSACRMLSGTEYTNRHNSVCKILHQNLALKYNLVATYHPYYKYTPQRILENDRVKLLWDHTIATDHSVNHNRPDLVLLLKEERACFIIDVAVPLDRNTVEKQHEKIRNYGPLADDMKQTWRLQKIQVVPVIISATGLVPQNLHKALKTLDLRAGLYMEMQKAVILATCAIVRRVLSGNNLT

SEQ ID NO: 13977 - protein, 1123 aa, Hermetia illucens
MPSTTRDGRPRRRMVWTNQLNEFIVRAYYRVTDLERNPSGYRHRLHDAFITRFPELSHVPEQNVVNQYRVIVNNNRVALPTRQQIFQEVSLELGLESSNYRTSQRSNSSTPPVRHSMNPVVRRSLVTGDVDPIYNEALTAFQVAFTEYAEILPDARPRIPKLKFTSATTNIIAAVDRILADRLASEITATEVHSLIYVAAATVIRLHNQHLRANNRGMRRSTLPFWVFRLNKRVEKLRKEIGRVTQALLGNPSPRVHRCVANIIGNYHLSNDMPIEEILEVLKQRLAVCSNRIRRYQKSFQRRTDNTLFFQNQRGFYKNLINSGRESNLNLDQAEDFWRSVWSESSRCNLEAAWLPHLMRSCEALPEMTMPDVTEVDVKAVLDKAGNWKAPGIDKIHNFWLKRFKSAHRILANQFNQMIADPDLVPPFFTKGITFLIPKEQGVSCPSKCRPITCLPTIYKVFTSVLCANISKHLDVHKLIAEEQKGCAKGSRGCKEQLIIDTVAVKQAVHQKRNISTAYIDYKSAFDSISHSWLLQVLRLYKINPNVVLLLRTVMKNWSTKLSVSSQTSGEIPIRRGIFQGDSLSPLWFCLALNPLSHLLHESKYGFQVKHGILSKCTLSHLMYIDDIKLYAKDENQLRSLLDITIQFSRDIGMQLGLEKCHIKTIVRGKHTDNEGYSQNNIRIEGMDSDDVYKYLGILQAITPAVAIIKSKLLGEFERRLDLVLKTELYGKNKIMAINTFAIPVLLYTFGVIQWSNTDLESVNRRVRVVLANNNMHNRAAEKLRITIPRHQGGRGVLDLKTMHYNQVHSLREFFYEKQSSSQIHQATVMADNKLSPLNLRSREWDPMSNVTSVQQKIDMWKEKPIHGDHIKNLLLSGIDIEASNKWLTNGVLFYETEAFLTSIQDASLPTKNYKRYILHDSSITNSSCRLCNCEEETIQHITSACRMLSGTEYTNRHNSVCKILHQNLALKYNLVATYHPYYKYTPQRILENDRVKLLWDHTIATDHSVNHNRPDLVLLLKEERACFIIDVAVPLHRNTVEKQHEKIRNYGPLADDMKQIWRLQKIEVVPVIISATGLVPQNLHKALKTLDLRAGLYMEMQKAVILATCAIVRRVLSGNNLT

SEQ ID NO: 13978 - protein, 906 aa, Hermetia illucens
MRRRTLPFWVFRLNKRVEKLRKEIGRVTQALLGNPSPRVHRCVANIIGNYHLSNDMPIEEIFEVLKQKLAVCSNRIRRYQKSFQRRTDNTLFFQNQRGFYKNLINSGRESNLNLDQAEDFWRSVWSEYSRCNLEAAWLPHLMRSCEALPEMTMPDVTEVDVKAVLDKAGNWKAPGVDKIHNFWLKRFKSTHRILANQFNQMIADPDLVPPFFTKGITFLIPKEQGVSCPSKCRPITCLPTIYKVFTSVLCANISKHLDVHKLIAEEQKGCAKGSRGCKEQLIIDTVAVKQAVHQKRNISTAYIDYKSAFDFISHSWLLQVLRLYKINPNVVLLLRTVMKNWSTKLSVSSQTSGEIPIRRGIFQGDSLSPLWFCLALNPLSHLLHESKYGFQVKHGILSKCTLSHLMYIDDIKLYAKDENQLRSLLDITIQFSRDIGMQLGLEKCRIKTIVRGKHTDNEGYSQNNIRIEGMDSDDVYKYLGILQATTPAVAIMKSKLLREFERRLDLVLKTELYGKNKIMAINTFAIPVLLYTFGVIQWSNTDLESVNRRVRVVLANNNMHNRAAEKLRITIPRHQGGRGVLDLKTMHYNQVHSLREFFYEKQSSSQIHQATVMADNKLSPLNLRSREWDPMSNVTSVQQKIDMWKEKPIHGGHIKNLLLSGIDIEASNKWLTNGVLFYETEAFLTSIQDASLPTKNYKRYILHDSSITNSSCRLCNCEEETIQHITSACRMLSGTEYTNRHNSVCKILHQNLALKYNLVATYHPYYKYTPQRILENDRVKLLWDHTIATDHSVNQNRPDLVLLLKEERACFIIDVAVPLDRNTVEKQHEKIRNYGPLADDMKQTWRLQKIQVVPVIISATGLVPQNLHKALKTLDLRAGLYMEMQKAVILATCAIVRRVLSGNNLT

SEQ ID NO: 13979 - protein, 1123 aa, Hermetia illucens
MPSTTRDGRPRRRMVWTSQLNEFIVRAYYRVTDLERNPSGYRHRLHDAFITRFPELSHVPEQNVVNQYRVIVNNNRVALPTRQQIFQEVSLELGLESSNYWTSQRSNTSTPPVRHSMNPVVRRSLVTGDVDPIYNEALTAFQVAFTEYAEILPDARPRIPKLKFTSATTNIIAAVDRILADRLTSEITTTEVHSLIYVAAATVIRLHNQHLRANNRGMRRRTLPFWVFRLNKRVEKLRKEIGRVTQALLGNPSPRVHRCVANIIGNYHLSNDMPIEEILEVLKQKLAVCSNRIRRYQKSFQRRTDNTLFFQNQRGFYKNLINSGRDSNLNLDQAEDFWRSVWSESSRCNLEAAWLPHLMRSCEALPEMTMPDVTEVDVKAVLDKAGNWKAPGVDKIHNFWLKRFKSTHSILANQFNQMIADPDLVPPFFTKGITFLIPKEQGVSCPSKCRPITCLPTIYKVFTSVLCANISKHLDVHKLIAEEQKGCAKGSRGCKEQLIIDTVAVKQAVHQKRNISTAYIDYKSAFDSISHSWLLQVLRLYKINPNVVLLLRTVMKNWSTKLSVSSQTSGEIPIRRGIFQGDSLSPLWFCLALNPLSHLLHESKYGFQVKHGILSKCALSHLMYIDDIKLYAKDKNQLRSLLDITIQFSRDIGMQLGLEKCRIKTIVRGKHTDNEGYSQNNIRIEGMDSDDVYKYLGILQATTPAVAIIKSKLLGEFERRLDLVLKTELYGKNKIMAINTFAIPVLLYTFGMIQWSNTDLESVNRRVRVVLANNNMRNRAAEKLRITIPRHQGGRGVLDLKTMHYNQVHSLREFFYKKQSSSQIHQATVMADNKLSPLNLRSREWDPMSNVTSVQQKIDMWKEKPIHGGHIKNLLLSGIDIEASNKWLTNGVLFYETEAFLTSIQDASLPTKNYKRYILHDSSITNSSCRLCNCEEETIQHITSACRMLSGTEYTNRHNSVCKILHQNLALKYNLVATYHPYYKYTPQRILENDRVKLLWDHTIATDHSVNHNRPDLVLLLKEERACFIIDVAVLLDRNTVEKQHEKIRNYGPLADDMKQTWRLQKIQVVPVIISATGLVPQNLHKALKTLDLRAGLYMEMQKAVILATCAIVRRVLSGNNLT

SEQ ID NO: 13980 - protein, 1123 aa, Hermetia illucens
MPSTTRDGRPRRRMVWTNQLNEFIVRAYYRVTDLERNPSGYRHRLHDAFITRFPELSHVPEQNVVNQYRVIVNNNRVALPTRQQIFQEVSLELGLESSNYRTSQRSNTSTPPVRHSMNPVVRRSLVTGDVDPIYNEALTAFQVAFTEYAEILPDARPRIPKLKFTSATTNIIAAVDRILADRLASEITATEVHSLIYVAAATVIRLHNQHLRANNRGMRRRTLPFWVFRLNKRVEKLRKEIGRVTQALLGNPSPRVHRCVANIIGNYHLSNDMPIEEILEVLKQKLAVCSNRIRRYQKSFQRRTDNTLFFQNQRGFYKNLINSGRDSNLNLDQAEDFWRSVWSESSRCNLEAAWLPHLMRSCEALPEMTMPDVTEVDVKAVLDKAGNWKAPGVDKIHNFWLKRFKSTHRILANQFNQMIADPDLVPPFFTKGITFLIPKEQGVSCPSKCRPITCLPTIYKVFTSVLCANISKHLDVHKLIAEEQKGCAKGSRGCKEQLIIDTVAVKQAVHQKRNISTAYIDYKSAFDSISHSWLLQVLRLYKINPNVVLLLRTVMKNWSTKLSVSSQTSGEIPIRRGIFQGDSLSPLWFCLALNPLSHLLHESKYGFQVKHGILSKCTLSHLMYIDDIKLYAKDENQLRSLLDITIQFSRDIGMQLGLEKCRIKTIVRGKHTDNEGYSQNNIRIEGMDSDDVYKYLGILQATTPAVAIIKSKLLGEFERRLDLVLKTELYGKNKIMAINTFAIPVLLYTFGVIQWSNTDLESVNRRVRVVLANNNMHNRAAEKLRITIPRHQGGRGVLDLKTMHYNQVHSLREFFYEKQSSSQIHQATVMADNKLSPLNLRSREWDPMSNVTSVQQKIDMWKEKPIHGGHIKNLLLSGIDIEASNKWLTNGVLFYETEAFLTSIQDASLPTKNYKRYILHDSSITNSSCRLCNCEEETIQHITSACRMLSGTEYTNRHNSVCKILHQNLALKYNLVATYHPYYKYTPQRILENDRVKLLWDHTIATDHSVNHNRPDLVLLLKEERACFIIDVAVPLDRNTVEKQHEKIRNYGPLADDMKQTWRLQKIQVVPVIISATGLVPQNLHKALKTLDLRAGLYMEMQKAVILATCAIVRRVLSGNNLT

SEQ ID NO: 13981 - protein, 1123 aa, Hermetia illucens
MPSTTRDGRPRRRMVWTSQLNEFIVRAYYRVTDLERNPSGYRHRLHDAFITRFPELSHVPEQNVVNQYRVIVNNNRVALPTRQQIFQEVSLELGLESSNYRTSQRSNTSTPSVRHSMNPVVRRSLVTGDVDPIYNEALTAFQVAFTEYAEILPDARPRIPKLKFTSATTNIIAAVDRILADRLASEITATEVHSLIYVAAATAIRLHNQHLSANNRGMRRRTLPFWVFRLNKRVEKLRKEIGRVTQALLGNPSPRVHRCVANIIGNYHLSNDMPIEEILEVLKQKLAVCSNRIRRYQKSFQRRTDNTLFFQNQRGFYKNLINSGRESNLNLDQAEDFWRSVWSESSRCNLEAAWLPHLMRSCEALPEMTMPDVTEVDVKAALDKAGNWKAPGVDKIHNFWLKRFKSTHRILANQFKQMIADPDLVPPFFTKGITFLIPKEQGVSCPSKCRPITCLPTIYKVFTSVLCANISKHLDVHKLIAEEQKGCAKGSRGCKEQLIIDTVAVKQAVHQKRNISTAYIDYKSAFDSISHSWLLQVLRLYKINPNVVLLLRTVMKNWSTKLSVSSQTSGEIPIRRGIFQGDSLSPLWFCLALNPLSHLLHESKYGFQVKHGILSKCTLSHLMYIDDIKLYAKDENQLRSLLDITIQFSRDIGMQLGLEKCRIKTIVRGKHTDNEGYSQNNIRIEGMDSDDVYKYLGILQATTPAVAIIKSKLLGEFERRLDLVLKTELYGKNKIMAINTFAIPVLLYTFGVIQWSNTDLESVNRRVRVVLANNNMHNRAAEKLRITIPRHQGGRGVLDLKTLHYNQVHSLREFFYEKQSSSQIHQATVMADNKLSPLNLRSREWDPMSNVTSVQQKIDMWKEKPIHGGHIKNLLLSGIDIEASNKWLTNGVLFYETEAFLTSIQDASLPTKNYKRYILHDSSITNSSCRLCNCEEETIQHITSACRMLSGTEYTNRHNSVCKILHQNLALKYNLVATYHPYYKYTPQRILENDRVKLLWDHTIATDHSVNHNRPDLVLLLKEERACFIIDVAVPLDRNTVEKQHEKIRNYGPLADDMKQTWRLQKIQVVPVIISATGLVPQNLHKALKTLDLRAGLYMEMQKAVILATCAIVRRVLSGNNLT

SEQ ID NO: 13982 - protein, 1123 aa, Hermetia illucens
MPSTTRDGRPRRRMVWTNQLNEFIVRAYYRVTDLERNPSGYRHRLHDAFITRFPELSHVPEQNVVNQYRVIVNNNRVALPTRQQIFQEVSLELGLESSNYRTSQRSNTSTPPVRHSMNPVVRRSLVTGDVDPIYNEALTAFQVAFTEYAEILPDARPRIPKLKFTSATTNIIAAVDRILADRLASEITATEVHSLIYVAAATVIRLHSQHLRANNRGMRRRTLPFWVFRLNKRVEKLRKEIGRVTQALLGNPSPRVHRCVVNIIGNYHLSNDMPIEEILEVLKQKLPVCSNRIRRYQKSFQRRTDNTLFFQNQRGFYKNLINSGRDSNLNLDQAEDFWRSVWSESSRCNLEAAWLPHLMRSCEALPEMTMPDVTEVDVKAALDKAGNWKAPGVDKIHNFWLKRFKSTHRILANQFNQMIADPDLVPPFFTKGITFLIPKEQGVSCPSKCRPITCLPTIYKVFTSVLCANISKHLDVHKLIAEEQKGCAKGSRGCKEQLIIDTVAVKQAVHQKRNISTAYIDYKSAFDSISHSWLLQVLRLYKINPNVVLLLRTVIKNWSTKLSVSSQTSGEIPIRRGIFQGDSLSPLWFCLALNPLSHLLHESKYGFQVKHGILSKCTLSHLMYIDDIKLYAKDENQLRSLLDITIQFSRDIGMQLGLEKCRIKTIVRGKHTDNEGYSQNNIRIEGMDSDDVYKYLGILQATTPAVVIIKSKLLGEFERRLDLVLKTELYGKNKIMAINTFAIPVLLYTFGVIQWSNTDLEAVNRRVRVVLANNNMHNRAAEKLRITIPRHQGGRGVLDLKTMHYNQVHSLRGFFYKKQSSSQIHQATVMADNKLSPLNLRSREWDPMSNVTSVQQKIDMWKEKPIHGGHIKNLLLSGIDIEASNKWLTNGVLFYETEAFLTSIQDASLPTKNYKRYILHDSSITNSSCRLCNCEEETIQHITSACRMLSGTEYTNRHNSVCKILHQNLALKYNLVATYHPYYKYTPQRILENDRVKLLWDHTIATDHSVNHNRPDLVLLLKEERACFIIDVAVPLDRNTVEKQHEKIRNYGPLADDMKQTWRLQKIQVVPVIISATGLVPQNLHKALKTLDLRAGLYMEMQKAVILATCAIVRRVLSGNNLT

SEQ ID NO: 13983 - protein, 1123 aa, Hermetia illucens
MPSTTRDGRPRRRMVWTNQLNEFIVRAYYRVTDLERNPSGYRHRLHDAFITRFPELSHVPEQNVVNQYRVIVNNNRVALPTRQQIFQEVSLELGLESSNYRTSQRSNTSTPPVRHSMNPVVRRSLVTGDVDPIYNEALTAFQVAFTEYAEILPDARPRIPKLKFTSATTNIIAAVDRILADRLASEITATEVHSLIYVAAATVIRLHNQHLRANNRGMRRRTLPFWVFRLNKRVEKLRKEIGRVTQALLGNPSPRVHRCVANIIGNYHLSNDMPIEEILEVLKQKLAVCSNRIRRYQKSFQRRTDNTLFFQNQRGFYKNLINSGRESNLNLDQAEDFWRSVWSESSRCNLEAAWLPHLMRSCEALPEMTMPDVTEVDVKAVLDKAGNWKAPGVDKIHNFWLKRFKSTHRILANQFNQMIADPDLVPPFFTKGITFLIPKEQGVSCPSKCRPITCLPTIYKVFTSVLCANISKHLDVHKLIAEEQKGCAKGSRGCKEQLIIDTVAVKQAVHQKRNISTAYIDYKSAFDSISHSWLLQVLRLYKINPNVVLLLRTVMKNWSTKLSVSSQTSGEIPIRRGIFQGDSLSPLWFCLALNPLSHLLHESKYGFQVKHGILSKCTLSHLMYIDDIKLYAKDENQLRSLLDITIQFSRDIGMQLGLEKCRIKTIVRGKHTDNEGYSQNNIRIEGMDSDDVYKYLGILQATTPAVAIIKSKLLGEFERRLDLVLKTELYGKNKIMAINTFAIPVLLYTFGVVQWSNTDLESVNRRVRVVLANNNTHNRAAEKLRITIPRHQGGRGVLDLKTLHYNQVHSLREFFYEKQSFSQIHQATVMADNKLSPLNLRSREWDPMSNVTSVQQKIDMWKEKPIHGGHIKNLLLSGIDIEASNKWLTNGVLFYETEAFLTSIQDASLPTKNYKRYILHDSSITNSSCRLCNCEEETIQHITSACRMLSGTEYTNRHNSVCKILHQNLALKYNLVATYHPYYKYTPQRILENDRVKLLWDHTIATDHSVNHNRPDLVLLLKEERACFIIDVAVPLDRNTVEKQHEKIRNYGPLADDMKQTWRLQKIQVVPVIISATGLVPQNLHKALKTLDLRAGLYMEMQKAVILATCAIVRRVLSGNNLT

SEQ ID NO: 13984 - protein, 1123 aa, Hermetia illucens
MPSTTRDGRPRRRMVWTNQLNEFIVRAYYRVTDLERNPSGYRHRLHDAFITRFPELSHVPEQNVVNQYRVIVNNNRVALPTRQQIFQEVSLELGLESSNYRTSQRSNTSTPPVRHSMNPVVRRSLVTGDVDPIYNEALTAFQVAFTEYAEILPDARPGIPKLKFTSATTNIIAAVDRILADRLASEITATEVHSLIYVAAATVIRLHNQHLRANNRGMRRRTLPFWVFRLNKRVEKLRKEIGRVTQALLGNPSPRVHRCVANIIGNYHLSNDMPIEEILEVLKQKLAVCSNRIRRYQKSFQRRTDNTLFFQNQRGFYKNLINSGRESNLNLDQAEDFWRSVWSESSRCNLEAAWLPHLMRSCEALPEMTMPDVTEVDVKAVLDKAGNWKASGVDKIHNFWLKRFKSTHRILANQFNQMIADPDLVPPFFTKGITFLIPKEQGVSCPSKCRPITCLPTIYKVFTSVLCANISKHLDVHKLIAEEQKGCAKGSRGCKEQLIIDTVAVKQAVHQKRNISTAYIDYKSAFDSISHSWLLQVLRLYKINPNVVLLLRTVMKNWSTKLSVSSQTSGEIPIRRGIFQGDSLSPLWFCLALNPLSHLLHESKYGFQVKHGILSKCTLSHLMYIDDIKLYAKDENQLRSLLDITIQFSRDIGMQLGLEKCRIKTIVRGKHTDNEGYSQNNIRIEGMDSDDVYKYLGILQATTPAVAIMKSKLLGEFERRLDLVLKTELYGKNKIMAINTFAIPVLLYTFGVIQWSNTDLESVNRRVRVVLANNNMHNRAAEKLRITIPRHQGGRGVLDLKTLHYNQVHSLREFFYEKQSSSQIHQATVMADNKLSPLNLRSREWDPMSNVTSVQQKIDMWKEKPIHGGHIKNLLLSGIDIEASNKWLTNGVLFYETEAFLTSIQDASLPTKNYKRYILHDSSITNSSCRLCNCEEETIQHITSACRMLSGTEYTNRHNSVCKILHQNLALKYNLVATYHPYYKYTPQRILENDRVKLLWDHTIATDHSVNHNRPDLVLLLKEERACFIIDVAVPLDRNTVEKQHEKIRNYGPLADDMKQTWRLQKIQVVPVIISATGLVPQNLHKALKTLDLRAGLYMEMQKAVILATCAIVRRVLSGNNLT

SEQ ID NO: 13985 - protein, 1007 aa, Hermetia illucens
MNPVVRRSLVTGDVDPIYNEALTAFQVAFTEYAEILPDARPRIPKLKFTSATTNIIAAVDRILADRLASEITATEVHSLIYVAAATVIRLHNQHLRANNRGMRRRTLPFWVFRLNKRVEKLRKEIGRVTQALLGNPSPRVHRCVANIIGNYHLSNDMPIEEILEVLKQKLAVCSNRIRRYQKSFQRRTDNTLFFQNQRGFYKNLINSGRESNLNLDQAEDFWRSVWSESSRCNLEAAWLPHLMRSCEALPEMTMPDVTEVDVKAVLDKAGNWKAPGVDKVHNFWLKRFKSTHRILANQFNQMIADPDLVPPFFTKGITFLIPKEQGVSCPSKCRPITCLPTIYKVFTSVLCANISKHLDVHKLIAEEQKGCAKGSRGCKEQLIIDTVAVKQAVHQKRNISTAYIDYKSAFDSISHSWLLQVLRLYKINPNVVLLLRTVMKNWSTKLSVSSQTSGEIPIRRGIFQGDSLSPLWFCLALNPLSHLLHESKYGFQVKHGILSKCTLSHLMYIDDIKLYAKDENQLRSLLDITIQFSRDIGMQLGLEKCRIKTIVRGKHTDNEGYSHNNIRIEGMDSDDVYKYLGILQTTTPAVAIIKSKLLGEFERRLDLVLKTELYGKNKIMAINTFAIPVLLYTFGVIQWSNTDLESVNRRVRVVLANNNMHNRAAEKLRITIPRHQGGRGVLDLKTLHYNQVHSLREFFYEKQSSSQIHQATVMADNKLSPLNLRSREWDPMSNVTSVQQKIDMWKEKPIHGGHIKNLLLSGIDIEASNKWLTNGVLFYETEAFLTSIQDASLPTKNYKRYILHDSSITNSSCRLCNCEEETIQHITSACRMLSGTEYTNRHNSVCKILHQNLALKYNLVATYHPYYKYTPQRILENDRVKLLWDHTIATDHSVNHNRPDLVLLLKEERACFIIDVAVPLDRNTVEKQHEKIRNYGPLADDMKQTWRLQKIQVVPVIISATGLVPQNLHKALKTLDLRAGLYMEMQKAVILATCAIVRRVLSGNNLT

SEQ ID NO: 13986 - protein, 1123 aa, Hermetia illucens
MPSTTRDGRPRRRMVWTNQLNEFIVRAYYRVTDLERNPSGYRHRLHDAFITRFPELSHVPEQNVVNQYRVIVNNNRVALPTRQQIFQEVSLELGLESSNYRTSQRSNTSTPPVRHSMNPVVRRSLVTGDVDPIYNEALTAFQVAFTEYAEILPDARPRIPKLKFTSATTNIIAAVDRILADRLASEITATEVHSLIYVAAATVIRLHNQHLRANNRGMRRRTLPFWVFRLNKRVEKLRKEIGRVTQALLGNPSPRVHRCVANIIGNYHLSNDVPIEEILEVLKQKLAVCSNRIRRYQKSFQRRTDNTLFFQNQRGFYKNLINSGRESNLNLDQAEDFWRSVWSESSRCNLEAAWLPHLMRSCEALPEMTMPDVTEVDVKAVLDKAGNWKAPGVDKVHNFWLKRFKNTHRILANQFNQMIADPDLVPPFFTKGITFLIPKEQGVSCPSKCRPITCLPTIYKVFTSVLCANISKHLDVHKLIAEEQKGCAKGSRGCKEQLIIDTVAVKQAVHQKRNISTAYIDYKSAFDSISHSWLLQVLRLYKINPNVVLLLRTVMKNWSTKLSVSSQTSGEIPIRLGIFQGDSLSPLWFCLALNPLSHLLHESKYGFQVKHGILSKCTLSHLMYIDDIKLYAKDENQLRSLLDITIQFSRDIGMQLGLEKCRIKTIVRGKHTDNEGYSQNNIRIEGMDSDDVYKYLGILQATTPAVAIIKSKLLGEFERRLDLVLKTELYGKNKIMAINTFAIPVLLYTFGVIQWSNTDLESVNRRVRVVLANNNMHNRAAEKLRITIPRHQGGRAVLDLKTMHYNQVHSLREFFYKKQSSSQIHQATVMADNKLSPLNLRSREWDPMSNVTSVQQKIDMWKEKPIHGGHIKNLLMSGIDIEASNKWLTNGVLFYETEAFLTSIQDASLPTKNYKRYILHDSSITNSSCRLCNCEEETIQHITSACRMLSGTEYTNRHNSVCKILHQNLALKYNLAATYHPYYKYTPQRILENDRVKLLWDHTIATDRSVNHNRPDLVLLLKEERACFIIDVAVPLDRNTVEKQHEKIRNYGPLADDMKQTWRLQKIQVVPVIISATGLVPQNLHKALKTLDLRAGLYMEMQKAVILATCAIVRRVLSGNNLT

SEQ ID NO: 13987 - protein, 1007 aa, Hermetia illucens
MNPVVRRSLVTGDVDPIYNEALTAFQVAFTEYAEILPDARPRIPKLKFTSATTNIIAAVERILADRLASEITATEVHSLIYVAAATVIRLHNQHLRANNRGMRRRTLPFWVFRLNKRVEKLRKEIGRVTQALLGNPSPRVHRCVANIIGNYHLSNDMPIEEILEVLKQKLAVCSNRIRRYQKSFQRRTDNTLFFQNQRGFYKNLINSGRDSNLNLDQAEDFWRSVWSESSRCNLEAAWLPHLMRSCEALPEMTIPDVTEVDVKAVLDKAGNWKAPGVDKIHNFWLKRFKSTHRILANQFNQMIADPDLVPPFFTKGITFLIPKEQGVSCPSKCRPITCLPTIYKVFTSVLCANISKHLDVHKLIAEEQKGCAKGSRGCKEQLIIDTVAVKQAVHQKRNISTAYIDYKSAFDSISHSWLLQVLRLYKINPNVVLLLRTVMKNWSTKLSVSSQTSGEIQIRRGIFQGDSLSPLWFCLALNPLSHLLHESKYGFQVNHGILSKCTLSHLMYIDDIKLYAKDENQLRSLLDITIQFSRDIGMQLGLEKCRIKTIVRGKHTDNEGYSQNNIRIEGMDSDDVYKYLGILQATTPAVAIMKSKLLGEFERRLDLVLKTELYGKNKIMAINTFAISVLLYTFGVIQWSNTDLESVNRRVRVVLANNNMHNRAAEKLRITIPRHQGGRGVLDLKTLHYNQVHSLREFFYEKQSSSQIHQATVMADNKLSPLNLRSREWDPMSNVTSVQQKIDMWKEKPIHGGHIKNLLLSGIDIEASNKWLTNGVLFYETEAFLTSIQDASLPTKNYKRYILHDSSITNSSCRLCNCEEETIQHITSACRMLSGTEYTNRHNSVCKILHQNLALKYNLVATYHPYYKYTPQRILENDRVKLLWDHTIATDHSVNHNRPDLVLLLKEERACFIIDVAVPLDRNTVEKQHEKIRNYGPLADDMKQTWRLQKIQVVPVIISATGLVPQNLHKALKTLDLRAGLYMEMQKAVILATCAIVRRVRSGNNLT

SEQ ID NO: 13988 - protein, 1123 aa, Hermetia illucens
MPSTTRDGRPRRRMVWTSQLNEFIVRAYYRVTDLERNPSGYRHRLHDAFITRFPELSHVPEQNVVNQYRVIVNNNRVALPTRQQIFQEVSLELGLESSNYRTSQRSNTSTPPVRHSMNPVVRRSLVTGDVDPIYNEALTAFQVAFTEYAEILPDARPRIPKLKFTSATTNIIAAVDRILADRLASEITATEVHSLIYVAAATVIRLHNQHLRANNRGMRRRTLPFWVFRLNKRVEKLRKEIGRVTQALLGNPSPRVHRCVANIIGNYHLSNDMPIEEILEVLKQKLAVCSNRIRRYQKSFQRRTDNTLFFQNQRGFYKNLINSGRESNLNLDQAEDFWRSVWSESSRCNLEAAWLPHLMRSCEALPEMTMPDVTEVDVKAVLDKAGNWKAPGVDKIHNFWLKRFKSTHRILANQFNQMIADPDLVPPFFTKGITFLIPKEQGVSCPSKCRPITCLPTIYKVFTSVLCANISKHLDVHKLIAEEQKGCAKGSRGCKEQLIIDTVAVKQAVHQKRNISTAYIDYKSAFDSISHSWLLQVLRLYKINPNVVLLLRTVMKNWSTKLSVSSQTSGEIPIRRGIFQGDSLSPLWFCLALNPLSHLLHESKYGFQVKHGILSKCTLSHLMYIDDIKLYAKDENQLRSLLDITIQFSRDIGMQLGLEKCRIKTIVRGKHTDNEGYSQNNIRIEGMDSDDVYKYLGILQATTPAVAIMKSKLLGEFERRLDLVLKTELYGKNKIMAINTFAIPVLLYTFGVIQWSNTDLESVNRRVRVVLANNNMHNRAAEKLRITIPRHQGGRGVLDLKTMHYNQVHSLREFFYEKQSSSQIHQATVMADNKLSPLNLRSREWDPMSNVTSVQQKIDMWKEKPIHGGHIKNLLLSGIDIEASNKWLTNGVLFYETEAFLTSIQDASLPTKNYKRYILHDSSITNSSCRLCNCEEETIQHITSACRMLSGTEYTNRHNSVCKILHQNLALKYNLVATYHPYYKYTPQRILENDRVKLLWDHTIATDHSVNHNRPDLVLLLKEERACFIIDVAVPLDRNTVEKQHEKIRNYGPLADDMKQTWRLQKIQVVPVIISATGLVPQNLHKALKTLDLRAGLYMEMQKAVILATCAIVRRVLSGNNLT

SEQ ID NO: 13989 - protein, 1123 aa, Hermetia illucens
MPSTTRDGRPRRRMVWTNQLNEFIVRAYYRVTDLERNPSGYRHRLHDAFITRFPELSHVPEQNVVNQYRVIVNNNRVALPTRQQIFQEVSLELGLESSNYRTSQRSNTSTPPVRHSMNPVVRRSLVTGDVDPIYNEALTAFQVAFTEYAEILPDARPRIPKLKFTSATANIIAAVDRILADRLASEITATEVHSLIYVAAATVIRLHNQHLRANNRGMRRRTLPFWVFRLNKRVEKLRKEIGRVTQALLGNPSPRVHRCVANIIGNYHLSNDMPIEEILEVLKQKLAVCSNRIRRYQKSFQRRTDNTLFFQNQRGFYKNLINSGRESNLNLDQAEDFWRSVWSESSRCNLEAAWLPHLMRSCEALPEMTMPDVTEVDVKAVLDKAGNWKAPGVDKIHNFWLKRFKSTHRILANQFNQMIADPDLVPPFFTKGITFLIPKEQGVSCPSKCRPITCLPTIYKVFTSVLCANISKHLDVHKLIAEEQKGCAKGSRGCKEQLIIDTVAVKQAVHQKRNISTAYIDYKSAFDSISHSWLLQVLRLYKINPNVVLLLRTVMKNWSTKLSVSSQTLGEIPIRRGIFQGDSLSPLWFCLALNPLSHLLHESKYGFQVKHGILSKCTLSHLMYIDDIKLYAKDENQLRSLLDITIQFSRDIGMQLDLEKCRIKTIVRGKHTDNEGYSQNNIRIEGMDSDDVYKYLGILQATTPAVAIMKSKLLGEFERRLDLVLKTELYGKNKIMAINTFAIPVLLYTFGVIQWSNTDLESVNRRVRVVLANNNMHNRAAEKLRITIPRHQGGRGVLDLKTLHYNQVHSLREFFYEKQSSSQIHQATVMADNKLSPLNLRSREWDPMSNVTSVQQKIDMWKEKPIHGGHIKNLLLSGIDIEASNKWLTNGVLFYETEAFLTSIQDASLPTKNYKRYILHDSSITNSSCRLCNCEEETIQHITSACRMLSGTEYTNRHNSVCKILHQNLALKYNLVATYHPYYKYTPQRILENDRVKLLWDHTIATDHSVNHNRPDLVLLLKEERACFIIDVAVPLDRNTVEKQHEKIRNYGPLADDMKQTWRLQKIQVVPVIISATGLVPQNLHKALKTLDLRAGLYMEMQKAVILATCAIVRRVLSGNNLT

SEQ ID NO: 13990 - protein, 1123 aa, Hermetia illucens
MPSTTRDGRPRRRMVWTSQLNEFIVRAYYRVTDLERNPSGYRHRLHDAFITRFPELSHVPEQNVVNQYRVIVNNNRVALPTRQQIFQEVSLELGLESSNYRTSQRSNTSSPPVRHSMNPVVRRSLVTGDVDPIYNEALTAFQVAFTEYAEILPDARPRIPKLKFTSATTNIIAAVDRILADRLASEITATEVHSLIYVAAATVIRLHNQHLRANNRGMRRRTLPFWVFRLNKRVEKLRKEIGRVTQALLGNPSPRVHRCVANIIGNYHLSNDMPIEEILEVLKQKLAVCCNRIRRYQKSFQRRTDNTLFFQNQRGFYKNLINSGRESNLNLDQAEDFWRSVWSESSRCNLEAAWLPHLMRSCEALPEMTMPDVTEVDVKAVLDKAGNWKAPGVDKIHNFWLKRFKSTHRILANQFNQMIADPDLVPPFFTKGITFLIPKEQGVSCPSKCRPITCLPTIYKVFTSVLCANISKHLDVHKLIAEEQKGCAKGSRGCKEQLIIDTVAVKQAVHQKRNISTAYIDYKSAFDSISHSWLLQVLRLYKINPNVVLLLRTVMKNWSTKLSVSSQTSGEIPIRRGIFQGDSLSPLWFCLALNPLSHLLHESKYGFQVKHGILSKCTLSHLMYIDDIKLYAKDENQLRSLLDITIQFSRDIGMQLGLEKCRIKTIVRGKHTDNEGYSQNNIRIEGMDSDDVYKYLGILQATTPAVAIIKSKLLGEFERRLDLVLKTELYGKNKIMAINTFAIPVLLYTFGVIQWSNTDLESVNRRVRVVLANNNMHNRAAEKLRITIPRHQGGRGVLDLKTLHYNQVHSLREFFYEKQSSSQIHQATVMADNKLSPLNLRSREWDPMSNVTSVQQKIDMWKEKPIHGGHIKNLLLSGIDIEASNKWLTNGVLFYETEAFLTSIQDASLPTKNYKRYILHDSSITNSSCRLCNCEEETIQHITSACRMLSGTEYTNRHNSVCKILHQNLALKYNLVATYHPYYKYTPQRILENDRVKLLWDHTIASDHSVNHNRPDLVLLLKEERACFIIDVAVPLDRNTVEKQHEKIRNYGPLADDMKQTWRLQKIEVVPVIISATGLVPQNLHKALKTLDLRAGLYMEMQKAVILATCAIVRRVLSGNNLT

SEQ ID NO: 13991 - protein, 870 aa, Hermetia illucens
MRRRTLPFWVFRLNKRVEKLRKDIGRVTQALLGNPSPRVHRCVANIIGNYHLSNDMPIEEIPEVLKQKLAVCSNRIRRYQKSFQRRTDNTLFFQNQRGFYKNLTSSNRESNLNLDQAEDFWRSVWSESSRCNLEAAWLPHLMRSCEALPEMTMPDVTEVDVKAVLDKAGNWKAPGVDKIHNFWLKRFKSTHRILANQFNQMIADPDLVPPFFTKGITFLIPKEQGVSCPSKCRPITCLPTIYKVFTSVLCANISKHLDVHKLIAEEQKGCAKGSRGCKEQLIIDTAAVKQDVHQKRNISKAYIDYKSAFDSISHSWLLQVLRFYKINPNVVLLLRTVMKNWSTKLSVSSQTSGEIPIRRGIFQGDSLSPLWFCLALNPLSHLLHESKYGFQVKHGILSKCTLSHLMYIDDIKLYAKDENQLRSLLDITIQFSRDIGMQLGLEKCRIKTIVRGKHIDNEGYSQNNIRIEGMDSDDVYKYLGILQATTPAVAIIKSKLLGEFERRLDLVLKTELYGKNKIMAINTFAIPVLLYTFGVIQWSNTDLESVNRRVRVVLANNNMHNRAAEKLRITIPRHQGGRGVLDLKTLHYNQVHSLREFFYEKQSSSQIHQATVMADNKLSPLNLRSREWDPMSNVTSVQQKIDMWKENPIHGGHIKNLLLSGIDIEASNKWLTNGVLFYETEAFLTSIQDASLPTKNYKRYILHDSSITNSSCRLCNCEEETIQHITSACRMLSGTEYTNRHNSVCKILHQNPALKYNLVATYHPYYKYTPQRILENDRVKLLWDHTIATDHSVNHNRPDLVLLLKEERACFIIDVAVPLDRNTVEKQHEKIRNYGPLADDMKQTWRLQKIQVVPVIISATGLVPQTYIKR

SEQ ID NO: 13992 - protein, 1123 aa, Hermetia illucens
MPSTTRDGRPRRRMVWTNQLNEFIVRAYYRVTDLERNPSGYRHRLHDAFITRFPELSHVPEQNVVNQYRVIVNNNRVALPTRQQIFQEVSLELGLESSNYRTSQRSNTSTPPVRHSMNPVVRRSLVTGDVDPIYNEALTAFQVAFTEYAEILPDARPKIPKLKFTSATTNIIAAVDRILADRLASEITAAEVHSLIYVAAATVIRLHNQHLRANNRGMRRRTLPFWVFRLNKRVGKLRKEIGRVTQALLGNPSPRVHRCVANIIGNYHLSNDMPIEEILEVLKQKLAVCSNRIRRYQKSFQRRTDNTLFFQNQRGFYKNLINSGRESNLNLDQAEDFWRSVWSESSRCNLEAAWLPHLMRSCEALPEMTMPDVTEVDVKAVLDKAGNWKAPGVDKIHNFWLKRFKSTHRILANQFNHMIADPDLVPPFFTKGITFLIPKEQGVSCPSKCRPITCLPTIYKVFTSVLCANISKHLDVHKLIAEEQKGCAKGSRGCKEQLIIDTVAVKQAVHQKRNISTAYIDYKSAFDSISHSWLLQVLRLYKINPNVVLLLRTVMKNWSTKLSVSSQTSGEIPIRRGIFQGDSLSPLWFCLALNPLSHLLHESKYGFQVKHGILSKCTLSHLMYIDDIKLYAKDENQLRSLLDITIQFSRDIGMQLGLEKCRIKTIVRGKHTDNEGYSQNNIRIEGMDSDDVYKYIGILQATTPAVAIIKSKLLGEFERRLDLVLKTELYGKNKIMAINTFAIPVLLYTFGVIQWSNTDLESVNRRVRVVLANNNMHNRAAEKLRITIPRHQGGRGVLDLKTMHYNQVHSLREFFYEKQSSSQIHQATVMADNKLSPLNLRSREWDPMSNVTSVHQKIDMWKEKPIHGGHIKNLLLSGIDIEASNKWLTNGVLFYETEAFLTSIQDASLPTKNYKRYILHDSSITNSSCRLCNCEEETIQHITSACRMLSGTEYTNRHNSVCKILHQNLALKYNLVATYHPYYQYTPQRILENDRVKLLWDHTIATDHSVNHNRPDLVLLLKEERACFIIDVAVPLDRNTVEKQHEKIRNYGPLADDMKQTWRLQKIQVVPVIISATGLVPQNLHKALKTLDLRAGLYMEMQKAVILATCAIVRRVLSGNNLT

SEQ ID NO: 13993 - protein, 1123 aa, Hermetia illucens
MPSTTRDGRPRRRMVWTNQLNEFIVRAYYRVTDLERNPSGYRHRLHDAFITRFPELSHVPEQNVVNQYRVIVNNNRVALPTRQQIFQEVSLELGLESSNYRTSQRSNTSTPPVRHPMNPVVRRSLVTGDVDPIYNEALTAFQVAFTEYAEILPDARPRIPKLKFTSATTNIIAAVDRILADRLASEITATEVHSLIYVAAATVIRLHNQHLRANNRGMRRRTLPFWVFRLNKRVEKLRKEIGRVTQALLGNPSPKVHRCVANIIGNYHLSNDMPIEEILEVLKQKLAVCSNRIRRYQKSFQRRTDNTLFFQNQRGFYKNLINSGRESNLNLDQAEDFWRSVWSESSRCNLEAAWLPHLMRSCEALPEMTMPDVTEVDVKAVLDKAGNWKAPGVDKIHNFWLKRFKSTHRILANQFNQMIADPDLVPPFFTKGITFLIPKEQGVSCPSKCRPITCLPTIYKVFTSVLCANISKHLDVHKLIAEEQKGCAKGSRGCKEQLIIDTVAVKQAVHQKRNISTAYIDYKSAFDSISHSWLLQVLRLYKINPNVVLLLRTVMKNWSTKLSVSSQTSGEIPIRRGIFQGDSLSPLWFCLALNPLSHLLHESKYGFQVKHGILSKCTLSHLMYIDDIKLYAKDENQLRSLLDITIQFSRDIGMQLGLEKCRIKTIVRGKHTDNEGYSQNNIRIEGMDSDDVYKYLGILQATTPAVAIIKSKLLGEFERRLDLVLKTELYGKNKIMAINIFAIPVLLYTFGVIQWSNTDLESVNRRVRVVLANNNMHNRAAEKLRITIPRHQGGRGVLDLKTLHYNQVHSLREFFYEKQSSSQIHQATVMADNKLSPLNLRSREWDPMSNVTSVQQKIDMWKEKPIHGGHIKNLLLSGIDIEASNKWLTNGVLFYETEAFLTSIQDASLPTKNYKRYILHDSSITNSSCRLCNCEEETIQHITSACRMLSGTEYTNRHNSVCKILHQNLALKYNLVATYHPYYKYTPQRILENDRVKLLWDHTIATDHSVNHNRPDLVLLLKEERACFIIDVAVPLDRNTVEKQHEKIRNYGPLADDMKQTWRLQKIQVVPVIISATGLVPQNLHKALKTLDLRAGLYIEMQKAVILATCAIVRRVLSGNNLT

SEQ ID NO: 13994 - protein, 906 aa, Hermetia illucens
MRRRTLPFWVFRLNKRVEKLRKEIGRVTQALLGNPSPRVHRCVANIIGNYHLSNDMPIEEILEVLKQKLAVCSNRIRRYQKSFQRRTDNTLFFQNQRGFYKNLINSGRDSNLNLDQAEDFWRSVWSESSRCNLEAAWLPHLMRSCEALPEMTMPDVTEVDVKAVLDKAGNWKAPGVDKIHNFWLKRFKSTHRILANQFNQMIADPDLVPPFFTKGITFLIPKEQGVSCPSKCRPITCLPTIYKVFTSVLCANISKHLDVHKLIAEEQKGCAKGSRGCKEQLIIDTVAVKQAVHQKRNISTAYIDYKSAFDSISHSWLLQVLRLYKINPNVVLLLRTVMKNWSTKLSVSSQTSGEIPIRRGIFQGDSLSPLWFCLALNPLSHLLHESKYGFQVKHGILSKCTLSHLMYIDDIKLYAKDENQLRSLLDITIQFSRDIGMQLGLEKCRIKTIVRGKHTDNEGYSQNNIRIEGMDSDDVYKYLGILQATTPAVAIIKSKLLGEFERRLDLVLKTELYGKNKIMAINTFAIPVLLYTFGVIQWSNTDLESVNRRVRVVLANNSMHNRAAEKLRITIPRHQGGRGVLDLKTLHYNQVHSLREFFYEKQSSSQIHQATVMADNKLSPLNLRSREWDPMSNVTSVQQKIDMWKEKPIHGGHIKNLLLSGIDIEASNKWLTNGVLFYETEAFLTSIQDASLPTKNYKRYILHDSSITNSSCRLCNCEEETIQHITSACRMLSGTEYTNRHNSVCKILHQNLALKYNLVATYHPYYKYTPQRILENDRVKLLWDHTIATDHSVNHNRPDLVLLLKEERACFIIDVAVPLDRNTVEKQHEKIRNYGPLADDMKQTWRLQKIQVVPVIISATGLVPQNLHKALKTLDLRAGLYMEMQKAVILATCAIVRRVLSGNNLT

SEQ ID NO: 13995 - protein, 1123 aa, Hermetia illucens
MPSTTRDGRPRRRMVWTNQLNEFIVRAYYRVTDLERNPSGYRHRLHDAFITRFPELSHVPEQNVVNQYQVIVNNNRVALPTRQQIFQEVSLELGLESSNYRTSQRSNTSTPPVRHSMNPVVRRSLVTGDVDPIYNEALTAFQVAFTEYAEILPDAGPRIPKLKFTSATTNIIAAVDRILVDRLASEITATEVHSLIYVAAATVIRLHNQHLSANNRGMRRGTLPFWVFRPNKRVEKLRKEIGRVTQALLGNPSPRVHRCVANIIGNYHLSNDMPIEEILQVLKQKRAVCSNRIRRYQKSFQRRTDNTLFFQNQRGFYKNLINSGRESNLNLDQAEDFWRSVWSESSRCNLEAAWLPHLMRSCEALPEMTMSDVTEVDVKAVLDKAGNWKAPGVDKIHNFWLKRFKSTHRILANQFNQMIADPDLVPPFFTKGITFLIPKEQGVSCPSKCRPITCLPTIYKVFTSVLCANISKHLDVHKLIAEEQKGCAKGSRGCKEQLIIDTVAVKQAVHQKRNISTTYIDYKSAFDSISHSWLLQVLRLYKINPNVVLLLRTVMKNWSTKLSVSLQTSGEIPIRRGIFQGDSLSPLWFCLALNPLSHLLHESKYGFQVKHGILSKCTLSHLMYIDDIKLYAKDENQLRSLLDITIQFSRDIGMQLGLEKCRIKTIVRGKHTDNEGYSQNNIRIEGMDSDDVYKYLGILQATTPAVAIIKSKLLGEFERRLDLILKTELYGKNKIMAINTFAIPVLLYTFGVIQWSNTDLESVNRRVRVVLANNNMHNRAAEKLRITIPRHQGGRGVLDLKTMHYNQVHSLREFFYEKQSSSQIHQATVMADNKLSPLNLRSREWDPMSNVTSVQQKIDMWKEKPIHGGHIKNLLLSGIEIEASNKWLTNGVLFYETEAFLTSIQDASLPTKNYKRYILHDSSITNSSCRLCNCEEETIQHITSACRMLSGTEYTNRHNSVCKILHQNLALKYNLVATYHPYYKYTPQRILENDRVKLLWDHTIATDHSVNHNRPDLVLLLKEERACFIIDVAVPLDRNTVEKQHEKIRNYGPLADDMKQTWRLQKIQVVPVIISATGLVPENLHKALKTLDLRAGLYMEMQKAVILATCAIVRRVLSGNNLT

SEQ ID NO: 13996 - protein, 1123 aa, Hermetia illucens
MPSTTRDGRPRRRMVWTNQLNEFIVRAYYRVTDLERNPSGYRHRLHDAFITRFPELSHVPEQNVVNQYRVIVNNNRVALPTRQQIFQEVSLELGLESSNYRTSQRSNTSTPPVRHSMNPVVRRSLVTGDVDPIYNEALTAFQVAFTEYAEILPDARPRIPKLKFTSATTNIIAAVDRILADRLASEITATEVHSLIYVAAATVIRLHNQHLRANNRGMRRRTLPFWVFRLNKRVEKLRKEIGRVTQALLGNPSPRVHRCVANIIGNYHLSNDMPIEEILEVLKQKLAVCSNRIRRYQKSFQRRTDNTLFFQNQRGFYKNLINSGRESNLNLDQAEDFWRSVWSESSRCNLEAAWLPHLMRSCEALPEMTMPDITEVDVKAVLDKAGNWKAPGVDKIHNFWLKRFKSTHRILANQFNQMIADPDLVPPFFTKGITFLIPKEQGASCPSKCRPITCLPTIYKVFTSVLCVNISKHLDVHKLIAEEQKGCAKGSRGCKEQLIIDTVAVKQAVHQKRNISTAYIDYKSAFDSISHSWLLQVLRLHKINPNVVLLLRTVMKNWSTKLSVSSQTSGEIPIRRGIFQGDSLSPLWFCLALNPLSHLLHESKYGFQGKHCILSKCTLSHLMYIDDIKLYAKDENQLRSLLDIIIQFSRDIGMQLGLEKCRIKTIVRGKHTDNEGYSQNNIRIEGMDSDDVYKYFGILQATTPAVAIIKSKLLGEFERRLDLVLKTELYGKNKIMAINTFAIPVLLYTFGVIQWSNTDLESVNRRVRVVLANNNMHNRAAEKLRITIPRHQGGRGVLDLKTMHYNQVHSLREFLYEKQSSSQIHQATVMADNKLSPLNLRSREWDPMSNITSVQQKIDMWKEKPIHGGHIKNLLLSGIDIEASNKWLTNGVLFYETEAFLTSIQDASLPTKNYKRYILHDSSITNSSCRLCNCEEETIQHITSACRMLSGTEYTNRHNSVCKILHQNLAMKYNLVATYHPYYKYTPQRILENDRVKLLWDHTIATDHSVNHNRPDLVLLLKEERACFIIDVAVPLDRNTVEKQHEKIRNYGPLADDMKQTWRLQKIQVVPVIISATGLVPQNLHKALKTLDLRAGLYMEMQKAVILATCAIVRRVLSGNNLT

SEQ ID NO: 13997 - protein, 1119 aa, Hermetia illucens
MPSTTRDGRPRRRMVWTNQLNEFIVRAYYRVTDLERNPSGYRHRLHDAFITRFPELSHVPEQNVVNQYRVIVNNNQVALPTRQQIFQEVSLELGLESSNYRISQRSNTSTPPVRHSMNPVVRRSLVTGDVDPIYHEALTAFQVAFTEYAEILPDARPKIPKLKFTSATTNIIAAVDRILADRLASEITATEVHSLIYVAAATVIRLHNQHLRANNRGMRRRTLPFWVFRLNKRVEKLKKEIGRVTQALLGNPSPRVHRCVANYHLSNDMPIEEILEELKQKLAVCSNRIRRYQKSFQRRTDNTLFFQNQRGFYKNLTSSDRESNLDLDQAEDFWRSVWSESSRCNLEAAWLPHLMRSCEALPEMTMPDVTEVDVEAALDKAGNWKAPGVDKIHNFWLKRFKSTHMILANQFNQMIADPDLVPPFFTKGITFLIPKEQGVSCPSKCRPITCLPTIYKVFTSVLCANISKHLDVHKLIAEEQKGCAKGSRGCKEQLVIDTVAVKQAVNQKRNISTAYIDYKSAFDSISHSWLLQVLRLYKINPNVVLLLRTVMKNWSTKLSVSSQTSGEIPIRRGIFQGDSLSPLWFCLALNPLSHHLHESKYGFQVKHGILSKCTLSHLMYIDDIKLYAKDENQLRSLLDITIQFSRDIGMQLGLEKCRIKTIVRGKHTDNEGYSQNNIRNEGMDSDDVYKYLGILQATTPAVAIIKSKFLGEFERRLDLVLKTELYGKNKIMAINTFAIPVLLYTFGVIQWSNTDLESVNRRVRVVLANNNMHNRAAEKLRITIPRHQGGRGVLDLKTLHYNQVQSLREFFYEKQSSSQIHQATVMADNKLSPLNLRSREWDPMSNVTSVQQNIDMWKEKPIHGGHIKNLLLSGIDIEASNKWLTNGVLFYETEAFLTSIQDASLPTKNYKRYILHDSSITNSSCRLCNCEEETIQHITSACRMLSGTEYTNRHNSVCKILHQNLALKYNLVATYHPYYKYTPQRILENDRVKLLWDHTIATDHSVNHNRPDLVLLLKEERACFIIDVAVPLDRNTVEKQHEKIRNYGPLADDMKQTWRLQKIQVVPVIISATGLVPQNLHKALKTLDLRAGLYMEMQKAVILATCAIVRRVLSGNNLT

SEQ ID NO: 13998 - protein, 1123 aa, Hermetia illucens
MPSTTRDGRPRRRMVWTNQLNEFIVRAYYRVTDLERNPSGYRHRLHDAFITRFPELSHVPEQNVVNQYRVIVNNNRVALPTRQQIFQEVSLELGLESSNYRTSQRSNTSTPPVRHSMNPVVRRSLVTGDVDPIYNEALTAFQVAFTEYAEILPDARPRIPKLKFTSATTNIIAAVDRILADRLASEITATEVHSLIYVAAATVIRLHNQHLRANNRGMRRRTLPFWVFRLNKRVEKLRKEIGRVTQALLGNPSPRVHRCVANIIGNYHLSNDMPIEEILEVLKQKLAVCSNRIRRYQKSFQRRTDNTLFFQNQRGFYKNLINSGRESNLNLDQAEDFWRSVWSESSRCNLEAAWLPHLMRSCEALPEMTMPDVTEVDVKAVLDKAGNWKAPGVDKIHNFWLKRFKSTHRILANQFNQMIADPDLVPPFFTKGITFLIPKEQGVSCPSKCRPITCLPTIYKVFTSVLCANISKHLDVHKLIAEEQKGCAKGSRGCKEQLIIDTVAVKQAVHQKRNISTAYIDYKSAFDSISHSWLLQVLRLYKINPNVVLLLRTVMKNWSTKLSVSSQTSGEIPIRRGIFQGDSLSPLWFCLALNPLSHLLHESKYGFQVKHGILSKCTLSHLMYIDDIKLYAKDENQLRSLLDITIQFSRDIGMQLGLEKCRIKTIVRGKHTDNEGYSQNNIRIEGMDSDDVYKYLGILQATTPAVAIMKSKLLGEFERRLDLVLKTELYGKNKIMAINTFAIPVLLYTFGVIQWSNTDLESVNRRVRVVLANNNMHNRAAEKLRITIPRHQGGRGVLDLKTLHYNQVHSLREFFYEKQSSSQIHQATVMADNKLSPLNLRSREWDPMSNVTSVQQKIDMWKEKPIHGGHIKNLLLSGIDIEASNKWLTNGVLFYETEAFLTSIQDASLPTKNYKRYILHDSSITNSSCRLCNCEEETIQHITSACRMLSGTEYTNRHNSVCKILHQNLALKYNLVATYHPYYKYTPQRILENDRVKLLWDHTIATDHSVNHNRPDLVLLLKEERACFIIDVAVPLDRNTVEKQHEKIRNYGPLADDMKQTWRLQKIQVVPVIISATGLVPQNLHKALKTLDLRAGLYMEMQKAVILATCAIVRRVLSGNNLT

SEQ ID NO: 13999 - protein, 1123 aa, Hermetia illucens
MPSTTRDGRPRRRMVWTSQLNEFIVRAYYRVTDLERNPSGYRHRLHDAFITRFPELSHVPEQNVVNQYRVIVNNNRVALPTRQQIFQEVSLELGLESSNYRTSQRSNTSTPSVRHSMNPVVRRSLVTGDVDPIYNEALTAFQVAFTEYAEILPDARPRIPKLKFTSATTNILAAVDRILADRLASEITATEVHSLIYVAAATVIRLHNQHLSANNRGMRRRTLPFWVFRLNKRVEKLRKEIGRVTQALLGNPSPRVHRCVANIIGNYHLSNDMPIEEILEVLKQKLAVCCNRIRRYQKSFQRRTDNTLFFQNQRGFYKNLINSGRESNLNLDQAEDFWRSVWSESSRCNLEAAWLPHLMRSCEALPEMTMPDVTEVDVKAVLDKAGNWKAPGVDKIHNFWLKRFKSTHRILANQFNQMIADPDLVPPFFTKGITFLIPKEQGVSCPSKCRPITCLPTIYKVFTSVLCANISKHLDVHKLIAEEQKGCAKGSRGCKEQLIIDTVAVKQAVHQKRNISTAYIDYKSAFDSISHSWLLQVLRLYKINPNVVLLLRTVMKNWSTKLSVSSQTSGEIPIRRGIFQGDSLSPLWFCLALNPLSHLLHESKYGFQVRHGILSKCTLSHLMYIDDIKLYAKDENQLRSLLDITIQFSRDIGMQLGLEKCRIKTIVRGKHTDNEGYSQNNIRIEGMDSDDVYKYLGILQATTPAVAIIKSKLLGEFERRLDLVLKTELYGKNKIMAINTFAIPVLLYTFGVIQWSNTDLEAVNRRVRVVLANNNMHNRAAEKLRITIPRHQGGRGVLDLKTLHYNQVHSLREFFYEKQSSSQIHQATVMADNKLSPLNLRSREWDPMSNVTSVQQKIDMWKEKPIHGGHIKNLLLSGIDIEASNKWLTNGVLFYETEAFLTSIQDASLPTKNYKRYILHDSSITNSSCRLCNCEEETIQHITSACRMLSGTEYTNRHNSVCKILHQNLAMKYNLVATYHPYYKYTPQRILENDRVKLLWDHTIATDHSVNHNRPDLVLLLKEERACFIIDVAVPLDRNTVEKQHEKIRNYGPLADDMKQTWRLQKIQVVPVIISATGLVPQNLHKALKTLDLRAGLYMEMQKAVILATCAIIRRVLSGNNLT

SEQ ID NO: 14000 - protein, 1123 aa, Hermetia illucens
MPSTTRDGRPRRRMVWTNQLNEFIVRAYYRVTDLERNPSGYRHRLHDAFITRFPELSHVPEQNVVNQYRVIVNNNRVALPTRQQIFQEVSLELGLESSNYRTSQRSNTSTPPVRHSMNPVVRRSLVTGDVDPIYNEALTAFQVAFTEYAEILPDARPRIPKLKFTSATTNIIAAVDRILADRLASEITATEVHSLIYVAAATVIRLHNQHLRANNRGMRRGPLPFWVFRLNKRVEKLRKEIGRVTQALLGNPSPRVHRCVANIIGNYHLSNDMPIEEILEVLKQKLAVCSNRIRRYQKSFQRRTDNTLFFQNQRGFYKNLINSGRESNLNLDQAEDFWRSVWSESSRCNLEAAWLPHLMRSCEALPEMTMPDVTEVDVKAVLDKAGNWKAPGVDKVHNFWLKRFKSTHRILANQFNQMIADPDLVPPFFTKGITFLIPKEQGVSCPSKCRPITCLPTIYKVFTSVLCANISKHLDVHKLIAEEQKGCAKGSRGCKEQLIIDTVAVKQAVHQKRNISTAYIDYKSAFDSISHSWLLQVLRLYKINPNVVLLLRTVMKNWSTKLSVSSQTSGEIPIRRGIFQGDSLSPLWFCLALNPLSHLLHESKYGFQVKHGILSKCTLSHLMYIDDIKLYAKDENQLRSLLDITIQFSRDIGMQLGLEKCRIKTIVRGKHTDNEGYSQNNIRIEGMDSDDVYKYLGILQATTPAVAIIKSKLLGEFERRLDLVLKTELYGKNKIMAINTFAIPVLLYTFGVIQWSNTDLESVNRRVRVVLANNNMHNRAAEKLRITIPRHQGGRGVLDLKSMHYNQVHSLREFFYEKQSSSQIHQATVMADNKLSPLNLRSREWDPMSNVTSVQQKIDMWKEKPIHGGHIKNLLLSGIDIEASNKWLTNGVLFYETEAFLTSIQDASLPTKNYKRYILHDSSITNSSCRLCNCEEETIQHITSACRMLSGTEYTNRHNSVCKILHQNLALKYNLVATYHPYYKYTPQRILENDRVKLLWDHTIATDHSVNHNRPDLVLLLKEERACFIIDVAVPLDRNTVEKQHEKIRNYGPLADDMKQTWRLQKIQVVPVIISATGLVPQNLHKALKTLDLRAGLYMEMQKAVILATCAIVRRVLSGNNLT

SEQ ID NO: 14001 - protein, 1086 aa, Hermetia illucens
MVWTNQLNEFIVRAYYRVTDLERNPSGYRHRLHDAFITRFPELSHVPEQNVVNQYRVIVNNNRVALPTRQQIFQEVSLELGLESSNYRTSQRSNTSTPPVRHSMNPVVRRSLVTGDVDPIYNEALTAFQVAFTEYAEILPDARPRIPKLKFTSATTNIIASVDRILADRLASEITATEVHSLIYVAAATVIRLHNQHLRANNRGMRRRTLPFWVFRLNKRVEKLRKEIGRVTQALLGNPSPRVHRCVANIIGNYHLSNDMPIEEILEVLKQKLAVCSNRIRRYQKSFQRRTDNTLFFQNQRGFYKNLINSGRDSNLNLDQAEDFWRSVWSESSRCNLEAAWLPHLMRSCEALPEMTMPDVTEVDVKAVLDKAGNWKAPGVDKIHNFWLKRFKSTHRILANQFNQMIADPDLVPPFFTKGITFLIPKEQGVSCPSKCRPITCLPTIYKVFTSVLCANISKHLDVHKLIAEEQKGCAKGSRGCKEQLIIDTVAVKQAVHQKRNISTAYIDYKSAFDSISHSWLLQVLRLYKINPNVVLLLRTVMKNWSTKLSVSSQTSGEIPIRRGIFQGDSLSPLWFCLALNPLSHLLHESKYGFQVKHGILSKCTLSHLMYIDDIKLYAKDENQLRSLLDITIQFSRDIGMQLGLEKCRIKTIVRGKHTDNEGYSQNNIRIEGMDSDDVYKYLGILQATTPAVAIIKSKLLGEFERRLDLVLKTELYGKNKIMAINTFAIPVLLYTFGVIQWSNTDLESVNRRVRVVLANNNMHNRAAEKLRITIPRHQGGRGVLDLKTMHYNQVHSLREFFYKKQSSSQIHQATVMADNKLSPLNLRSREWDPMSNVTSVQQKIDMWKEKPIHGGHIKNLLLSGIDIEASNKWLTNGVLFYETEALLTSIQDASLPTKNYKRYILHDSSITNSSCRLCNCEEETIQHITSACRMLSGTEYTNRHNSVCKILHQNLALKYNLVATYHPYYKYTPQRILENDRVKLLWDHTIATDHSVNHNRPDLVLLLKEERACFIIDVAVPLDRNTVEKQHEKIRNYGPLADDMKQTWRLQKIQVVPVIISATQKAVILATCAIVRRVLSGNNLT

SEQ ID NO: 14002 - protein, 906 aa, Hermetia illucens
MRRRTLPFWVFRLNKRVEKLRKEIGRVTQALLGNPSPRVHRCVANIIGNYHLSNDTPIEEILEVLKQKLAVCSNRIRRYQKSFQRRTDNTLFFQNQRGFYKNLINSGRESNLNLDQAEDFWRSVWSESSRCNLEAAWLPHLMRSCEALPEMTMPDVTEVDVKAVLDKAGNWKAPGVDKIHNFWLKRFKSTHRILANQFNQMIADPDLVPPFFTKGITFLIPKEQGVSCPSKCRPITCLPTIYKVFTSVLCANISKHLDVHKLIAEEQKGCAKGSRGCKEQLIIDTVAVKQAVHQKRNISTAYIDYKSAFDSISHSWLLQVLRLYKINPNVVLLLRTVMKNWSTKLSVSSQTSGEIPIRRGIFQGDSLSPLWFCLALNPLSHLLHESKYGFQVKHGILSKCTLSHLMYIDDIKLYAKDENQLRSLLDITIQFSRDIGMQLGLEKCRIKTIVRGKHTDNEGYSQNNIRIEGIDSDDVYKYLGILQATTPAVAIIKSKLLGEFERRLDFVLKTELYGKNKIMAINTFAIPVLLYTFGVIQWSNTDLESVNRRVRVVLANNNMHNRAAEKLRITIPRHQGGRGVLDLKTLHYNQVHSLREFFYEKQSSSQIHQATVMADNKLSPLNLRSREWDPMSNVTSVQQKIDMWKEKPIHGGHIKNLLLSGIDIEASNKWLTNGVLFYETEAFLTSIQDASLPTKNYKRYILHDSSITNSSCRLCNCEEETIQHITSACRMLSGTEYTNRHNSVCKILHQNLALKYNLVATYHPYYKYTPQRILENDRVKLLWDHTIATDHSVNHNRPDLVLLLKEERACFIIDVAVPLDRNTVEKQHEKIRNYGPLADDMKQTWRLQKIQVVPVIISATGLVPQNLHKALKTLDLRAGLYMEMQKAVILATCAIVRRVLSGNNLT

SEQ ID NO: 14003 - protein, 1123 aa, Hermetia illucens
MPSTTRDGRPRRRMVWTNQLNEFIVRAYYRVTDLERNPSGYRHRLHDAFITRFPELSHVPEQNVVNQYRVIVNNNRVALPTRQQIFQEVSLELGLESSNYRTSQRSNTSTPPVRHSMNPVVRRSLVTGDVDPIYNEALTAFQVAFTEYAEILPDARPGIPKLKFTSATTNIIAAVDRILADRLASEITATEVHSLIYVAAATVIRLHNQHLRANNRGMRRRTLPFWVFRLNKRVEKLRKEIGRVTQALLGNPSPRVHRCVANIIGNYHLSNDMPIEEILEVLKQKLAVCSIRIRRYQKSFQRRTDNTLFFQNQRGFYKNLINSGRESNLNLDQAEDFWRSVWSESSRCNLEAAWLPHLMRSCEALPEMTMPDVTEVDVKAVLDKAGNWKAPGVDKIHNFWLKRFKSTHRILANQFNQMIADPDLVPPFFTKGITFLIPKEQGASCPSKCRPITCLPTIYKVFTSVLCANISKHLDVHKLIAEEQKGCAKGSRGCKEQLIIDTVAVKQAVHQKRNISTAYIDYKSAFDSISHSWLLQVLRLYKINPNVVLLLRTVMKNWSTKLSVSSQTSGEIPIRRGIFQGDSLSPLWFCLALNPLSHLLHESKYGFQVKHGILSKCTLSHLMYIDDIKLYAKDENQLRSLLDITIQFSRDIGMQLGLEKCRIKTIVRGKHTDNEGYSQNNIRIEGMDSDDVYKYLGILQATTPAVAIIKSKLLGEFERRLDLVLKTELYGKNKIMAINTFAIPVLLYTFGVIQWSNTDLESVNRRVRVVLANNNMHNRAAEKLRITIPRHQGGRGVLDLKTLHYNQVHSLREFFYEKQSSSQIHQATVMADNKLSPLNLRSREWDPMSNVTSVQQKIDMWKEKPIHGGHIKNLLLSGIDIEASNKWLTNGVLFYETEAFLTSIQDASLPTKNYKRYILHDSSITNSSCRLCNCEEETIQHITSACRMLSGTEYTNRHNSVCKILHQNLALKYNLVATYHPYYKYTPQRILENDRVKLLWDHTIATDHSVNHNRPDLVLLLKEERACFIIDVAVPLDRNTVEKQHEKIRNYGPLADDMKQTWRLQKIQVVPVIISATGLVPQNLHKALKTLDLRAGLYMEMQKAVILATCAIVRRVLSGNNLT

SEQ ID NO: 14004 - protein, 1123 aa, Hermetia illucens
MPSTTRDGRPRRRMVWTNQLNEFIVRAYYRVTDLERNPSGYRHRLHDAFITRFPELSHVPEQNVVNQYRVIVNNNRVALPTRQQIFQEVSLELGLESSNYRTSQRSNTSTPPVRHSMNPVVRRSLVTGDVDPIYNEALTAFQVAFTEYAEILPDARPRIPKLKFTSATANIIAAVDRILADRLASEITATEVHSLIYVAAATVIRLHNQHLRANNRGMRRRTLPFWVFRLNKRVEKLRKEIGRVTQALLGNPSPRVHRCVANIIGNYHLSNDMPIEEILEVLKQKLAVCSNRIRRYQKSFQRRTDNTLFFQNQRGFYKNLINSGRESNLNLDQAEDFWRSVWSESSRCNLEAAWLPHLMRSCEALPEMTMPDVTEVDVKAVLDKAGNWKAPGVDKIHNFWLKRFKSTHRILANQFNQMIADPDLVPPFFTKGITFLIPKEQGVSCPSKCRPITCLPTIYKVFTSVLCANISKHLDVHKLIAEEQKGCAKGSRGCKEQLIIDTVAVKQAVHQKRNISTAYIDYKSAFDSISHSWLLQVLRLYKINPNVVLLLRTVMKNWSTKLSVSSQTSGEIPIRRGIFQGDSLSPLWFCLALNPLSHLLHESKYGFQVKHGILSKCTLSHLMYIDDIKLYAKDENQLRSLLDITIQFSRDIGMQLGLEKCRIKTIVRGKHTDNEGYSQNNIRIEGMDSDDVYKYLGILQATTPAVAIMKSKLLGEFERRLDLVLKTELYGKNKIMAINTFAIPVLLYTFGVIQWSNTDLESVNRRVRVVLANNNMHNRAAEKLRITIPRHQGGRGVLDLKTLHYNQVHSLREFFYEKQSSSQIHQATVMADNKLSPLNLRSREWDPMSNVTSVQQKIDMWKEKPIHGGHIKNLLLSGIDIEASNKWLTNGVLFYETEAFLTSIQDASLPTKNYKRYILHDSSITNSSCRLCNCEEETIQHITSACRMLSGTEYTNRHNSVCKILHQNLALKYNLVATYHPYYKYTPQRILENDRVKLLWDHTIATDHSVNHNRPDLVLLLKEERACFIIDVAVPLDRNTVEKQHEKIRNYGPLADDMKQTWRLQKIQVVPVIISATGLVPQNLHKALKTLDLRAGLYMEMQKAVILATCAIVRRVLSGNNLT

SEQ ID NO: 14005 - protein, 1123 aa, Hermetia illucens
MPSTTRDGRPRRRMVWTNQLNEFIVRAYYRVTDLERNPSGYRHRLHDAFITRFPELSHVPEQNVVNQYRVIVNNNRVALPTRQQIFQEVSLELGLESSNYRTSQRSNTSTPPVRHSMNPVVRRSLVTGDVDPIYNEALTAFQVAFTEYAEILPDARPRIPKLKFTSATTNIIAAVDRILADRLASEITATEVHSLIYVAAATVIRLHNQHLRANNRGMRRRTLPFWVFRLNKRVEKLRKEIGRVTQALLGNPSPRVHRCVANIIGNYHLSNDMPIEEILEVLKQKLAVCSNRIRRYQKSFQRRTDNTLFFQNQRGFYKNLINSGRESNLNLDQAEDFWRSVWSESSRCNLEAAWFPHLMRSCEALPEMTMPDVTEVDVKAVLDKAGNWKAPGVDKIHNFWLKRFKSTHRILANQFNQMIADPDLVPPFFTKGITFLIPKEQGVSCPSKCRPITCLPTIYKVFTSVLCANISKHLDVHKLIAEEQKGCAKGSRGCKEQLIIDTVAVKQAVHQKRNISTAYIDYKSAFDSISHSWLLQVLRLYKINPNVVLLLRTVMKNWSTKLSVSSQTSGEIPIRRGIFQGDSLSPLWFCLALNPLSHLLHESKYGFQVKHGILSKCTLSHLMYIDDIKLYAKDENQLRSLLDITIQFSRDIGMQLGLEKCRIKTIVRGKHTDNEGCSQNNIRIEGMDSDDVYKYLGILQATTPAVAINKSKLLGEFERRLDLVLKTELYGKNKIMAINTFAIPVLLYTFGVIQWSNTDLESVNRRVRVVLANNNMHNRAAEKLRITIPRHQGGRGVLDLKTMHYNQVHSLREFFYKKQSSSQIHQATVMADNKLSPLNLRSREWDPMSNVTSVQQKIDMWKEKPIHGGHIKNLLLSGIDIEASNKWLTNGVLFYETEAFLTSIQDASLPTKNYKRYILHDSSITNSSCRLCNCEEETIQHITSACRMLSGTEYTNRHNSVCKILHQNLALKYNLVATYHPYYKYTPQRILENDRVKLLWDHTIATDHSVNHNRPDLVLLLKEERACFIIDVAVPLDRNTVEKQHEKIRNYGPLADDMKQTWRLQKIQVVPVIISATGLVPQNLHKALKTLDLRAGLYMEMQKAVILATCAIVRRVLSGNNLT

SEQ ID NO: 14006 - protein, 1043 aa, Hermetia illucens
MPSTTRDGRPRRRMVLTNQLNEFIVRAYYRVTDLERNPSGYRHRLHDAFITRFPELSHVPEQNVVNQYRVIVNNNRVALPTRQQIFQEVSLELGLESSNYRTSQRSNTSTPPVRHSMNPVVRRSLVTGDVDPIYNEALTAFQVAFTEYAEILPDARPRIPKLKFTSATTNILAAVDRILADRLASEITATEVHSLIYVAAATVIRLHNQHLRANNRGMRRRTLPFWVFRLNKRVEKLRKEIGRVTQALLANPSPRVHRCVANIIGNYHLSNDMPIEEILEVLKQKLAVCSNRIRRYQKSFQRRTDNTLFFQNQRGFYKNLINSGRESNLNLDQAEDFWRSVWSESSRCNLEAAWLPHLMRSCEALPEMTMPDVTEVDVKAVLDKAGNWKAPGVDKIHNFWLKRFKSTHRILANQFNQMIADPDLVPPFFTKGITFLIPKEQGVSCPSKCRPITCLPTIYKVFTSVLCANISKHLDVHKLIAEEQKGCAKGSRGCKEQLIIDTVAVKQAVHQKRNISTAYIDYKSAFDSISHSWLLQVLRLYKINPNVVLLLRTVMKNWSTKLSVSSQTSGEIPIRRGIFQGDSLSPLRFCLALNPLSHLLHESKYGFQIKHGILSKCTLSHLMYIDDIKLYAKDENQLRSLLDITIQFRRDIGMQLGLEKCRIKTIVRGKHTDNEGYSQNNIRIEGMDSDDVYKYLGILQATTPAVAIIKSKLLGEFERRLGLVIKTELYGKNKIMAINTFAIPVLLYTFGVIQWSNTDLESVNRRVRVVLANNNMHNRAAEKLRITIPRHQGGRGVLDLKTLHYNQVHSLREFFYEKQSSSQIHQATVMADNKLSPLNLRSREWDPMSNVTSVQQKIDMWKEKPIHGGHIKNLLLSGIDIEASNKWLTNGVLFYETEAFLISIQDASLPTKNYKRYILHDSSITNSSCRLCNCEEETIQHITSACRMLSGTEYTNRHNSVCKILHQNLALKYNLVTTYHSYYKYTPQRILENDRVKLLWDHTIATDHSVNHNRTDLVLLLKEERACFIIDVAVPLDRNTVEK

SEQ ID NO: 14007 - protein, 1123 aa, Hermetia illucens
MPSTTRDGRPRRRMVWTNQLNEFIIRAYYRVTDLERNPSGYRHRLHDAFITRFPELSHVPEQNVVNQYRVIVNNNRVALPTRQQIFQEVSLELGLESSNYRTSQRSNTSTPPVRHSMNPVVRRSLVTGDVDPIYNEALTAFQVAFTEYAEILPDARPRIPKLKFTSATTNIIAAVDRILADRLASEITATEVHSLIYVAAATVIRLHNQHLRANNRGMRRRTLPFWVFRLNKRVEKLRKEIGRVTQALLGNPSPRVHRCVANIIGNYHLSNDMPIEEILEVLKQKLAVCSNRIRRYQKSFQRRTDNTLFFQNQRGFYKNLINSGRESNLNLDQAEDFWRSVWSESSRCNLEAAWLPHLMRSCEALPEMTMPDVTEVDVKAVLDKAGNWKAPGVDKIHNFWLKRFKSTHRILANQFNQMIADPDLVPPFFTKGITFLIPKEQGVSCPSKCRPITCLPTIYKVFTSVLCANISKHLDVYKLIAEEQKGCAKGSRGCKEQLIIDTVAVKQAVHQKRNISTAYIDYKSAFDSISHSWLLQVLRLYKINPNVVLLLRTVMKNWSTKLSVSSQTSGEIPIRRGIFQGDSLSPLWFCLALNPLSHLLHESKYGFQVKHGILSKCTLSHLMYIDDIKLYAKDENQLRSLLDITIQFSRDIGMQLGLEKCRIKTIVRGKHTDNEGYSQNNIRIEGMDSDDVYKYLGILQATTPAVAIIKSKLLGEFERRLDLVLKTELYGKNKIMAINTFAIPVLLYTFGVIQWSNTDLESVNRRVRVVLANNNMHNRAAEKLRITIPRHQGGRGVLDLKTMHYNQVHSLREFFYKKQSSSQIHQATVMADNKLSPLNLRSREWDPMSNVTSVQQKIDMWKEKPIHGGHIKNLLLSGIDIEASNKWLTNGVLFYETEAFLTSIQDASLPTKNYKRYILHDSSITNSSCRLCNCEEETIQHITSACRMLSGTEYTNRHNSVCKILHQNLALKYNLVATYHPYYKYTPQRILENDRVKLLWDHTIATDHSVNHNRPDLVLLLKEERACFIIDVAVPLDRNTVEKQHEKIRNYGPLADDMKQTWRLQKIQVVPVIISATGLVPQNLHKALKTLDLRAGLYMEMQKAVILATCAIVRRVLSGNNLT

SEQ ID NO: 14008 - protein, 1123 aa, Hermetia illucens
MPSTTRDGRPRRRMVWTNQLNEFIVRAYYRVTDLERNPSGYRHRLHDAFITRFPELSHVPEQNVVNQYRVIVNNNRVALPTRQQIFQEVSLELGLESSNYRTSQRSNTSTPPVRHSMNPVVRRSLVTGDVDPIYNEALTAFQVAFTEYAEILPDARPRIPKLKFTSATTNIIAAVDRILADRLASEITATEVHSLIYVAAATVIRLHNQHLRANNRGMRGRTLPFWVFRLNKRVEKLRKEIGRVTQALLGNPSPRVHRCVANIIGNYHLSNDMPIEEILEVLKQKLAVCSNRIRRYQKSFQRRTDNTLFFQNQRGFYKNLINSGRDSNLNLDQAEDFWRSVWSESSRCNLEAAWLPHLMRSCEALPEMTMPDVTEVDVKAVLDKAGNWKAPGVDKIHNFWLKRFKSTHRILANQFNQMIADPDLVPPFFIKGITFLIPKEQGVSCPSKCRPITCLPTIYKVFTSVLCANISKHLDVHKLIAEEQKGCAKGSRGCKEQLIIDTVAVKQAVHQKRNISTAYIDYKSAFDSISHSWLLQVLRLYKINPNVVLLLRTVMKNWSTKLSVSSQTSGEIQIRRGIFQGDSLSPLWFCLALNPLSHLLHESKYGFQVKHGILSKCTLSHLMYIDDIKLYAKDENQLRSLLDITIQFSRDIGMQLGLEKCCIKTIVRGKHTDNEGYSQNNIRIEGMDSDDVYKYLGILQATTPAVAIMKSKLLGEFERRLDLVLKTELYGKNKIMAINTFAIPVLLYTFGVIQWSNTDLESVNRRVRVVLANNNMHNRAAEKLRITIPRHQGGRGVLDLKTLHYNQVHSLREFFYEKQSSSQIHQATVMADNKLSPLNLRSREWDPMSNVTSVQQKIDMWKEKPIHGGHIKNLLLSGIDIEASNKWLTNGVPFYETEAFLTSIQDASLPTKNYKRYILHDSSITNSSCRLCNCEEETIQHITSACRMLSGTEYTNRHNSVCKILHQNLALKYNLVATYHPYYKYTPQRILENDRVKLLWDHTIATDHSVNHNRPDLVLLLKEERACFIIDVAVPLDRNTLEKQHEKIRNYGPLADDMKQTWRLQKIQVVPVIISATGLVPQNLHKALKTLDLRAGLYMEMQKAVILATCAIVRRVLSGNNLT

SEQ ID NO: 14009 - protein, 1106 aa, Hermetia illucens
MPSTTRDGRPRRRMVWTNQLNEFIVRAYYRVMDLERNPSGYRHRLHNAFITRFPELSHVPEQNVVNQYRVIVNNNRVALPTRQQIFQEVSLELGLESSNYRTSQRSNTSTPPVRHSMNPVVRRSLVTGDVDPIYNEALTAFQVAFTEYAEILPDARPKIPKLKFTSATTNIIAAVDRILADRLASEITVTEVHSLIYVAAATVIRLHNQHLRANNRGMRRRTLPFWVFRLNKRVEKLRKEIGRVTQALLGNPSPGVHRCVANIIGNYHLSNDMPIEEILEVLKQKLAVCSNCIRRYQKSFQRRTDNTLFFQNQRGFYKNLTSSDRESNLDLDQAEDFWRSVWSESSRCNLEAAWLPLLTRSYEALPEMTMPDVTEVDVEAALDKAGNWKAPGVDKIHNFWLKRFKSTHRILANQFNQMIADPDLVPQFFTKGITFLIPKEQGVSCPSKCRPITCLPTIYKVFTSVLCANISKHLDVHKLIAEEQKGCAKGSRGCKEQLIIDTVAVKQAVHQKRNISTAYIDYKSAFDSISHSWLLQVLRLYKINPNVVLLLRTVMKNWSTKLSVSSQTSGEIPIRRGIFQGDSLSPLWFCLALNPLSHLFHESKYGFQVKHGILSKCTLSHLMYIDDIKLYAKDENQLRSLLDITIQFSRDIGMQLGLEKCRIKTIVRGKHTDNEGYSQNNIRIEGMDSDDVYKYLGILQATTPSVAIIKSKLLGEFERRLDLVLKTELYGKNKIMAINTFAIPVLLYTFGVIQWSNTDLESVNRRVKVVLANNNMHNRAAEKLRITIPRHQGGRGVLDLKTLHYNQVHSLREFFYEKQSSSQIHQATVMADNKLSPLNLRSREWDPMSNVTSVQQKIDMWKEKPIHGGHIKNLLLSGIDIEASNKWLTNGVLFYETEAFLTSIQDASLPTKNYKRYILHDSSITNSSCRLCNCEEETIQHITSACRMLSGTEYTNRHNSVCKILHQNLALKYNLVTTYHPYYKYTPQRILENGRVKLLWDHTIATDHSVNHNRPDLVLLLKEERACFIIDVAVPLDRNTVEKQHEKIRNYGPLADDMKQTWRLQKIEVVPVIISATGLVPQNLHKMLKTLDLRAGLCYSPKSPVR

SEQ ID NO: 14010 - protein, 1123 aa, Hermetia illucens
MPSATRDGRPRRRMVWTNQLNEFIVRAYYRVTDLERNPSGYRHRLHDAFITRFPELSHVPEQNVVNQYRVIVNNNRVALPTRQQIFQEVSLELGLESSNYRTSQRSNTSTPPVRHSMNPVVRRSLVTGDVDPIYNEALTAFQVAFTEYAEILPDARPKIPKLKFTSATTNIIAAVDRILADRLASEITATEVHSLIYVAAATVICLHNQHLRANNRGMRRRTLPFWVFRLNKRVEKLRKEIGRVTQALLGNPSPRVHRYVANIIGNYHLSNDMPIEKILEVLKQKLAVCSNRIRRYQKSFQRRTDNTLFFQNQRGFYKNLTSSDRESNLNLDQAEDFWRSVWSESSRCNLEAAWLPHLMRSCEALPEMTMPDVTEVDVKAVLDKAGNWKAPGIDKIHNFWLKRFKSTHRILANQFNQMIADPDLVPPFFTKGITFLIPKEQGVSCPSKCRPITCLPTIYKVFTSVLCTNISKHLDVHKLIAEEQKGYAKGSRGCKEQLIIDTVAVKQAVHQKRNISTAYIDYKSAFDSISHSWLLQVLRLYKINPNVVLLLRTVMKNWSTKLSVSSQTSGEIPIRRGIFQGDSLSPLWFCLALNPLSHLLHESKYGFQVKHGILSKCTLSHLMYIDDIKLYAKDENQLRSLLDITIQFSRDIGMQLGLEKCRIKTIVRGKHTDNEGYSQNNIRIEGMDSNDVYKYLGILQATTPAVAIIKSKLLGECERRLDLVLKTELYGKNKIMAINTFAIPVLLYTFGVIQWSNTDLESVNRRVRVVLANNNMHNRAAEKLRITIPRHQGGRRVLDLKTLHYNQVHSLREFFYKKQSSSQIHQATVMADNKLSPLNLRSREWDPMSNVTSVQQKIDMWKEKPIHGGHIKNLLLSGIDIEASNKWLTNGVLFYETEAFLTSIQDASLPTKNYKRYILHDSSITNSSCRLCNCEEETIQHITSVCRMLSGTEYTNRHNSVCKILHQNLALKYNLVATYHPYYKYTPQRILENDRVKLLWDHTIATDHSVNHNRPDLVLLLKEERACFIIDVAVPLDRNTVKKQHEKIRNYGPLADDMKQTWRLQKIQVVRVIISATGLVPQNLHKALETLDLRAGLYMEMQKAVILATCAIVRRVLSGNNLT

SEQ ID NO: 14011 - protein, 1110 aa, Hermetia illucens
MVWTSQLNEFIVRAYYRVTDLKRNPSGYRHRLHDAFITRFPELSHVPEQNVVNQYRVIVNNNRVALPTRQQIFQEVSLELGLESSNYRTSQRSNTSTPPVRHSMNPVVRRSLVTGDVDPIYNEALTAFQVAFTEYAEILPDARPRIPKLKFTSATTNIIAAVDRILADRLASEITATEVHSLIHVAAATVIRLHNQHLRANNRGMRRRTLPFWVFRLNKRVEKLRKEIGRVTQALLGNPSPRVHRCVANIIGNYHLSNDMPIEEILEVLKQKLAVCSNRIRRYQKSFQRRTDNTLFFQNQRGFYKNLINSGRESNLNLDQAEDFWRSVWSESSRCNLEAAWLPHLMRSCEALPEMTMPDVTEVNVKAVLDKAGNWKAPGVDKIHNFWLKRFKSTHRILANQFNQMIADPDLVPPFFTKGITFLIPKEQGVSCPSKCRPITCLPTIYKVFTSVLCANISKHLDVHKLIAEEQKGCAKGSRGCKEQLIIDTVAVKQAVNQKRNISTAYIDYKSAFDSISHSWLLQVLRLYKINPNVVLLLRTVMKNWSTKLSVSSQTSGEIPIRRGIFQGDSLSPLWFCLALNPLSHLLHESKYGFQVKHGILSKCTLSHLMYIDDIKLYAKDENQLRSLLDITIQFSRDIGMQLGLEKCRIKTIVRGKHTDNEGYSQNNIRIEGMDSDDVYKYLGILQATTPAVAIIKSKLLGEFERRLDLVLKTELYGKNKIMAINTFAIPVLLYTFGVIQWSNTDLESVNRRVRVVLANNNMHNRAAEKLRITIPRHQGGRGVLDLKTMHYNQVHSLREFFYKKQSSSQIHQATVMADNKLSPLNLRSREWDPMSKVTSVQQKIDMWKEKPIHGGHIKNLLLSGIDIEASNKWLTNGVLFYETEAFLTSIQDASLPTKNYKRYILHDSSITNSSCRLCNCEEETIQHITSACRMLSGTEYTNRHNSVCKILHQNLALKYNLVATYHPYYKYTPQRILENDRVKLLWDHTIATDHSVNHNRPDLVLLLKEERACFIIDVAVPLDRNTVEKQHEKIRNYGPLADDMKQTWRLQKIQVVPVIISATGLVPQNLHKALKTLDLRAGLYMEMQKAVILATCAIVRRVLSGNNLT

SEQ ID NO: 14012 - protein, 1007 aa, Hermetia illucens
MNPVVRRSLVTGDVDPIYNEALTAFQVAFTEYAEILPDARPRIPKLKFTSATTNIIAAVDRILADRLASEITATEVHSLIYVAAATVIRLHNQHLRANNRGMRRRTLPFWVFRLNKRVEKLRKEIGRVTQALLGNPSPRVHRCVANIIGNYHLSNDMPIEEILEVLKQKLAVCSNRIRRYQKSFQRRTDNTLFFQNQRGFYKNLINSGRESNLNLDQAEDFWRSVWSESSRCNLEAAWLPHLMRSCEALPEMTMPDVTEVDVKAVLDKAGNWKAPGVDKIHNFWLKRFKSTHRILANQFNQMIADPDLVPPFFTKGITFLIPKEQGVSCPSKCRPITCLPTIYKVFTSVLCANISKHLDVHKLIAEEQKGCAKGSRGCKEQLIIDTVAVKQAVHQKRNISTAYIDYKSAFDSISHSWLLQVLRLYKINPNVVLLLRTVMKNWSTKLSVSSQTSGEIPIRRGIFQGDSLSPLWFCLALNPLSHLLHESKYGFQVKHGILSKCTLSHLMYIDDIKLYAKDENQLRSLLDITIQFSRDIGMQFGLEKCRIKTIVRGKHTDNEGYSQNNIRIEGMDSDDVYKYLGILQATTPAVAIIKSKLLGEFERRLDLVLKTELYGKNKIMAINTFAIPVLLYTFGVIQWSNTDLESVNRRVRVVLANNNMHNRAAEKLRITILRHQGGRGVLDLKTLHYNQVHSLREFFYEKQSSSQIHQATVMADNKLSPLNLRSREWDPMSNVTSVQQKIDMWKEKPIHGGHIKNLLLSGIDIEASNKWLTNGVLFYETEAFLTSIQDASLPTKNYKRYILHDSSITNSSCRLCNCEEETIQHITSACRMLSGTEYTNRHNSVCKILHQNLALKYNLVATYHPYYKYTPQRILENDRVKLLWDHTIATDHSVNHNRPDLVLLLKEERACFIIDVAVPLDRNTVEKQHEKIRNYGPLADDMKQTWRLQKIQVVPVIISATGLVPQNLHKALKTLDLRAGLYMEMQKAVILATCAIVRRVLSGNNLT

SEQ ID NO: 14013 - protein, 1123 aa, Hermetia illucens
MPSTTRDGRPRRRMVWTSQLNEFIVRAYYRVTDLERNPSGYRHRLHDAFITRFPELSHVPEQNVVNQYRVIVNNNRVALPTRQQIFQEVSLELGLESSNYRTSQRSNTSTPPVRHSMNPVVRRSLVTGDVDPIYNEALTAFQVAFTEYAEILPDARPRIPKLKFTSATTNIIAAVDRILADRLASEITATEVHSLIYVAAATVIRLHNQHLRANNRGMRRRTLPFWVFRLNKRVEKLRKEIGRVTQALLGNPSPRVHRCVANIIGNYHLSNDMPIEEILEVLKQKLAVCSNRIRRYQKSFQRRADNTLFFQNQRGFYKNLINSGRESNLNLDQAEDFWRSVWSESSRCNLEAAWLPHLMRSCEALPEMTMPDVTEVDVKAVLDKAGNWKAPGVDKIHNFWLKRFKSTHRILANQFNQMIADPDLVPPFFTKGITFLIPKEQGVSCPSKCRPITCLPTIYKVFTSVLCANISKHLDVHKLIAEEQKGCAKGSRGCKEQLIIDTVAVKQAVHQKRNISTAYIDYKSAFDSISHSWLLQVLRLYKINPNVVLLLRTVMKNWSTKLSVSSQTSGEIPIRRGIFQGDSLSPLWFCLALNPLSHLLHESKYGFQVKHGILSKCTLSHLMYIDDIKLYAKDENQLRSLLDITIQFSRDIGMQLGLEKCRIKTIVRGKHTDNEGYSQNNIRIEGMDSDDVYKYLGILQATTPAVAIIKSKLLGEFERRLDLVLKTELYGKNKIMAINTFAIPVLLYTFGVIQWSNTDLESVNRRVRVVLANNNMHNRAAEKLRITIPRHQGGRGVLDLKTLHYNQVHSLREFFYEKQSSSQIHQATVMADNKLSPLNLRSREWDPMSNVTSVQQKIDMWKEKPIHGGHIKNLLLSGIDIEASNKWLTNGVLFYETEAFLTSIQDASLPTKNYKRYILHDSSITNSSCRLCNCEEETIQHITSACRMLSGTEYTNRHNSVCKILHQNLALKYNLVATYHPYYKYTPQRILENDRVKLLWDHTIATDHSVNHNRPDLVLLLKEERACFIIDVAVPLDRNTVEKQHEKIRNYGPLADDMKQTWRLQKIQVVPVIISATGLVPQNLHKALKTLDLRAGLYMEMQKAVILATCAIVRRVLSGNNLT

SEQ ID NO: 14014 - protein, 1123 aa, Hermetia illucens
MPSTTRDGRPRRRMVWTSQLNEFIVRAYYRVTDLERNPSGYRHRLHDAFITRFPELSHVPEQNVVNQYRVIVNNNRVALPTRQQIFQEVSLELGLESSNYRTSQRSNTSTPSVRHSMNPVVRRSLVTGDVDPIYNEALTAFQVAFTEYAEILPDARPRIPKLKFTSATTNIIAAVDRILADRLASEITATEVHSLIYVAAATVIRLHNQHLSANNRGMRRRTLPFWVFRLNKRVEKLRKEIGRVTQALLGNPSPRVHRCVANIIGNYHLSNDMPIEEILEVLKQKLAVCSNRIRRYQKSFQRRTDNTLFFQNQRGFYKNLINSGRESNLNLDQAEDFWRSVWSESSRCNLEAAWLPHLMRSCEALPEMTMPDVTEVDVKAALDKAGNWKAPGVDKIHNFWLKRFKSTHRILANQFKQMIADPDLVPPFFTKGITFLIPKEQGVSCPSKCRPITCLPTIYKVFTSVLCANISKHLDVHKLIAEEQKGCAKGSRGCKEQLIIDTVAVKQAVHQKRNISTAYIDYKSAFDSISHSWLLQVLRLYKINPNVVLLLRTVMKNWSTKLSVSSQTSGEIPIRRGIFQGDSLSPLWFCLALNPLSHLLHESKYGFQVKHGILSKCTLSHLMYIDDIKLYAKDENQLRSLLDITIQFSRDIGMQLGLEKCRIKTIVRGKHTDNEGYSQNNIRIEGMDSDDVYKYLGILQATTPAVAIIKSKLLGEFERRLDLVLKTELYGKNKIMAINTFAIPVLLYTFGVIQWSNTDLESVNRRVRVVLANNNMHNRAAEKLRITIPRHQGGRGVLDLKTLHYNQVHSLREFFYEKQSSSQIHQATVMADNKLSPLNLRSREWDPMSNVTSVQQKIDMWKEKPIHGGHIKNLLLSGIDIEASNKWLTNGVLFYETEAFLTSIQDASLPTKNYKRYILHDSSITNSSCRLCNCEEETIQHITSACRMLSGTEYTNRHNSVCKILHQNLALKYNLVATYHPYYKYTPQRILENDRVKLLWDHTIATDHSVNHNRPDLVLLLKEERACFIIDVAVPLDRNTVEKQHEKIRNYGPLADDMKQTWRLQKIQVVPVIISATGLVPQNLHKALKTLDLRAGLYMEMQKAVILATCAIVRRVLSGNNLT

SEQ ID NO: 14015 - protein, 1123 aa, Hermetia illucens
MPSTTRDGRPRRRMVWTNQLNEFIVRAYYRVTDLERNPSGYRHRLHDAFITRFPELSHVPEQNVVNQYRVIVNNNRVALPTRQQIFQEVSLELGLESSNYRTSQRSNTSTPPVRHSMNPVVRRSLVTGDVDPIYNEALTAFQVAFTEYAEILPDARPKIPKLKFTSATTNIIAAVDRILADRLASEITATEVHSLIYVAAATVIRLHNQHLRANNRGMRRRTLPFWVFRLNKRVEKLRKEIGRVTQALLGNPSPRVHRCVVNIIGNYHLSNDMPIEEILEVLKQKLAVCSNRIRRYQKSFQRRADNTLFFQNQRGFYKNLINSGRDSNLNLDQAEDFWRSVWSESSRCNLEAAWLPHLMRSCEALPEMTMPDVTEVDVKAALDKAGNWKAPGVDKIHNFWLKRFKSTHRILANQFNQMIADPDLVPPFFTKGITFLIPKEQGVSCPSKCRPITCLPTIYKVFTSVLCANISKHLDVHKLIAEEQKGCAKGSRGCKEQLIIDTVAVKQAVHQKRNISTAYIDYKSAFDSISHSWLLQVLRLYKINPNVVLLLRTVMKNWSTKLSVSSQTSGEIPIRRGIFQGDSLSPLWFCLALNPLSHLLHESKYGFQVKHGILSKCTLSHLMYIDDIKLYAKDENQLRSLLDITIQFSRDIGMQLGLEKCRIKTIVRGKHTDNEGYSQNNIRIEGMDSDDVYKYLGILQATTPAVAIIKSKLLGEFERRLDLVLKTELYGKNKIMAINTFAIPVLLYTFGVIQWSNTDLESVNRRVRVVLANNNMHNRAAEKLRITIPRHQGGRGVLDLKTMHYNQVHSLREFFYKKQSSSQIHQATVMADNKLSPLNLRSREWDPMSNVTSVQQKIDMWKEKPIHGGHIKNLLLSGIDIEASNKWLTNGVLFYETEAFLTSIQDASLPTKNYKRYILHDSSITNSSCRLCNCEEETIQHITSACRMLSGTEYTNRHNSVCKILHQNLALKYNLVATYHPYYKYTPQRILENDRVKLLWDHTIATDHSVNHNRPDLVLLLKEERACFIIDVAVPLDRNTVEKQHEKIRNYGPLADDMKQTWRLQKIQVVPVIISATGLVPQNLHKALKTLDLRAGLYMEMQKAVILATCAIVRRVLSGNNLT

SEQ ID NO: 14016 - protein, 1123 aa, Hermetia illucens
MPSTTRDGRPRRRMVWTSQLNEFIVRAYYRVTDLERNPSGYRHRLHDAFITRFPELSHVPEQNVVNQYRVIVNNNRVALPTRQQIFQEVSLELGLESSNYRTSQRSNTSTPPVRHSMNPVVRRSLVTGDVDPIYNEALTAFQVAFTEYAEILPDARPRIPKLKFTSATTNIIAAVDRILADRLASEITATEVHSLIYVAAATVIRLHNQHLRANNRGMRRRTLPFWVFRLNKRVEKLRKEIGRVTQALLGNPSPRVHRCVANIIGNYHLSNDMPIEEILEVLKQKLAVCCNRIRRYQKSFQRRTDNTLFFQNQRGFYKNLINSGRESNLNLDQAEDFWRSVWSESSRCNLEAAWLPHLMRSCEALPEMTMPDVTEVDVKAVLDKAGNWKAPGVDKIHNFWLKRFKSTHRILANQFNQMIADPDLVPPFFTKGITFLIPKEQGVSCPSKCRPITCLPTIYKVFTSVLCANISKHLDVHKLIAEEQKGCAKGSRGCKEQLIIDTVAVKQAVHQKRNISTAYIDYKSAFDSISHSWLLQVLRLYKINPNVVLLLRTVMKNWSTKLSVSSQTSGEIPIRRGIFQGDSLSPLWFCLALNPLSHLLHESKYGFQVKHGILSKCTLSHLMYIDDIKLYAKDENQLRSLLDITIQFSRDIGMQLGLEKCRIKTIVRGKHTDNEGYSQNNIRIEGMDSDDVYKYLGILQATTPAVAIIKSKLLGEFERRLDLVLKTELYGKNKIMAINTFAIPVLLYTFGVIQWSNTDLESFNRRVRVVLANNNMHNRAAEKLRITIPRHQGGRGVLDLKTLHYNQVHSLREFFYEKQSSSQIHQATVMADNKLSPLNLRSREWDPMSNVTSVQQKIDMWKEKPIHGGHIKNLLLSGIDIEASNKWLTNGVLFYETEAFLTSIQDASLPTKNYKRYILHDSSITNSSCRLCNCEEETIQHITSACRMLSSTEYTNRHNSVCKILHQNLALKYNLVATYHPYYKYTPQRILENDRVKLLWDHTIATDHSVNHNRPDLVLLLKEERACFIIDVAVPLDRNTVEKQHEKIRNYGPLADDMKQTWRLQKIQVVPVIISATGLVPQNLHKALKTLDLRAGLYMEMQKAVILATCAIVRRVLSGNNLT

SEQ ID NO: 14017 - protein, 1123 aa, Hermetia illucens
MPSTTRDGRPRRRMVWTSQLNEFIVRAYYRVTDLERNPSGYRHRLHDAFITRFPELSHVPEQNVVNQYRVIVNNNRVALPTRQQIFQEVSLELGLESSNYRTSQRSNTSTPPVRHSMNPVVRRSLVTGDVDPIYNEALTAFQVAFTEYAEILPDARPGIPKLKFTSATTNIIAAVDRILADRLASEITATEVHSLIYVAAATVIRLHNQHLRANNRGMRRRTLPFWVFRLNKRVEKLRKEIGRVTQALLGNPSPRVHRCVANIIGNYHLSNDMPIEEILEVLKQKLAVCSNRIRRYQKSFQRRTDNTLFFQNQRGFYKNLINSGRESNLNLDQAEDFWRSVWSESSRCNLEAAWLPHLMRSCEALPEMTMPDVTEVDVKAVLDKAGNWKAPGVDKIHNFWLKRFKSTHRILANQFNQMIADPDLVPPFFTKGITFLIPKEQGASCPSKCRPITCLPTIYKVFTSVLCANISKHLDVHKLIAEEQKGCAKGSRGCKEQLIIDTVAVKQAVHQKRNISTAYIDYKSAFDSISHSWLLQVLRLYKINPNVVLLLRTVMKNWSTKLSVSSQTSGEIPIRRGIFQGDSLSPLWFCLALNPLSHLLHESKYGFQVKHGILSKCTLSHLMYIDDIKLYAKDENQLRSLLDITIQFSRDIGMQLGLEKCRIKTIVRGKHTDNEGYSQNNIRIEGMDSDDVYKYLGILQATTPAVAIMKSKLLGEFERRLDLVLKTELYGKNKIMAINTFAIPVLLYTFGVIQWSNTDLESVNRRVRVVLANNNMHNRAAEKLRITIPRHQGGRGVLDLKTLHYNQVHSLREFFYEKQSSSQIHQATVMADNKLSPLNLRSREWDPMSNVTSVQQKIDMWKEKPIHGGHIKNLLLSGIDIEASNKWLTNGVLFYETEAFLTSIQDASLPTKNYKRYILHDSSITNSSCRLCNCEEETIQHITSACRMLSGTEYTNRHNSVCKILHQNLALKYNLVATYHPYYKYTPQRILENDRVKLLWDHTIATDHSVNHNRPDLVLLLKEERACFIIDVAVPLDRNTVEKQHEKIRNYGPLADDMKQTWRLQKIQVVPVIISATGLVPQNLHKALKTLDLRAGLYMEMQKAVILATCAIVRRVLSGNNLT

SEQ ID NO: 14018 - protein, 1123 aa, Hermetia illucens
MPSTTRDGRPRRRMVWTNQLNEFIVRAYYRVTDLERNPSGYRHRLHDAFITRFPELSHVPEQNVVNQYRVIVNNNRVALPTRQQIFQEVSLELGLESSNYRTSQRSNTSTPPVRHSMNPVVRRSLVTGDVDPIYNEALTAFQVAFTEYAEILPDARPRIPKLKFTSATTNIIAAVDRILADRLASEITATEVHSLIYVAAATVIRLHNQHLRANNRGMRRRTLPFWVFRLNKRVEKLRKEIGRVTQALLGNPSPRVHRCVANIIGNYHLSNDMPIEEILEVLKQKLAVCSNRIRRYQKSFQRRADNTLFFQNQRGFYKNLINSGRESNLNLDQAEDFWRSVWSESSRCNLEAAWLPHLMRSCEALPEMTMPDVTEVDVKAVLDKAGNWKAPGVDKIHSFWLKRFKSTHRILANQFNQMIADPDLVPPFFTKGITFLIPKEQGVSCPSKCRPITCLPTIYKVFTSVLCANISKHLDVHKLIAEEQKGCAKGSRGCKEQLIIDTVAVKQAVHQKRNISTAYIDYKSAFDSISHSWLLQVLRLYKINPNVVLLLRTVMKNWSTKLSVSSQTSGEIPIRRGIFQGDSLSPLWFCLALNPLSHLLHESKYGFQVKHGILSKCTLSHLMYIDDIKLYAKDENQLRSLLDITIQFSRDIGMQLGLEKCRIKTIVRGKHTDNEGYSQNNIRIEGMDSDDVYKYLGILQATTPAVAIIKSKLLGEFERRLDLVLKTELYGKNKIMAINTFAIPVLLYTFGVIQWSNTDLESVNRRVRVVLANNNMHNRAAEKLRITIPRHQGGRGVLDLKTLHYNQVLSLREFFYEKQSSSQIHQATVMADNKLSPLNLRSREWDPMSNVTSVQQKIDMWKEKPIHGGHIKNLLLSGIDIEASNKWLTNGVLFYETEAFLTSIQDASLPTKNYKRYILHDSSITNSSCRLCNCEEETIQHITSACRMLSGTEYTNRHNSVCKILHQNLALKYNLVATYHPYYKYTPQRILENDRVKLLWDHTIATDHSVNHNRPDLVLLLKEERACFIIDVAVPLDRNTVEKQHEKIRNYGPLADDMKQTWRLQKIQVVPVIISATGLVPQNLHKALKTLDLRAGLYMEMQKAVILATCAIVRRVLSGNNLT

SEQ ID NO: 14019 - protein, 1123 aa, Hermetia illucens
MPSTTRDGRPRRRMVWTSQLNEFIVRAYYRVTDLERNPSGYRHRLHDAFITRFPELSHVPEQNVVNQHRVIVNNNRVALPTRQQIFQEVSLELGLESSNYRTSQRSNTSTPPVRHSMNPVVRRSLVTGDVDPIYNEALTAFQVTFTEYAEILPDARPRIPKLKFTSATTNIIAAVDRILADRLTSKITATEVHSLIYVAAATVIRLHNQHLRANNRGMRRRTLPFWVFRLNKRVEKLRKEIGRVTQALLGNPSPRVHRCVANIIGNYHLSNDMPIEEILEVLKQKLAVCSNRIRRYQKSFQRRADNTLFFQNQRGFYKNLINSGRESNLNLDQAEDFWRSVWSESSRCNLEAAWLPHLMRSCEALPEMTMPDVTEVDVKAVLDKAGNWKAPGVDKIHNFWLKRFKSTHRILANQFNQMIADPDLVPPFFTKGITFLIPKEQGVSCPSKCRPITCLPTIYKVFTSVLCANISKHLDVHKLIAEEQKGCAKGSRGCKEQLIIDTVAVKQAVHQKRNISTAYIDYKSAFDSISHSWLLQVLRLYKINPNVVLLLRTVMKNWSTKLSVSSQTSGEIPIRRGIFQGDSLSPLWFCLALNPLSHLLHESKYGFQVKHGILSKCTLSHLMYIDDIKLYAKDENQLRSLLDITIQFSRDIGMQLGLEKCRIKTIVRGKHTDNEGYSQNNIRIEGMDSDDVYKYLGILQATTPAVAIIKSKLLGEFERRLDLVLKTELYGKNKIMAINTFAIPVLLYTFGVIQWSNTDLESVNRRVRVVLANNNMHNRAAEKLRITIPRHQGGRGVLDLKTLHYNQVHSLREFFYEKQSSSQIHQATVMADNKLSPLNLRSREWDPMSNVTSVQQKIDMWKEKPIHGGHIKNLLLSGIDIEASNKWLTNGVLFYETEAFLTSIQDASLPTKNYKRYILHDSSITNSSCRLCNCEEETIQHITSACRMLSGTEYTNRHNSVCKILHQNLALKYNLVATYHPYYKYTPQRILENDRVKLLWDHTIATDHSVNHNRPDLVLLLKEQRACFIIDVAVPLDRNTVEKQHEKIRNYGPLADDMKQTWRLQKIQVVPVIISATGLVPQNLHKALKTLDLRAGLYMEMQKAVILATCAIVRRVLSGNNLT

SEQ ID NO: 14020 - protein, 1123 aa, Hermetia illucens
MPSTTRDGRPRRRMVWTSQLNEFIVRAYYRVTDLERNPSGYRHRLHDAFITRFPELSHVPEQNVVNQYRVIVNNNRVALPTRQQIFQEVSLELGLESSNYRTSQRSNTSTPPVRHSMNPVVRRSLVTGDVDPIYNEALTAFQVAFTEYAEILPDARPKIPKLKFTSATTNIIAAVDRILADRLASEITATEVHSLIYVAAATVIRLHNQHLRANNRGMRRRTLPFWVFRLNKRVEKLRKEIGRVTQALLGNPSPRVHRCVANIIGNYHLSNDMPIEEILEVLKQKLAVCCNRIRRYQKSFQRRTDNTLFFQNQRGFYKNLINSGRESNLNLDQAEDFWRSVWSESSRCNLEAAWLPHLMRSCEALPEMTMPDVTEVDVKAVLDKAGNWKAPGVDKIHNFWLKRFKSTHRILANQFNQMIADPDLVPPFFTKGITFLIPKEQGVSCPSKCRPITCLPTIYKVFTSVLCANISKHLDVHKLIAEEQKGCAKGSRGCKEQLIIDTVAVKQAVHQKRNISTAYIDYKSAFDSISHSWLLQVLRLYKINPNVVLLLRTVMKNWSTKLSVSSQTSGEIPIRRGIFQGDSLSPLWFCLALNPLSHLLHESKYGFQVKHGILSKCTLSHLMYIDDIKLYAKDENQLRSLLDITIQFSRDIGMQLGLEKCRIKTIVRGKHTDNEGYSQNNIRIEGMDSDDVYKYLGILQATTPAVAIIKSKLLGEFERRLDLVLKTELYGKNKIMAINTFAIPVLLYTFGVIQWSNTDLESVNRRVRVVLANNNMHNRAAEKLRITIPRHQGGRGVLDLKTMHYNQVHSLREFFYEKQSSSQIHQATVMADNKLSPLNLRSREWDPMSNVTSVQQKIDMWKEKPIHGGHIKNLLLSGIDIEASNKWLTNGVLFYETEAFLTSIQDASLPTKNYKRYILHDSSITNSSCRLCNCEEETIQHITSACRMLSGTEYTNRHNSVCKILHQNLALKYNLVATYHPYYKYTPQRILENDRVKLLWDHTIATDHSVNHNRPDLVLLLKEERACFIIDVAVPLDRNTVEKQHEKIRNYGPLADDMKQTWRLQKIQVVPVIISATGLVPQNLHKALKTLDLRAGLYMEMQKAVILATCAIVRRVLSGNNLT

SEQ ID NO: 14021 - protein, 1123 aa, Hermetia illucens
MPSTTRDGRPRRRMVWTNQLNEFIVRAYYRVTDLERNPSGYRHRLHDAFITRFPELSHVPEQNVVNQYRVIVNNNRVALPTRQQIFQEVSLELGLESSNYRTSQRSNTSTPPVRHSLNPVVRRSLVTGDVDPIYNEALTAFQVAFTEYAEILPDARPRIPKLKFTSATTNIIAAVDRILADRLASEITATEVHSLIYVAAATVIRLHNQHLRANNRGMRRRTLPFWVFRLNKRVEKLRKEIGRVTQALLGNPSPRVHKCVANIIGNYHLSNDMPIEEILEVLKQKLAVCSNRIRRYQKSFQRRTDNTLFFQNQRGFYKNLINSGRESNLNLDQAEDFWRSVWSESSRCNLEAAWLPHLMRSCEALPEMTMPDVTEVDVKAVLDKAGNWKAPGVDKIHNFWLKRFKSTHRILANQFNQMIADPDLVPPFFTKGITFLIPKEQGVSCPSKCRPITCLPTIYKVFTSVLCANISKHLDVHKLIAEEQKGCAKGSRGCKEQLIIDTVAVKQAVHQKRNISTAYIDYKSAFDSISHSWLLQVLRLYKINPNVVLLLRTVMKNWSTKLSVSSQTSGEIPIRRGIFQGDSLSPLWFCLALNPLSHLLHESKYGFQVKHGILSKCTLSHLMYIDDIKLYAKDENQLRSLLDITIQFSRDIGMQLGLEKCRIKTIVRGKHTDNEGYSQNNIRIEGMDSDDVYKYLGILQATTPAVAIIKSKLLGEFERRLDLVLKTELYGKNKIMAINTLAIPVLLYTFGVIQWSNTDLESVNRRVRVVLANNNMHNRAAEKLRITIPRHQGGRGVLDLKTMHYNQVHSLREFFYKKQSSSQIHQATVMADNKLSPLNLRSREWDPMSNVTSVQQKIDMWKEKPIHGGHIKNLLLSGIDIEASNKWLTNGVLFYETEAFLTSIQDASLPTKNYKRYILHDSSITNSSCRLCNCEEETIQHITSACRMLSGTEYTNRHNSVCKILHQNLALKYNLVATYHPYYKYTPQRILENDRVKLLWDHTIATDHSVNHNRPDLVLLLKEERACFIIDVAVPLDRNTVEKQHEKIRNYGPLADDMKQTWRLQKIQVVPVIISATGLVPQNFHKALKTLDLRAGLYMEMQKVVILATCAIVRRVLSGNNLT

SEQ ID NO: 14022 - protein, 966 aa, Hermetia illucens
MPSTTRDGRPRRRMVWTNQLNEFIVRAYYRVTDLERNPSGYRHRLHDAFITRFPELSHVPEQNVVNQYRVIVNNNRVALPTRQQIFQEVSLELGLESSNYRTSQRSNTSTPPVRQSMNPVVRRSLVTGDVDPIYNEALTAFQVAFTEYAEILPDARPRIPKLKFTSATTNIIAAVDRILADRLASEITATEVHSLIYVAAATVIRLHNQRLRANNRGMRRRTLPFWVFRLNKRVEKLRKEIGRVTQALLGNPSPRVHRCVANIIGNYHLSNDMPIEEILEVLKQKLAVCSNRIRRYQKSFQRRTDNTLFFQNQRGFYKNLINSGRESNLNLDQAEDFWRSVWSDVKAVLDKAGNWKAPGVDKIHNFWLKRFKSTHRILANQFNQMIADPNLVPPFFNKGITFLIPKEQGVSCPSKCRPITCLPTIYKVFTSVLCANISKHLDVHKLIAEEQKGCAKGSRGCKEQLIIDTVAVKQAVHQKRNISTAYIDYKSAFDSISHSWLLQVLRLYKINPNVVLLLRTVMKNWSTKLSVSSQTSGEIPIRRGIFQGDSLSPLWFCLALNPLSHLLHESKYGFQVKHGILSKCALSHLMYIDDIKLYAKDENQLRSLLDITIQFSRDIGMQLGLEKCRIKTIVRGKHTDNEGYSQNNIRIEGMDSDHVNKYLGILQATTPAVAIIKSKLLVEFERRLDLVLKTELYGKNLIMAINTFAIPVLLYIFGVIQWSNTDLESVSRRVRVVLANNKMHNRAAKKLRITIPRHQGGRGVLDLKTMHYNQVHSLREFFYEKQSSSQIHQATVMAENKLSPLNLRSREWDPMSNVTSVQQKIDMWKEKLIHGGHIKNLLLSGVDIEASNKWLTNGVLFYETEAFLTSIQDASLPTKNYKRYILHDSSITNSSCRLCNCEEETIQHITSACRMLSGTEYTNRHNSVCKILHQNLALKYNLVATYHPYYKYTPQRILENDRVKLL

SEQ ID NO: 14023 - protein, 999 aa, Hermetia illucens
MRPGMRSKSLRYIGNIYIYALPTRQQIFQEVSLELGLESSNYRTSQRSNTSTPPVRHSMNPVVRRSLVTGDVDPIYNEALTAFQVAFTEYAEILPDARPRIPKLKFTSATTNIIAAVDRILADRLASEITATEVHSLIYVAAATVIRLHNQHLRANNRGMRRRTLPFWVFRLNKRVEKLRKEIGRVTQALLGNPSPRVHRCVANIIGNYHLSNDMPIEEILEVLKQKLAVCSNRIRRYQKSFQRRTDNTLFFQNQRGFYKNLINSGRESNLNLDQAEDFWRSVWSESSRCNLEAAWLPHLMRSCEAFPEMTMPDVTEVDVNAVLDKAGNWKAPGVDKIHNFWLKRFKSSHRILANQFNQMIADPDLVPPFFTKGITFLIPKEQGVSCPSKCRPITCLPTIYKVFTSVLCANISKHLDVHKLIAEEQKGCAKGSRGCKEQLIIDTVAVKQAVHQKRNISTAYIDYKSAFDSISHSWLLQVLRLYKINPNVVLLLRKVMKNWSTKLSVSSQTSGEIPIRRGIFQGDSLSLLWFCLALNPLSHLLHESKYGFQVKHGILSKCTLSHLMYIDDIKLYAKDENQLRSLLDITIQFSRDIGMQLGLEKCRIKTIVRGKHTDNEGYSQNNIRIEGMDSDDVYKYLGILQATTHAVAIIKSKLLGEFEWRLDLVLKTELYGKNKIMAINTFAIPVLLYTFGVIQWSNTDLESVNRRVRVVLANNNMHNRAAEKLRITIPRHQGGRGVLDLKTMHYNQVHSLREFFCKKQSSSQIHQATVMADNKLSPLNLRSREWDPMSNVTSVQQKIDMWKEKPIHGGHIKNLLLSGIDIEASNKWLTNGVLFYETEAFLTSIQDASLPTKNYKRYILHDSSITNSSCRLCNCEEETIQHITSACRMLSGTEYTNRHNSVCKILHQNLALKYNLVATYHPYYKYTPQRILENDRVKLLWDHTIATDHSVNHNRPDLVMLLKEERACFIIDVAVPLDRNTVKNSTKKSGTTAPWQTI

SEQ ID NO: 14024 - protein, 1123 aa, Hermetia illucens
MPSTTRDGRPRRRMVWTSQLNEFIVRAYYRVTDLERNPSGYRHRLHDAFITRFPELSHVPEQNVVNQYRVIVNNNRVALPTRQQIFQEVSFELGLESSNYRTSQRSNTSTPPVRHSMNPVVRRSLVTGDVDPIYNEALTAFQVAFTEYAEILPDARPRIPKLKFTSATTNIIAAVDRILADRLASEITATEVHSLIYVAAATVIRLHNQHLRANNRGMRRRTLPFWVFPLNKRVEKLRKEIGRVTQALLGNPSPRVHRCVANIIGNYHLSNDMPIEEILEVLKQKLAVCSNRIRRYQKSFQRRTDNTLFFQNQRGFYKNLINSGRESNLNLDQAEDFWRSVWSESSRCNLEAAWLPHLMRSCEALPEMTMPDVTEVDVKAVLDKAGNWKAPGVDKIHNFWLKRFKSTHRILANQFNQMIADPDLVPPFFTKGITFLIPKEQGVSCPSKCRPITCFPTIYKVFTSVLCANISKHLDVHKLIAEEQKGCAKGSRGCKEQLIIDTVAVKQAVHQKRNISTAYIDYKSAFDSISHSWLLQVLRLYKINPNVVLLLRTVMKNWSTKLSVSSQTSGEIPIRRGIFQGDSLSPLWFCLALNPLSHLLHESKYGFQVKHGILSKCTLSHLMYIDDIKLYAKDENQLRSLLDITIQFSRDIGMQLGLEKCRIKTIVRGKHTDNEGYSQNNIRIEGMDSDDVYKYLGILQATTPAVAIIKSKLLGEFERRLDLVLKTELYGKNKIMAINTFAIPVLLYTFGVIQWSNTDLESVNRRVRVVLANNNMHNRAAEKLRITIPRHQGGRGVLDLKTLHYNQVHSLREFFYEKQSSSQIHQATVMADNKLSPLNLRRREWDPMSNVTSVQQKIDMWKEKPIHGDHIKNLLLSGIDIEASNKWLTNGVLFYETEAFLTSIQDASLPTKNYKRYILHDSSITNSSCRLCNCEEETIQHITSACRMLSGTEYTNRHNSVCKILHQNLALKYNLVATYHPYYKYTPQRILENDRFKLLWDHTIATDHSVNHNKPDLVLLLKEERACFIIDVAVPLDRNTVEKQHEKIRNYGPLADDMKQTWRLQKIQVVPVIISATGLVPQNLHKALKTLDLRAGLYMEMQKAVILATCAIVRRVLSGNNLT

SEQ ID NO: 14025 - protein, 1123 aa, Hermetia illucens
MPSTTRDGRPRRRMVWTNQLNEFIVRAYYRVTDLERNASGYRHRLHDAFITRFPELSHVPEQNVVNQYRVIVNNNRVTLPTRQQIFQEVSFELGLESSNYRTSQRSNTSTPPVRHSMNPVVRRSLVTGDVDPIYNEALTAFQVAFTEYAEILPDARPKIPKLKFTSAATNIIAAVDRILTDRLASETTATEVHSLIYVAAATVIRLHNQHLRANNRGMRRWTLPFWVFRLNKRVEKLRKEIGRVTQALLGNPSPRVHRCVANIIGNYHLSNDMPIEEILEVLKQKLAVCSNRIRRYQKSFQRRTDNTLFFQNQRGFYKNLINSGRESNLNLDQAEDFWRSVWSESSRCNLEAAWLPHLMRSCEALPEMTMPDVTEVDVKAALDKAGNWKAPGVDKIHNFWLKRFKSTHRILANQFNQMIADPDLVPPFFTKGITLLIPKEQGVSCPSKCRPITCLPTIYKVFTSVLCANISKHLDVHKLIAEEQKGCAKGSRGCKEQLIIDTVAVKQAVHQKRNISTAYIDYKSAFDSISHSWLLQVLRLYKINPNVVLLLRTVMKNWSTKLSVSSQTSGEIPIRRGIFQGDSLSPLWFCLALNPLSHLLHESKYGFQVKHGILSKCTLSHLMYIDDIKLYAKDENQLRSLLDITIQFSRDIGMQLGLEKCRIKTIVRGKHTDNEGYSQNNIRIEGMDSDDVYKYLSILQATTPAVAIIKSKLLGEFERRLDLVLKTELYGKNKIMAINTFAIPVLLYTFGVIQWSNTDLESVNRRVRVVLANNNMHNRAAEKLRITIPRHQGGRGVLDLKTMHYNQVHSLREFFYEKQSSSQIHQATVMADNKLSPLNLRSREWDPMSNVTSVQQKIDMWKEKPIHGGHIKNLLLSGIDIEASNKWLTNGVLFYETEAFLTSIQDASLPTKNYKRYILHDSSITNSSCRLCNCEEETIQHITSACRMLSGTEYTNRHNSVCKILHQNLALKYNLVATYHPYYKYTPQRILENDRVKLLWDHTIATDHSVNHNRPDLVLLLKEERACFIIDVAVPLDRNTVEKQHEKIRNYGPLADDMKQTWRLQKIQVVPVIISATGLVPQNLHKALKTLDLRAGLYMEMQKAVILATCAIVRRVLSGNNLT

SEQ ID NO: 14026 - protein, 1123 aa, Hermetia illucens
MPSTTRDGRPRRRMVWTNQLNEFIVRAYYRVTDLERNPSGYRHRLHDAFITRFPELSHVPEQNVVNQYRVIVNNNRVALPTRQQIFQEVSLELGLESSIYRTSQRSNTSTPPVRHSMNPVVRRSLVTGDVDPIYNDALTAFQVAFTEYAEILPDARPKIPKLKFTSATTNIIAAVDRILADRLAGEITATEVHSLIYVAAATVIRLHNQHLRANNRGMRRGTLPFWVFRLNKRIEKLRKEIGRVTQALLGNPSPRVHRCVANIIGNYHLSNDMPIEEILEVLKQKLAVCSNRIRRYQKSFQRRTDNTLFFQNQRGFYKNLTSSDRESNLNLDQAEDFWRSVWSESSRCNLEAAWLPHLMLSCEALPEMTMPDVTEVDVKAALDKAGNWKAPGVDKIHNFWLKRFKSTHRILANQFNQMIADPHLVPPFFTKGITFLIPKEQGASCPSKCRPITCLPTICKVFTSVLCENISKHLDVHKLIAEEQKGCAKGSRGCKEQLIIDTVGVKQAVHQKRNISTAYIDYKSAFDSISHSWLLQVLRLYKINPNVVLLLRTVMKNWSTKLSVSSQTSGEIPIRRGIFQGDSLSPLWFCLALNPLSHLLHESKYGFQVKHGILSKCTLSHLMYIDDIKLYAKDENQLRSLLDITIQFSRDIGMQLGLEKCRIKTIVRGKHTDNEGYSQNNIRIEGMDSDDVYKYLGILQATTPAVAIIKSKLLGEFERRLDLVLKTELYGKNKIIAINTFAIPVLLYTFGVIQWSNTDLEAVNRRVRVVLANNNMHNRAAEKLRITIPRHQGGRGVLDLKTLHYNQVHSLREFFYEKQSSSQIHQATVMADNKLSPLNLRSREWDPMSNVTSVQQKIDMWKEKPIHGGHIKNLLLSGIDIEASNKWLTNGVLFYETEAFLTSIQDASLPTKNYKRYILHDSSITNSSCRLCNCEEETIQHITSACRMLSGTEYTNRHNSVCKILHQNLALKYNLVATYHPYYKYTPQRILENDRVKLLWDHTIATDHSVNHNRPDLVLLLKEERACFIIDVAVPVDRNTVEKQHEKIRNYGPLADDMKQTWRLQKIEVVPVIISATGLVPQNLHKALKTLDLRAGLYMEMQKAVILATCAIVRRVLSGNNLP

SEQ ID NO: 14027 - protein, 1123 aa, Hermetia illucens
MPSTTRDGRPRRRMVWTNQLNEFIVRAYYRVTDLERNPSGYRHRLHDAFITRFPELSHVPEQNVVNQYRVIVNNNRVALPTRQQIFQEVSLELGLESSNYRTSQRSNTSTPPVRHSMNPVVRRSLVTGDVDPIYNEALTAFQVAFTEYAEILPDARPRIPKLKFTSATANIIAAVDRILADRLASEITATEVHSLIYVAAATVIRLHNQHLRANNRGMRRRTLPFWVFRLNKRVEKLRKEIGRVTQALLGNPSPRVHRCVANIIGNYHLSNDMPIEEILEVLKQKLAVCSNRIRRYQKSFQRRTDNTLFFQNQRGFYKNLINSGRESNLNLDQAEDFWRSVWSESSRCNLEAAWLPHLMRSCEALPEMTMPDVTEVDVKAVLDKAGNWKAPGVDKIHNFWLKRFKSTHRILANQFNQMIADPDLVPPFFTKGITFLIPKEQGVSCPSKCRPITCLPTIYKVFTSVLCANISKHLDVHKLIAEEQKGCAKGSRGCKEQLIIDTVAVKQAVHQKRNISTAYIDYKSAFDSISHSWLLQVLRLYKINPNVVLLLRTVMKNWSTKLSVSSQTSGEIPIRRGIFQGDSLSPLWFCLALNPLSHLLHESKYGFQVKHGILSKCALSHLMYIDDIKLYAKDENQLRSLLDITIQFSRDIGMQLGLEKCRIKTIVRGKHTDNEGYSQNNIRIEGMDSDDVYKYLGILQATTPAVAIIKSKLLGEFERRLDLVLKTELYGKNKIMAINTFAIPVLLYTFGVIQWSNTDLESVNRRVRVVLANNNMHNRAAEKLRITIPRHQGGRGVLDLKTMHYNQVHSLREFFYEKQSSSQVHQATVMADNKLSPLNLRSREWDPMSNVTSVQQKIDMWKEKPIHGGHIKNLLLSGIDIEASNKWLTNGVLFYETEAFLTSIQNASLPTKNYKRYILHDSSITNSSCRLCNCEEETIQHITSACRMLSGTEYTNRHNSVCKILHQNLALKYNLVATYHPYYKYTPQRILENDRVKLLWDHTIATDHSVNHNRPDLVLLLKEERACFIIDVAVPLDRNTVEKQHEKIRNYGPLADDMKQTWRLQKIQVVPVIISATGLVPQNSHKALKTLDLRAGLYMEMQKAVILATFAIVRRVLSGNNLT

SEQ ID NO: 14028 - protein, 906 aa, Hermetia illucens
MRRRTLPFWVFRLNKRVEKLRKEIGRVAQALLGNPSPRVHRCVANIIRNYHHSNDMPIEEILEVLKQKLAVCSNRIRRYQKSFQRRTDNTLFFQNQRGFYKNLTNSDRQSNLDLDQAEDFWRSVWSESSLCNLEAAWLPHLMRSCEALPEMTMPDIIEVDVEAALDKAGNWKAPGVDKIYNFWLKRFKSTHKILANQFNQMIADPDLVPPFFTKGITFLIPKEQGVSCPSKCRPITCLPTIYKVFTSVLCANISKHLDVHKLIAEEQKGCAKGSRGCKEQLIIDTVAVKQAVHQKRNISTAYIDYKSAFDSISHSWLLQVLRLYKINPNVVLLLRTVMRNWSTKLSVSSQTSGEIPIRRGIFQGVSLSPLSFCLALNPLSHLLHESKYGFQVKHGMLSKCTLSHLMYIDDIKLYAKDENQLRSLLDITIQFSRDIGMQLGLEKCRIKTIVRGKHADNEGYSQNNIRIEGMDSDDVYKYLGILQATTPAVAIIKSKLLGEFERRLDLVLKNELYGKNKIMAINTFAIPVLLYTFGVIQWSNTDLESVNRRVRVVLANNNMHNRAAEKLRITIPRHQGGRGVLDLKTLHYNQVHSLREFFYEKQSSSQIHQATVMADNKLSPLNLRSREWDPMSNVTSVQQKIDMWKEKPIHGGHIKNLLLSGIDIEASNKWLTNGVLFYETEAFLTSIQDASLPTKNYKRYILHDSSITNSSCRLCNCEEETIQHITSACRMLSGTEYTNRHNSVCKILHQNLALKYNLVASYHPYYKYTPQRILENDRVKLLWDYTIATDHSVNHNRPDLVLLLKEERACFIIDVAVPLDRNTVEKQHEKIRNYGPLADDMKQTWRLQKIQVVPVIISATRLVPQNLHKALKTLDLRAGLYMEMQKAVILATCAIVRRVLSGNNLT

SEQ ID NO: 14029 - protein, 1080 aa, Hermetia illucens
MPSTTRDGRPRRRMVWTNQLNEFIVRAYYRVTDLERNPSGYRYRLHDAFITRFPELSHVPEQNVVNQYRVIVNNNRVALPTRQQIFQEVSLELGLESSNYRTSQRSDTSTPPVRHSMNPVVRRSLVTGDVDPIYNEALTAFQVAFTEYAEILPDARPKIPKLKFTSATTNIIAAVHRILADRLASEITATEVHSLIYVAAATVIRLHNQHLRANNRGMRRRTLPFWVFRLNKRVEKLRKEIGRVTQALLGNPSPRVHRCVANIIENYHLSNDMPIEEILEVLKQKLAVCSNRISRYQKSFQRRTDNTLFFQNQRGFYKNLTNSSRESNLDLDQAEDFWRSVWSESSRCNLEAAWLPHLMRSCEALPEMTMPDVTEVDVKAALDKAGNWKAPGVDKIHNFWLKRFKSTHRILANQFNQMIADPDLVPPFFTKGITFLIPKEQGASCSSKCRPITCLPTIYKVFTSVLCANISKHLDVHKLIAEEQNGCAKGSRGCKEQLIIDTVAVKQAVHQKRNISTAYIDYKSAFDSISHSWLLQVLRLYKINPNVVLLLRTVMKNWSTKLSVSSQTSGEIPIRRGIFQGDSLSPLWFCLALNPLSHLLHESKYGFQVKHGILSKCTLSHLMYIDDIKLYAKDENQLRSLLDIIIQFSGDIGMQLGLEKCRIKTIVRGKHTDNEGYSQNNIRIEGMDSDDVYKYLGILQATTPAVAIIKSKLLGEFEQRLDLVLKTELYGKNKIMAINTFAIPVLLYTFGVIQWSNTDLESVNRRVRVVLANNNMHNRAAEKLRITIPRHQGGRGVLDLKTLHYNQVHSLREFFYEKQSSSQIHQATVMADNKLSPLNLRSREWDPMSNVTSVQQKIDMWKEKPIHGGHIKNLLLSGIDIEASNKWLTNGVLFYETEAFLTSIQDASLPTKNYKRYILHDSSITNSSCRLCNCEEETIQHITSACNMLSGTEYTNRHNSVCKILHQNLALKYNLVATYHPYYKYTPQRILENDRVKLLWDHTIATDHSVNHNRPDLVLLLKEERSCFIIDVAVPLDRNTVEKQHEKIRNYGPLADDMKQTWRLQKIEVVPVIISATGFT

SEQ ID NO: 14030 - protein, 906 aa, Hermetia illucens
MRRRTLPFWVFRLNKRVEKLRKEIGRVTQALLGNPSPRVHRCVANIIGNYHLSNEMPIEEILEVLKQKLAVCSNRIRRYQKSFQRRTDNTLFFQNQRGFYKNLINSGRESNLNLDQAEDFWRSVWSESSRCNLEAAWLPHLMRSCEALPEMTMPDVTEVDVKAVLDKAGNWKAPGVDKIHNFWLKRFKSTYRILANQFNQMIADPDLVPPFFTKGITFLIPKEQGVSCPSKCRPITCLPTIYKVFTSVLCANISKHLDVHKLIAEEQKGCAKGSRGCKEQLIIDTVAVKQAVHQKRNISTAYIDYKSAFDSISHSWLLQVLRLYKINPNVVLLLRTVMKNWSTKLSVSSQTSGEIPIRRGIFQGDSLSPLWFCLALNPLSHLLHESKYGFQVKHGILSKCTISHLMYIDDIKLYAKDENQLRSLLDITIQFSRDIGMQLGLEKCRIKTIVRGKHTDNEGYSQNNIRIEGMDSDDVYKYLGILQATTPAVAIIKSKLLGEFERRLDLVLKTELYGKNKIMAINTFAIPVLLYTFGVIQWSNTDLESVNRRVRVVLANNNMHNRAAEKLRITIPRHQGGRGVLDLKTLHYNQVHSLREFFYEKQSSSQIHQATVMADNKLSPLNLRSREWDPMSNVTSVQQKIDMWKEKPIHGGHIKNLLLSGIDIEASNKWLTNGVLFYETEAFLTSIQDASLPTKNYKRYILHDSSITNSSCRLCNCEEETIQHITSACRMLSGTEYTNRHNSVCKILHQNLALKYNLVATYHPYYKYTPQRILENDRVKLLWDHTIATDHSVNHNRPDLVLLLKEERACFIIDVAVPLDRNTVEKQHEKIRNYGPLADDMKQTWRLQKIQVVPVIISATGLVPQNLHKALKTLDLRAGLYMEMQKAVILATCAIVRRVLSGNNLT

SEQ ID NO: 14031 - protein, 1123 aa, Hermetia illucens
MPSTTRDGRPRRRMVWTSQFNEFIVRAYYRVTDLERNPSGYRHRLHDAFITRFPELSHIPEQNVVNQYRVIVNNNRVALPTRQQIFQEVSLELGLESSNYRTSQRSNTSTPPVRHSMNPVVRRSLVTGDVDPIYNEALTAFQVAFTEYAEILPDARPRIPKLKFTSATTNIIAAVDRILADRLASEITATEVHSLIYVAAATVIRLHNQHLRANNRGMRRRTLPFWVFRLNKRVEKLRKEIGRVTQALLGNPSPRVHRCVANIIGNYHLSNDMPIEEILEVLKQKLAVCSNRIRRYQKSFQRRADNTLFFQNQRGFYKNLINSGRESNLNLDQAEDFWRSVWSESSRCNLEAAWLPHLMRSCEALPEMTMPDVTEVDVKAVLDKAGNWKAPGVDKIHNFWLKRFKSTHRILANQFNQMIADPDLVPPFFTKGITFLIPKEQGVSCPSKCRPITCLPTIYKVFTSVLCANISKHLDVHKLIAEEQKGCAKGSRGCKEQLIIDTVAVKQAVHQKRNISTAYIDYKSAFDSISHSWLLQVLRLYKINPNVVLLLRTVMKNWSTKLSVSSQTSGEIPIRRGIFQGDSLSPLWFCLALNPLSHLLHESKYGFQVKHGILSKCTLSHLMYIDDIKLYAKDENQLRSLLDITIQFSRDIGMQLGLEKCRIKTIVRGKHTDNEGYSQNNIRIEGMDSDDVYKYLGILQATTPAVAIIKSKLLGEFERRLDLVLKTELYGKNKIMAINTFAIPVLLYTFGVIQWSNTDLESVNRRVRVVLANNNMHNRAAEKLRITIPRHQGGRGVLDLKTLHYNQVHSLREFFYEKQSSSQIHQATVMADNKLSPLNLRSREWDPMSNVTSVQQKIDMWKEKPIHGGHIKNLLLSGIDIEASNKWLTNGVLFYETEAFLTSIQDASLPTKNYKRYILHDSSITNSSCRLCNCEEETIQHITSACRMLSGTEYTNRHNSVCKILHQNLALKYNLVATYHPYYKYTPQRILENDRVKLLWDHTIATDHSVNHNRPDLVLLLKEERACFIIDVAVPLDRNTVEKQHEKIRNYGPLADDMKQTWRLQKIQVVPVIISATGLVPQNLHKALKTLDLRAGLYMEMQKAVILATCAIVRRVLSGNNLT

SEQ ID NO: 14032 - protein, 1123 aa, Hermetia illucens
MPSTTRDGRPRRRMVWTNQLNEFIVRAYYRVTDLERNPSGYRHRLHDAFITRFPELSHVPEQNVVNQYRVIVNNNRVALPTRQQIFQEVSLELGLESSNYRTSQRSDTSTPPVRHSMNPVVRRSLVTGDVDPIYNEALTAFQVAFTEYAEILPDARPKIPKLKFTSATTNIIAAVDRILADRLASEITATEVHSLIYVAAATVIRLHNQHLRANNRGMRRGTLPFWVFRLNKRVEKLRKEIGRVTQALLGNPSPRVHRCVANIIGNYHLSNDMPIEEILEVLKQKLAVCSNRIRRYQKSFQRRTDNTLFFQNQRGFYKNLTSSDRESNLNLDQAEDFWRSVWSESSRCNLEAAWLPHLMRSCEALPEMTMPDVTEVDVEAALDKAGNWKAPGVDKIHNFWLKRFKSTHRILANQFNQMIADPDLVPPFFTKGITFLIPKEQGASCPSKCRPITCLPTIYKVFTSVLCANISKHLDVHKLIAEEQKGCAKGSRGCKEQLIIDTVAVKQAVHQKRNISTAYIDYKSAFDSISHSWLLQVLRLYKINPNVVLLLRTVMKNWSTKLSVSSQTSGEIPIRRGIFQGDSLSPLWFCLALNPLSHLLHESKYGFQVKHGILSKCTLSHLMYIDDIKLYAKDENQLRSLLDITIQFSRDIGMQLGLEKCRIKTIVRGKHTDNEGYSQNNIRIEGMDSDDVYKYLGILQATTPAVAIIKSKLLGEFERRLDLVLKTELYGKNKIMAINTFAIPVLLYTFGVIQWSNTDLESVNRRVRVVLANNNMHNRAAEKLRITIPRHQGGRGVLDLKMMHYNQVHSLREFFYEKQSSSQIHQATVMADNKLSPLNLRSREWDPMSNVTSVQQKIDMWKEKPIHGGHIKNLLLSGIDIEASNKWLTNGVLFYETEAFLTSIQDASLPTKNYKRYILDDSSITNSSCRLCNCEEETIQHITSACRMLSGTEYTNRHNSVCKILHQNLAMKYNLVATYHPYYKYTPQRILENDRVKLLWDHTIATDHSVNHNRPDLVLLLKEERACFIIDVAVPLDRNTVEKQHEKIRNYGPLADDMKLTWRLQKIQVVPVIISATGLVPQNLHKALKTLDLRAGLYMEMQKAVILATCAIVRRVLSGNNLT

SEQ ID NO: 14033 - protein, 847 aa, Hermetia illucens
MRRRTLPFWVFRLNKRVEKLRKEIGRVTQALLGNPSPRVHRCVANIIGNYHLSNDMPIEEILEVLKQKLAVCSNRIRRYQKSFQRRTDNTLFFQNQRGFYKNLTSSDRESNLNLDQAEDFWRSVWSESSRCNLEAAWLPHLMRSCEALPEMTMPDVTEVDVKAVLDKAGNWKAPGVDKIHNFWLKRFKSTHRILANQFNQMIADPELVPPFFTKGITFLIPKEQGVSCPSKCRPITCLPTIYKVFTSVLCANISKHLDVHKLIAEEQKGCAKGSRGCKEQLIIDTVAVKQAVHQKRNISTAYIDYKSAFDSISHSWLLQVLRLYKINPNVVLLLRTVMKNWSTKLLVSSQTSGEIPIRRGIFQGDSLSPLWFCLALNPLFHLLHESKYGFQVKHGILSKCTLSHLMYIDDIKLYAKDENQLRSLLDITIQFSRDIGMQLGLEKCRIKTIVRGKHTDNEGYSQNNIRIEGMDSDDVYKYLGILQATTPAVAIIKSKLLGEFERRLDLVLKTELYGKNKIMAINTFAIPVLLYTFGVIQWSNTDLESVNRRVRVVLANNNMHNRAAEKLRITIPRHQGGRGVLDLKTLHYNQVHSLREFFYAKQSSSQIHQATVMADNKLSPLNLRSREWDPMSNVTSVQQKIDMWKEKPIHGGHIKNLLLSGIDIEASNKWLTNGVLFYETEAFLTSIQDASLPTKNYKQYILHDSSITNSSCRLCNCEEETIQHITSACRMLSGTEYTNRHNSVCKILHQNLALKYNLVATYHPYYKYTPQRILENDRVKLLWDHTIATDHSVNHNRPDLVLLLKEERACFIIDVAVPLDRNTVEKQHEKIRNYGSLADDMKQTWRL

SEQ ID NO: 14034 - protein, 1123 aa, Hermetia illucens
MPSTTRDGRPRRRMVWTNQLNEFIVRAYYRVTDLERNPSGYRHRLHDAFITRFPELSHVPEQNVVNQYRVIVNNNRVALPTRQQIFQEVSLELGLESSNYRTSQRSNTSTPPVRHSMNPVVRRSLVTGDVDPIYNEALTAFQVAFTEYAEILPDARPRIPKLKFTSATTNIIAAVDRILADRLASEITATEVHSLIYVAAATVIRLHNQHLRANNRGMRRRTLPFWVFRLNKRVEKLRKEIGRVTQALLGNPSPRVHRCVANIIGNYHLSNDMPIEEILEVLKQKLAVCSNRIRRYQKSFQRRTDNTLFFQNQRGFYKNLINSGRESNLNLDQAEDFWRSVWSESSRCNLEAAWLPHLMRSCEALPEMTMPDVTEVDVKAVLDKAGNWKVPGVDKVHNFWLKRFKSTHRILANQFNQMIADPDLVPPFFTKGITFLIPKEQGVSCPSKCRPITCLPTIYKVFTSVLCANISKHLDVHKLIAEEQKGCAKGSRGCKEQLIIDTVAVKQAVHQKRNISTAYIDYKSAFDSISHSWLLQVLRLYKINPNVVLLLRTVMKNWSTKLSVSSQTSGEIPIRRGIFQGDSLSPLWFCLALNPLSHLLHESKYGFQVKHGILSKCTLSHLMYIDDIKLYAKDENQLRSLLDITIQFSRDIGMQLGLEKCRIKTIVRGKHTDNEGYSHNNIRIEGMDSDDVYKYLGILQATTPAVAIIKSKLLGEFERRLDLVLKTELYGKNKIMAINTFAIPVLLYTFGVIQWSNTDLESVNRRVRVVLANNNMHNRAADKLRITIPRHQGGRGVLDLKTLHYNQVHSLREFFYEKQSSSQIHQATVMADNKLSPLNLRSREWDPMSNVTSVQQKIDMWKEKPIHGGHIKNLLLSGIDIEASNKWLTNGVLFYETEAFLTSIQDASLPTKNYKRYILHDSSITNSSCRLCNCEEETIQHITSACRMLSGTEYTNRHNSVCKILHQNLALKYNLVATYHPYYKYTPQRILENDRVKLLWDHTIATDHSVNHNRPDLVLLLKEERACFIIDVAVPLDRNTVEKQHEKIRNYGPLADDMKQTWRLQKIQVVPVIISATGLVPQNLHKALKTLDLRAGLYMEMQKAVILATCAIVRRVLSGNNLT

SEQ ID NO: 14035 - protein, 1115 aa, Hermetia illucens
MPSTTRDGRPRRRMVWTNQLNEFIVRAYYRVTDLERNPSGYRHRLHDAFITRFPELSHVPEQNVVNQYRVIVNNNRVALPTRQQIFQEVSLKLGLESSNYRTSQRSNTSTPPVRHSMNPVVRRSLVTGDVDPIYNEALTAFQVAFTEYAEILPDARPKIPKLKFTSATTNIIAAVDRILADRLASEITATEVHSLIYVAAATVIRLHNQHLRANNRGMRRRTLLFWVFRLNKRVEKLRKEIGRVTQALLGNPSPRVHRCIANIIGNYHLSNDMPIEEILEVLKQKLAVCSNRIRRYQKSFQRRTDNTLFFQNQRGFYKNLTSSDRESNFWRSVWSESSRCNLEAAWLPHLMRSCEALPEMTMPDVTEVDVKAVLDKAGNWKSPGVDKIHNFWLKRFKSTHRILANQFNQMIADPDLVPPFFTKGITFLIPKEQGVSCPSKCRPITCLPTIYKVFTSVLCVNISKHLDVHKLIAEEQKGCAKGSRGCKEQLIIDTVAVKQAVHQKRNISTAYIDYKSAFDSISHSWLLQVLRLYKINPNVVLLLRTVIKNWSRKLSVSSQTSGEIPIRRGIFQGDSLSPLWFCLALNPRSHLLHESKYGFQVKHGILSKCTLSHLMYIDDIKLYAKDENQLRSLLDITIQFSRDIGMQLGLEKCRIKTIVRGKHTDNEGYSPNNIRIEGMDSDDVYKYLGILQATTPAVAIIKSKLLGEFERRLDLVLKTELYGKNKIMAINTFAIPVLLYTFGVIQWSNTDLESVNRRVRVVLANNNMHNRAAEKWRITIPRHQGGRGILDLKTLHYNQVHSLREFFYEKQSSSQIHQATVMADNKLSPLNLRSREWDPMSNVTSVQQKIDMWKEKPIHGGHIKNLLLSGIDIEASNKWLTNGVLFYETEAFLTSIQDASLPTKNYKRYILHDSSITNSSCRLCNCEEETIQQITSACRMLSGTEYTNRHNSVCKILHQNLALKYNLVATYHPYYKYTPQRILENDRVKLLWDHTIATDHSVNHNRPHLVLLLKEERACFIIDVAVPLDRNTVEKQHEKIRNYGPLADDMKQTWRLQKIEVVPVIISATGLVPQNLHKALKTLDLRAGLYMEMQKAVILATCAIVRRVLSGNNLT

SEQ ID NO: 14036 - protein, 1095 aa, Hermetia illucens
MATLGLCYRVDCLPNTRRNKIGENNSNFFDGNPGTRRQHPTRLRVVQQHQSGSSPLDVLAVMPSTTRDGRPRRRMVWTNQLNEFIVRAYYRVTDLERNPSGYRHRLHDAFITRFPELSHVPEQNVVNVNNNRVALPTRQQIFQEVSLELGLESSNYRTSQRSNTSTPPVRHSMNPVVRKSLVTGDVDPIYNEALIAFQVAFTEYVEILPDARPKIPKLKFTSATTNIIAAVDRILADRLASEITVTEVHSLICVIRLHNQYLRANNRGMRRGTLPFWVFRLNKRVEKLRKEIGRVTQALLGNPSPRVHRCVVNIIGNYHLSNDTPIEEILEVLKQKLAVCSNRIRRYQKSFQRRTDNTLFFQNQRGFYKNLTNSHRESNLDLDQAEDFWRSVWSESSRCNLEAAWLPNLMRSCEALPEMTMPDVTEVDVKAALDKTGNWKAPGVDKIHNFWLKRFKSTHRILTNQFNQMIADPDLVPPFFTKGITFLIPNEQGVSCPSKCRPITCLPTIYKVFTSVLCANISKHLDVHKLIAEEQKGCAKGSRGCKEQLIIDTAAVKEAVHQKRNISTAYIDYKSAFDSISHSWLLQVLRLYKINPNVVLLLRTVMKNWSTKLSVSSQTSGEIPIRRGIFQGDSLSPLWLCLALNPLSHLLHESKYGFQVKHGILSKCTLSHLMYIDDIKLYAKDENQRNRSLLDITIQFSRDIGMQSGLEKCRIKTIVRGKHTDNEGYSQNNIRIEGMDSDDVYKYLGILQATTPAVAIIKSKLLGEFERRLDLVLKIELYGKNKIMAINTFAIPVLLYTFGVIQWSNTDLESVNRRVRVVLANNNMHNRAAEKLRITIPRHPGGRGALDLKPLHYNQVHSLPEFFYEKQSSSQIHQATVMADNKLSPLNLRSREWNPISNVTSVQQKIDMWKEKPIHGGHIKNLLLSGIDIEASNKCLTNGVLFYETEAFLTSIQDASLPTKNYKRYILHDSSITNSSCRLCNCEEETIQHITSACRMLSSTEYTNCHNSVCKILHQNLALKYNLVAAYYPYYKYTPQRILKNDLVKLLWDHTIATDQSVNQNRPDLVLLLKEERACFIIDVAVPLDRNTVEK

SEQ ID NO: 14037 - protein, 1123 aa, Hermetia illucens
MPSTTRDGRPRRRMVWTSQLNEFIVRAYYRVTDLERNPSGYRHRLHDAFITRFPELSHVPEQNVVNQYRVIVNNNRVALPTRQQIFQEVSLELGLESSNYRTSQRSNTSTPPVRHSMNPVVRRSLVTGDVDPIYTEALTAFQVAFTEYAEILPDARPRIPKLKFTSATTNIIAAVDRILADRLASEITATEVHNLIYVAAATVIRLHNQHLRANNRGMRRRTLPFWVFRLNKRVEKLRKEIGRVTQALLGNPSPRVHRCAANIIGNYHLSNDMPIEEILEVLKQKLAVCSNRIRRYQKSFQRRTDNTLFFQNQRGFYKNLINSGRESNLNLDQAEDFWRSVWSESSRCNLEAAWLPHLMRSCEALPEMTMPDVTEVDVKAVLDKAGNWKAPGVDKIHNFWLKRFKSTHRILANQFNQMIADPDLVPPFFTKGITFLIPKEQGVSCPSKCRPITCLPTIYKVFTSVLCANISKHLDVHKLIAEEQKGCAKGSRGCKEQLIIDTVAVKQAVHQKRNISTAYIDYKSAFDSISHSWLLQVLRLYKINPNVVLLLRTVMKNWSTKLSVSSQTSREIPIRRGIFQGDSLSPLWFCFSLNPLSHLLHESKYGFQVKHGILSKRTLSHLMYIDDIKLYAKDENQLRSLLDITIQFSRDIGMQLGLEKCRIKTIVRGKHTDNEGYSQNNIRIEGMDSDDVYKYLGILQATTPAVAIIKSKLLGEFERRLDLVLKTELYGKNKIMAINTFAIPVLLYTFGVIQWSNTDLESVNRRVRVVLANNNMHNRAAEKLRITIPRHQGGRGVLDLKTLHYNQVHSLREFFYEKQSSSQIHQATVMADNKLVPLNLRSREWDPMSNVTSVQQKIDMWKEKPIHGGHIKNLLLSGIDIEASNKWLTNGVLFYETEAFLTSIQDASLPTKNYKRYILHDSSITNSSCRLCNCEEETIQHITSACRMLSGTEYTNRHNSVCKILHQNLALKYNLVATYHPYYKYTPQRILENDRVKLLWDHTIATDHSVNHNRPDLVLLLKEERVCFIINVAVPLDRNTVEKQHEKIRNYGPLADDMKQTWRLQKIQVVPVIISATGLVPQNLHKALKTLDLRARLYMEMQKAVILATCAIVRRVLSGNNLT

SEQ ID NO: 14038 - protein, 880 aa, Hermetia illucens
MGRRTLPFWVFRLNKRVEKLRKEIGRVTQPLLGNPSPRVHRCVANIIGHYHLSNDMPIEEILEVLKQKLAVCSNRIRRYQKSFQRRTDNTLFFQNQRGFYKNLTDSDRESNLDLNSIASGRCNLEAAWLPHLVRSCEALPEMTMPDVTEVDVEAALGKAGNWKAPGLDKIHNFWLKRFKSTHRILANQFNQMIADPDLVQPFFTKGITFLIPKEQGATCPSKCRPTTCLPTIYKVFTSVLCANISKHLDVHKLIAKEQKGCAKGSRGCEEQLIIDTVAVKQVVHQKRNILTAYIDYKSAFDSISHSLLLQVLRLYKINPNVVLLLRTVMKNWSTKLSVSSQTSGEIPIRRGIFQGDSLSPLWFCLALNPLSHLLHESKYGFQVKHGILSKCTLSHLMYIDDIKLYAKDENQLRSLLDITSMQLGLEKCRIKTIVRGKHTDNEGYSQNNIRIEGMDSDDVYKYLGILQATTPDVAIIKSKLLGEFERRLDLVRKTELYGKNKIMAINTFAILVLLYTFGVIQWSNTDLESVNRRVRVVLANNNMHNRGAEKFRITIPRHQGGRRVLDLKTFHYNQVHSLHEFFYEKQSSSQIHQATVMADNKLSPLNLRSREWDPMSNVTSVQQKIDMWKEKPIHGGHIKNLLLSGIDIEASNKWLTNGVLFYETEAFLTSIQDASLPTKNYKRYILHHFSITNSSCRLCNCMCRMLSSTEYTNRHNSVCKIHHQNLALKYNLVATHHPYYKYTPQRILENDRVKLLWDHTIATDHSVNHNRPDLVLLLKEERACFIIDVAVPLDRNTVEKQHEKIRNYGPLTDDMKQTWRLQKIEVVPVVISVTGLVPQNLHKALKTLDLRAGLYMEMQKAVILATCAIVRRVLSGNNLT

SEQ ID NO: 14039 - protein, 892 aa, Hermetia illucens
MRRRTLPFWVFRLNKRVEKLRKEIGRVTQALLGNPSPRVHRCIANIIGNYHLSNDMPIEEILEMLKQKLAVCSNRIRRYQKSFQRRTDNTLFFQNQRGFYKNLTNSSRESNLDLDQAEDFWRSVWSESSRCNLEAAWLPHLMRSCEALPEMTMPDVTEVDVEAALDKAGNWKAPGVDKIHNFWLKRFKSTHRILANQFNQMIADPDLVPPFFTKGITFLIPKEQGVSCPSKCRPITCLPTIYKVFTAVLCANISEHLDVHKLIAEEQKLIIDTVAVKQAVHQKRNISTAYIDYKSAFDSISHSWLLQVLRLYKINPNVVLLLRTVMKNWSTKLSVSSQTSGEIPIRRGIFQGDSLSSLWFCLALNPLSHLLHESKYGFQVKHGILSKCTLSHLMYIDDIKLYAKDENQLRSLLDITIQFSRDIGMQLGLEKCRIKTIVRGKHTDNEGYSQNNIRIEGMDSDDVYKYLGILQATTPAVAIIKSKLLREFEWRLDLVLKTELYGKNKIMAINTFAISVLLYTFGVIQWSNTDLEAVNRRVRVVLANNNMHNRAADKLRITIPRHQGGRGVLDLKTLHYNQVHSLREFFYEKQSSSQIHQTTVMAGNKLSPLNLRSREWDPMSNVTSVQQKMWKAKPIHGGHIKNLLLSDIDIEASNKWLTNGVLFYETEAFLTSIQDASLPTKNYKRYILHDSSITNSSCRLCNCEEKTIQHITSACRMLSSTEYTNRHNSVCKILHQNLALKYNLVATYHPYYKYTPQRILENDRVKLLWDHTFATDHSVNHNRPDLVLLLKEERACFIIDVAVPLDRNTVEKQHEKIRNYGPLADDRKQTWRLQKIEVVPVVISAAGLVPQNLHKALKTFDLRAGLYMEMQKAVILAICAIVRRVLSGNNLT

SEQ ID NO: 14040 - protein, 1007 aa, Hermetia illucens
MNPVVRRSLVTGDVDPIYNEALTAFQVAFTEYAEILPDARPKIPQLKFTSATTNIIAAVDRILADRLASETTATEVHSLIYVAAATVIRLHNQHLRANNRGMRRWTLPFWVFRLNKRVEKLTKEIGRVTQALLGNPSPRVHRCVANIIGNYHLSNDMPIEEILEVLKQKLAVCSNRIRRYQKSFQRKTDNTLFFQNQRGFYKNLINSGRESNLNLDQAEDFWRSVWSESSRCNLEAAWLPHLMRSCEAFPEMTMPDVTEVNVKAALDKAGNWKAPGVDKIHNFWLKRFKSTHRILANQFNQMIADPDLVPPFFTKGITFLIPKEQGVSCPSKCRPITCLPTIYKVFTSVLSANISKHLDVHKLIAEEQKGCAKGSRGCKEQLIIDTVAVKQAVHQKRNISTAYIDYKSAFDSISHSWLLQVLRLYKINPNVVLLLRTVMKNWSTKLSVSSQTSGEIPIRRGISQGDSLSPLWFCLALNPLSHLLHESKYGFQVKHGILSKCTLSHLMYIDDIKLYAKDENQLRSLLDITIQFSRDIGMQLGLEKCRIKTIVRGKHTDNEGYSQNNIRIEGMDSDDVYKYLGILQATTPAVAIIKSKLLGEFERRLDLVLKTELYGKNKIMAINTFAIPVLLYTFGVIQWSNTDLESVNRRVRVVLANNNMHNRAAEKLRITIPRHQGGRRVLDLKTMHYNQVHSLREFFYEKQSSSQIHQATVMADNKLSPLNLRSREWDPMSNVTSVQQKIDMWKEKPIHGGHIKNLLLSGIDIEASNKWLTNGVLFYETEAFLTSIQDASLPTKNYKRYILHDSSITNSSCRLCNCEEESIQHITSACRMLSGTEYINRHNSVCKILHQNLALKYNLVATYHPYYKYTPQRILGNDQVKLLWDHTIATDHSVNHNRPDLVLLLKEERACFIIDVAVPLDRNTVEKQDGKIRNYGPLADDMKQTWRLQKIQVVPVIISATGLVPQNLHKALKTLDLRAGLYMEMQKAVILATCAIVRRVLSGNNLT

SEQ ID NO: 14041 - protein, 1108 aa, Hermetia illucens
MPSTTRDGRPRRRMVWTNQLNEFIVRAYYRVTDLERNPSGYRHRLHDAFITRFSELSHVPEQNVVNQYRVIVNNNRVALPTRQQIFQEVSLELGLESSNYRTSQRSNTSTPPVRHSMNPVVRRSLVTGDVDPIYNEALTAFQVAFTEYAEILPDARPRIPKLKFTSATTNIIAAVDRILADRLASEITATEVHSLIYVAAATVIRLHNQHLRANNRGMRRRTLPFWVFRLNKRVEKLRKEIGRVTQALLGNPSPRVHRCVANIIGNYHLSNDMPIEEILEVLKQKLAVCSNRIRRYQKSFQRRTDNTLFFQNQRGFYKNLINSGRESNLNLDQAEDFWRSVWSESSRCNLEAAWLPHLMRSCEALPEMTMPDVTEVDVKAVLDKAGNWKAPGVDKVHNFWLKRFKSTHRILANQFNQMIADPDLVPPFFTKGITFLIPKEQGVSCPSKCRPITCLPTIYKVFTSVLCANISKHLDVHKLIAEEQKGCAKGSRGCKEQLIIDTVAVKQAVHQKRNISTAYIDYKSAFDSISHSWLLQVLRLYKINPNVVLLLRTVMKNWSTKLSVSSQTSGEIPIRRGIFQGDSLSPLWFCLALNPLSHLLHESKYGFQVKHGILSKCTLSHLMYIDDIKLYAKDENQLRSLLDITIQFSRDIGMQLGLEKCRIKTIVRGKHTDNEGYSQNNIRIEGMDSDDVYKYLGILQATTPAVAIIKSKLLGEFERRLDLVLKTELYGKNKIMAINTFAIPVLLYTFGVIQWSNTDLESVNRRVRVVLANNNMHNRAAEKLRITIPRHQGGRGVLDLKTLHYNQVHSLREFFYEKQSSSQIHQATVMADNKLSPLNLRSREWDPMSNVTSVQQKIDMWKEKPIHGGHIKNLLLSGIDIEASNKWLTNGASLPTKNYKRYILHDSSITNSSCRLCNCEEETIQHITSACRMLSGTEYTNRHNSVCKILHQNLALKYNLVATYHPYYKYTPQRILENDRVKLLWDHTIATDHSINHNRPDLVLLLKEERACFIIDVAVPLDRNTVEKQHEKIRNYGPLADDMKQTWRLQKIQVVPVIISATGLVPQNLHKALKTLDLRAGLYMEMQKAVILATCAIVRRVLSGNNLT

SEQ ID NO: 14042 - protein, 1168 aa, Hermetia illucens
MCSATDDLMHDFCFRTLYIYIYIRRQYPTRLRVVQQHQSGSSPLDVLAVMPSTTRDGRPRRRMVWTNQLNEFIVRAYYRVTDLERNPSGYRHRLHDAFITRFPELSHVPEQNVVNQYRVIVNNNRVALPTRQQIFQEVSLELGLESSNYRTSQRSNTSTPPVRHSMNPVVRRSLVTGDVDPIYNEALTAFQVAFTEYAEILPDARPRIPKLKFTSATTNIIAAVDRILADRLASEITATEVHSLIYVAAASVIRLHNQHLRANNRGMRKRTLPFWVFRLNKRVEKLRKEIGRVTQALLGNPSPRVHRCVANIIGNYHLSNDMPIEEILEVLKQKLAVCSNRIRRYQKSFQRRTDNTLFFQNQRGFYKNLINSGRESNLNLDQAEDFWRSVWSESSRCNLEAAWLPHLMRSCEALPEMTMPDVTEVDVKAVLDKAGNWKAPGVDKIHNFWLKRFKSTHRILANQFNQMIADPDLVPPFFTKGITFLIPKEQGVSCPSKCRPITCLPTIYKVFTSVLCANISKHLDVHKLIAEEQKGCAKGSRGCKEQLIIDTVAVKQAVHQKRNISTAYIDYKSAFDSISHSWLLQVLRLYKINPNVVLLLRTVMKNWSTKLSVSSQTSGEIPIRRGIFQGDSLSPLWFCLALNPLSHLLHESKYGFQVKHGILSKCTLSHLMYIDDIKDENQLRSLLDITIQFSRDIGMQLGLEKCRIKTIVRGKHTDNGGYSQNNIRIEGMDSDDVYKYLGILQATTSAVAIIKSKLLGEFERRLDLVLKTELYGKNKIMAINTFAIPVLLYTFGVIQWSNTDLESVNRRVRVVLANNNMHNRAAEKLRITIPRHQGGRGVLDLKTLHYNQVHSLREFFYKKQSSSQIHQATVMADNKLSPLNLRSREWDPMSNVTSVQQKIDMWKEKSIHGGHIKNLLLSGIDIEASNKWLTNGVLFYETEAFLTSIQDASLPTKNYKRYILHDSSITNSSCRLCNCEEETIQHITSACRMLSGTEYTNRHNSVCKILHQNLALKYNLVATYHPYYKYTPQRILENDRVKLLWDHTIVTDHSVNHNRPDLVLLLKEERACFIIDVAVPLDRNTVEKQHEKIRNYGPLADGMKQTWRLQKIQVVPVIISATGLVPQNLHKALKTLDLRAGLYMEMQKAVILATCAIVRRVLSGNNLT

SEQ ID NO: 14043 - protein, 791 aa, Hermetia illucens
MRRRTLPFWVFRLNKRVEKLRKEIGRVTQALLENPSPRVHRCVANIIGNYHLSNDMPIEEILEVLKQKLAVCSNCIRRYQKSFQRGTDNTLFFQNQRGFYKNLINSGRESNLNLDQAEDFWRSVWSESSRCNLEAAWLPHLMRSCEALPEMTMPDVTEVDVKAVLDKAGNWKAPGVDKIHNFWLKRFKSTHRILANQFNQMIADPDLFPPFFTKGITFLIPKEQGVSCPSKCRPITCLPTIYKVFTSVLCANLSKHLDVHKLIAEEQKGCAKGSRGCKEQLIIDTVAVKQAVCQKRNISTAYIDYRSAFDSISHSWLLQVLRLYKINPNVVLLLRTVMKNWSTKLSVSSQTSGEIPIRRGIFQGDSLSPTSLLAGYHQLLLGEFERRLDLVLKTELYGKNKIMAINTFAIPVLLYTFSVIQWSNTDLESVNRRVRVVLANNNMHNRAAEKLRITIPHHQGGRGVLDLKTMHYNQVHSLREREKHEKQSSSQIHEATVMADNKLFPLNLRSREWDPMSNVTSVQQKIDMWKEKPIHGGHIKNLLLSGIDIEASNKWLTNGVLFYETEAFLTSIQDASLPTKNYKRYILHDSSITNCSCRLCNCEEETIQHITSACRMLSSTEYTNRHNSVCKILHQNLALKYNLVPTYHPYYKYTPQRILENDRVKLLWDHTIATDHSVNHNRPDLVLLLKEERACFIIDVAEPLDRNTVEKQHEKIRNYGPLADDMKQTWRLQKIQVVPVIISATGLVSQNLHKALKTLDLRAGLYMEMQKAVILATCAIVRRVLSGNNLT

SEQ ID NO: 14044 - protein, 1122 aa, Hermetia illucens
MPSTTRDGRPRRRMVWTNQLNEFIVRAYYRVTDLERNPSGYRHRLHDAFITRFPELSHVPEQNVVNQYRVIVNNNRVALPTRQQIFQEVSLELGLESSNYRTSQRSNTSTPPVRHSMNPVVRRSLVTGDVDPIYNEALTAFQVAFTEYAEILPDARPRIPKLKFTSATTNIIAAVDRILADRLASEITATEVHSLIYVAAATVIRLHNQHLRANNRGMRRRTLPFWVFRLNKRVEKLRKEIGRVTQALLGNPSPRVHKCIANIIGNYHLSNDMPIEEILEVLKQKLAVCSNRIRRYQKSFQRRTDNTLFFQNQRGFYKNLINSGRESNLNLDQAEDFWRSVWSESSRCNLEAAWLPHLMRSCEALPEMTMPDVTEVDVKAVLDKAGNWKAPGVDKIHNFWLKLFKSTHRILANQFNQMIADPDLVPPFFTKGITFLIPKEQGVSCPSKCRPITCLPTIYKVFTSVLCANISKHLDVHKLIAEEQKRCAKGSRGCKEQLIIDTVAVKQAVHQKRNISTAYIDYKSAFDSISHSWLLQVLRLYKINPNVVLLLRTVMKNWSTKLSVSSQTSGEIPIRRGIFQGDSLSPLWFCLALNPLSHLLHESKYGFQVKHGILSKCTLSHLMYIDDIKLYAKDENQLRSLLDITIQFSRDIGMQLGLEKCRIKTIVRGKHTDNEGYSQNNIRIEGMDSDDVYKYLGILQATTPAVAIMKSKLLGEFERRLDLVLKTELYGKNKIMAINTFAIPVLLYTFGVIQWSNTDLEAVNRRVRVVLANNMHNRAAEKLRITIPRHQGGRGVLDLKTLHYNQVHSLREFFYQKQSSSQIHQATVMADNKLSPLNLRSREWDPMSNVTSVQQKIDMWKEKPIHGGHIKNLLLSGIDIEASNKWLTNGVLFYETEAFLTSIQDASLPTKNYKRYILHDSSITNSSCRLCNCEEETIQHITSACRMLSGTEYTNRHNSVCKILHQNLALKYNLVATYHPYYKYTPQRILENDRVKLLWDHTIATDHSVNHNRPDLVLLLKEERACFIIDVAVPLDRNTVEKQHEKIRNYGPLADDMKQTWRLQKIQVVPVIISATGLVPQNLHKALKTLDLRAGLYMEMQKAVILATCAIVRRVLSGNNLT

SEQ ID NO: 14045 - protein, 1061 aa, Hermetia illucens
MPSIRMLFWLYPSLSVCFPRTIVFMRHFSKPNCMPISLLNWMVMSSKERSWFSSLAYNLMSSMYIKWLNVHFDNMPCLTWNPYLLSCKRWDSGFKAKQNHSGLSATTNIIAAVDRILADRLASEITATEVHSLIYVAAATVIRLHNQHLRANNRGMRRRTLPFWVFRLNKRVEKLRKEIGRVTQALLGNPSPRVHRCVANIIGNYHLSNDMPIEEILEVLKQKLAVCSNRIRRYQKSFQRRTDNTLFFQNQRGFYKNLINSGRESNLNLDQAEDFWRSVWSESSRCNLEAAWLPHLMRSCEALPEMTMPDVTEVDVKAVLDKAGNWKAPGVDKIHNFWLKRFKSTHRILANQFNQMIADPDLVPPFFTKGITFLIPKEQGVSCPSKCRPITCLPTIYKVFTSVLCANISKHLDVHKLIAEEQKGCAKGSRGCKEQLIIDTVAVKQAVHQKRNISTSYIDYKSAFDSISHSWLLQVLRLYKINPNVVLLLRTVMKNWSTKLSVSSQTSGEIPIRRGIFQGDSLSPLWFCLALNPLSHLLHESKYGFQVKHGILSKCTLSHLMYIDDIKLYAKDENQLRSLLDITIQFSRDIGMQLGLEKCRIKTIVRGKHTDNEGYSQNNIRIEGMDSDDVYKYLGILQATTPVVAIIKSKLLGEFERRLDLVLKTELYGKNKIMAINTFAIPVLLYTFGVIQWSNTDLESVNRRVRVVLANNNMHNRAAEKLRITIPRHQGGRGVLDLKTMHYNQVHSLREFFYKKQSSSQIHQATVMADTKLSPLNLRSREWDPMSNVTSVQQKIDMWKEKPIHGGHIKNLLLSGIDIEASNKWLTNGVLFYETEAFLTSIQDASLPTKNYKRYILHDSSITNSSCRLCNCEEETIQHITSACRMLSGTEYTNRHNSVCKILHQNLALKYNLVATYHPYYKYTPQRILENDRAKLLWDHTIATDHSVNHNRPDLVLLLKEERACFIIDVAVPLDRNTVEKQHEKIRNYGPLADDMKQTWRLQKIQVVPVIISATGLVPQNLHKALKTLDLRAGLYMEMQKAVILATCAIVRRVLSGNNLT

SEQ ID NO: 14046 - protein, 1125 aa, Hermetia illucens
MPSTTRDGRPRRRMVWTSQLNEFIVRAYYRVTDLERNPSGYRHRLHDAFITRFPELSHVPEQNVVNQYRVIVNNNRVALPTRQQIFQEVSLELGLESSNYRTSQRSNTSTLPVRHSMNPVVRRSLVTGDVDPIYNEALTAFQVAFTEYAEILPDARPRIPKLKFTSATTNIIAAVDRILADRLASEITATEVHSLIYVAAATVIRLHNQHLRANNRGMRRGTLPFWVFRLNKRVEKLRKEIGRVTQALLGNPSPRMHRCVANIIGNYHLSNDMPIEEILEVLKLKLAVCSNRIRRYQKSFQRRTDNTLFFQNQRGFYKNLINSGRESNLNLDQAEDFWRSVWSESSRCNLEAAWLPHLMRSCEALPEMTMPDVTEVDVKAVLDKAGNWKAPGVDKIHNFWLKRFKSTHRILANQFNQMIADPDLVPPFFTKGITFLIPKEQGVSCPSKCRPITCLPTIYKVFTSVLCANISKHLDVHKLIAEEQKGCAKGSRGCKEQLIIDTVAVKQAVHQKRNISTAYIDYKSAFDSISHSWLLQVLRLYKINPNVVLLLRTVMKNWSTKLSVSSQTSGEIPIRRGIFQGDSLSPLWFCLALNPLSHLLHESKYGFQVKHGILSKCTRTLSHLMYIDDIKLYAKDENQLRSLLDITIQFSRDIGMQLGLEKCRIKTIVRGKHTDNEGYSQNNIRIEGMDSDDVYKYLGILQATTHAVAIIKSKLLGEFERRLDLVLKTELYGKNKIMAINTFAIPVLLYTFGVIQWSNTDLESVNRRVRVVLANNNMHNRAAEKLRITIPRHQGGRGVLDLKTLHYNQVHSLREFFYEKQSSSQIHQATVMADNKLSPLNLRSREWDPMSNVTSVQQKIDMWKEKPIHGGHIKNLLLSGIDIEASNKWLTNGVLFYETEAFLASIQDASLPTKNYKRYILHDSSITNSSCRLCNCEEETIQHITSACRMLSGTEYTNRHNSVCKILHQNLALKYNLVATYHPYYKYTPQRILENDRVKLLWDHTIATDHSVNHNRPDLVLLLKEERACFIIDVAVPLDRNTVEKQHEKIRNYGPLADDMKQTWRLQKIQVVPVIISATGLVPQNLHKALKTLDLRAGLYMEMQKAVILATCAIVQRVLSGNNLT

SEQ ID NO: 14047 - protein, 1094 aa, Hermetia illucens
MPSTTRDGRPRRRMVWTNQLNEFIVRAYYRVTDLERNPSGYRQRLHDAFITRFPELSHVPEQNVVNQYRMIVNNNRVALPTRQQIFQEVSLELGLESSNYRTSQRSNTSTPPVRHSMNPVVRRSLVTGDVDPIYNEALTAFQVAFTEYVEILPDARPRIPKLKFTSATANIIAAVDRILADRLASEITATEVHSLIYVAAATVIRLHNQHLRANNRGMRRRTLPFWVFRLNKRVEKLRKEIGRVTQALLGNPSPRVHRCVANIIGNYHLSNDMPIEEILEVLKQKLVVCSNRIRRYQKSFQRRTDNTLFFQNQRGFYKNLINSGRESNLNLDQAEDFWRSVWSESSRCNLEAAWLPHLMRSCEALPEMTMPDVTEVDVKAVLDKAGNWKAPGVDKIHNFWLKRFKSTHRILANQFNQMIADPDLVPPFFTKGITFLIPKEQGVSCPSKCRPITCLPTIYKVFTSVLCENISKHLDVHKLIAEEQKGCAKGSRGCKEQLIIDTVAVKQAVHQKRNISTAYIDYKSAFDSISHSWLLQVLRLYKINPNVVLLLRTVMKNWSTKLSVSSQTSGEIPIRRGIFQGDSLSPLWFCLALNPLSHLLHESKYGFQVKHGILSKCALSHLMYIDDIKLYAKDENQLRSLLDITIQFSRDIGMQLGLEKCRIKTIVRGKHTDNEGYSLIKSKLLGEFERRLDLVLKTELYGKNKIMAINTFAIPVLLYTFGVIQWSNTDLESVNRRVRVVLANNNMHNRAAEKLRITIPRHQGGRGVLDLKTMHYNQVHSLREFFYEKQSSSQIHQATVMADNKLSPLNLRSREWDPMSNVTSVQQKIDMWKEKPIHGGHIKNLLLSGIDIEASNKWLTNGVLFYETEAFLTSIQDASLPTKNYKRYILHDSSITNSSCRLCNCEEETIQRITSVCRMLSGTEYTNRHNSVCKILHQNLALKYNLVATYHPYYKYTPQRILENDRVKLLWDHTIATDYSVNHNRPDLVLLLKEERACFIIDVAVPLDRNTVEKQHEKIRNYGPLADDMKQTWRLQKIKVVPVIISATGLVPQNLHKALKTLDLRAGLYMEMQKAVILATCAIVRRVLSGNNLT

SEQ ID NO: 14048 - protein, 1108 aa, Hermetia illucens
MPSTTRDGRPRRRMVWTNQLNEFIVRAYYRVTDLERNPPGYRHRLHDAFITRFPELSHVPEQNVVNQYRVIVNNNRVALPTRQQIFQEVSLELGLESSNYRTSQRSNTSTPPVRHSMNPVVRRSLVTGDVDPIYNEALTAFQVAFTEYAEILPDARPRIPKLKFTSATTNIIAAVDRILADRLASEITATEVHSLIYVAAATVIRLHNQHLRANNRGMRRRTLPFWVFRLNKRVEKLRKEIGRVTQALLGNPSPRVHRCVANIIGNYHLSNDMPIEEILEVLKQKLAVCSNRIRRYQKSFQRRTDNTLFFQNQRGFYKNLINSGRESNLNLDQAENFWRSVWSESSRCNLEAAWLPHLMRSCEALPEMTMPDVTEVDVKAVLDKAGNWKAPGVDKIHNFWLKRFKSTHRILANQFNQMIADPDLVPPFFTKGITFLIPKEQGVSCPSKCRPITCLPTIYKVFTSVLCANISKHLDVHKLIAEEQKGCAKGSRGCKEQLIIDTVAVKQAVHQKRNISTAYIDYKSAFDSISHSWLLQVLRLYKINPNVVLLLRTVMKNWSTKLSVSSQTSGEIPIRRGIFQGDSLSPLWFCLALNPLSHLLHESKYGFQVKHGILSKCTLSHLMYIDDIKLYAKDENQLRSLLDITIQFSRDIGMQLGLEKCRIKTIVRGKHTDNEGYSQNNIRIEGMDSDDVYKYLGILQATTPAVAIIKSKLLGEFERRLDLVLKTELYGKNKIMAINTFAIPVLLYTFGVIQWSNTDLESVNRRVRVVLANNNMHNRAAEKLRITIPRHQGGRGVLDLKTLHYNQVHSLREFFYEKQSSSQIHQATVMADNKLSPLNLRSREWDPMSNVTSVQQKIDMWKEKPIHGGHIKNLLLSGIDIEASNKWLTNGVLFYETEAFLTSIQDASLPTKNYKRYILHDSSITNSSCRLCNCEEETIQHITSACRMLSGTEYTNRHNSVCKILHQNLALKYNLVATYHPYYKYTPQRILENDRVKLLWDHTIATDHSVNHNYLVLLLKEERACFIIDVAVPLDRNTVEKQHEKIRNYGPLADDMKQTWRLQKIQVVPVIISATGLVPQNLHKALKTLDVRAGLYNCKKQLSLQPVL

SEQ ID NO: 14049 - protein, 1117 aa, Hermetia illucens
MPSTTRDGRPRRRMVWTNQLNEFIVRAYYRVTDLERNPSGYRHRLHDAFITRFPELSHVPEQNVVNQYRVIVNNNRVALPTRQQIFQEVSLELGLESSNYRTSQRSNTSTPPVRHSMNPVVRRSLVTGDVDPIYNEALTAFQVAFTEYAEILPDARPRIPKLKFTSATTNIIAAVDRILADRLASEITATEVHSLIYVAAATVIRLHNQHLRANNRGMRRRTLPFWVFRLNKRVEKLRKEIGRVTQALLGNPSPRVHRCVANIIGNYHLSNDMPIEEILEVLKQKLAVCSNRIRRYQKSFQRRTDNTLFFQNQRGFYKNLINSGRESNLNLDQAEDFWRSVWSESSRCNLEAAWLPHLMRSCEALPEMTMPDVTEVDVKAVLDKAGNWKAPGVDKIHNFWLKRFKSTHRILANQFNQMIADPDLVPPFFTKGITFLIPKEQGVSCPSKCRPITCLPTIYKVFTSVLCANISKHLDVHKLIAEEQKGCAKGSRGCKEQLIIDTVAVKQAVHQKRNISTAYIDYKSAFDSISHSWLLQVLRLYKINPNVVLLLRTVMKNWSTKLSVSSQTSGEIPIRRGIFQGDSLSPLWFCLALNPLSHLLHESKYGFQVKHGILSKCTLSHLMYIDDIKLYAKDENQLRSLLDITIQFSRDIGMQLGLEKCRIKTIVRGKHTDNEGYSQNNIRIEGMDSDDVYKYLGILQATTPAVAIIKSKLLGEFERRLDLVLKTELYGKNKIMAINTFAIPVLLYTFGVIQWSNTDLESVNRRVRVVLANNNMHNRAAEKLRITIPRHQGGRGVLDLKTMHYNQVHSLREFFYKKQSSSQIHQATVMADNKLSPLNLRSREWDPMSNVTSVQQKIDMWKEKPIHGGHIKNLLLSGSDIEASNKWLTNGVLFYDTEAFLTSIQDASLPTKNYKRYILHDSSITNSSCRLCNCEEETIQHITSACRMLSSAEYTNNSVCQILHQNLALKYNLVATYHPYYKYTPQRILENDRVKLLWDHTFATDHSVGHNRPDLVLLLKEERACFIIDVAVPLDRNTVEKKDEKIWNYGPLADDMKQTWRLQKIEVVPVVISATGLVPQILHKALKTLDLRAGLYMEMQKNGYPCNLCYSPKSPLR

SEQ ID NO: 14050 - protein, 1094 aa, Hermetia illucens
MPSTTRDGRPRRRMVWTNQLNEFIVRAYYRITDLERNPSGYRQRLHDAFITRFPELSHVPEQNVVNQYRVIVNNNRVALPTRQQIFQEVSLELGLESSNYRTSQRSNTSTPPVRHSMNPVVRRSLVTGDVDPIYNEALTAFQVAFTEYAEILPDARPRIPKLKFTSATANIIAAVDRILADRLASEITATEVHSLIYVAAATVIRLHNQHLRANNRGMRRRTLPFWVFRLNKRVEKLRKEIGRVTQALLGNPSPRVHRCVANIIGNYHLSNDMPIEEILEVLKQKLVVCSNRIRRYQKSFQRRTDNTLFFQNQRGFYKNLINSGRESNLNLDQAEDFWRSVWSESSRCNLEAAWLPHLMRSCEALPEMTMPDVTEVDVKAVLDKAGNWKAPGVDKIHNFWLKRFKSTHRILANQFNQMIADPDLVPPFFTKGITFLIPKEQGVSCPSKCRPITCLPTIYKVFTSVLCENISKHLDVHKLIAEEQKGCAKGSRGCKEQLIIDTVAVKQAVHQKRNISTAYIDYKSAFDSISHSWLLQVLRLYKINPNVVLLLRTVMKNWSTKLSVSSQTSGEIPIRRGIFQGDSLSPLWFCLALNPLSHLLHESKYGFQVKHGILSKCALSHLMYIDDIKLYAKDENQLCSLLDITIQFSRDIGMQLGLEKCRIKTIVRGKHTDNEGYSLIKSKLLGEFERRLDLVLKTELYGKNKIMAINTFAIPVLLYTFGVIQWSNTDLESVNRRVRVVLANNNMHNRAAEKLRITIPRHQGGRGVLDLKTMHYNQVHSLREFFYEKQSSSQIHQATVMADNKLSPLNLRSREWDPMSNVTSVQQKIDMWKEKPIHGGHIKNLLLSGIDIEASNKWLTNGVLFYETEAFLTSIQDASLPTKNYKRYILHDSSITNSSCRLCNCEEETIQRITSVCRMLSGTEYTNRHNSVCKILHQNLALKYNLVATYHPYYKYTPQRILENDRVKLLWDHTIATDYSVNHNRPDLVLLLKEERACFIIDVAVPLDRNTVEKQHEKIRNYGPLADDMKQTWRLQKIKVVPVIISATGLVPQNLHKALKTLDLRAGLYMEMQKAVILATCAIVRRVLSGNNLT

SEQ ID NO: 14051 - protein, 891 aa, Hermetia illucens
MRRGTLPFWVFRLNKRVEKLRKEIGRVTQALLGNPSQRVHRCVANIIGNYHLSNDMPIEEILEVLKQKLAVCSNRICRYQKSFQRRTDNILFFQGNLDLDQAEDFWRSVWSESSRCNLEAAWLPHLMRSCEALPEMTMPDVTEVDVEAALDKAGNWKAPGVDKIHNFWLKRFKSTHRILANQFNQMIADPDLVPPFFTKGITFLIPKEQGVSCPSKCRPITCLPTIYKVFTSVLFANISQHLDVHKLIAEEQKGCAKGSRGCKEQLIIDTIAVKQAVRQKRNISTAYIDYKSAFDSISHSWLLQVLRLYKINPNVVLLLRTVMKNWSTKLSVSSQTSGEIPIRRGIFQDESLSPLWLCLALNPLSHLLHESKYGFQVKHGILSKCTLSHLMYIDDIKLYAKDENQLRSVLDIIIQFSRDIGMQLGLEKCRIKTIVRRKHTDNEGYSQNNIRIEGMDSDDVYKYLGILQATTPAVAIIKSKLLGEFERRLDLVLKTELYGKNKIMAINTFAIPVLLYTFGVIQWSNTDLESVNRRVRVVLANNNMHNRAAEQLRITIPRHQGGRGVLDLKTLHYNQVHSLREFFCEKQSSSQIHQATVMADNKLSPLNLRSREWDPMSNVTSVQQKIDMWKEKPIHGGHIKNLLLSGIDIEASNKWLTNGVLFYEIEAFLTSIQDASLPTKNYKRYILHDSSITNSSCRLCNCEEETIQHITAACRMLSSTEYTNRHNSVCKILHQNLALKYNLVATYHPYYKCTPQRILENDRVKLLWDHTIATEYSVNHNRPDLVLLMKEERACFIIDVAVPLDRNTVEKQHEKIRNYGPLADDMKQAWRLQKIEVVPVVISATGLAPQNLHKALKTLDLRAGLYMEMQKTVILAICAIVRRVLSGNNLT

SEQ ID NO: 14052 - protein, 950 aa, Notodonta dromedarius
MASPVVITPCPSQGNLSHSCSQCSKSFNSIRGLRIHAGKIHKLTSIIQPVFHPTPAVDTSNNTTSLHLLLSSLKQSTPLVKRIPRGARISVATRLTHLINKCVGTNTTADWQDLFIFSFSTLHAKIQHSHTSITQTIKNNCTDPSLAHANSKLRPFNIFRKVEDKVSDGDLKGAARILFSSDVLSPDSPETLVALQDKHPSAQSAAPQSADPAAVPTAPCHQCNEKDITGAIFSFKTGSAAGLDGLSPQHFKDLIGTSVGDAGRHLVAALTKLVNLMLAGRVNPAVVPVLYGANLIALSKKDGGIRPIAVGSTIRRLASKIAVKQIVPKLREQFSPVQLGFGVSGGCEAAVHATRTFLHHSQDNEVLLKIDVKNAFNSVNRVTLLNEIEKNIPEFFGYLNQCYREPSKLMYKNHEILSAVGCQQGDPLGPAIFSLAISSIIQSLGSKLNVWYLDDGTLGDTPEKVLLDLKNIIDKFHSLGLELNFDKCELFLPETIQNKINIINQFNNLASNIKIVDKKSLHLLGSPIFPDAIEPTIEKSLAKFNEHSHRLLGINSHSALFILKFCLFVPKFTYLLRASPVWLYQNSLVTIDNLIKRTFEGIINVKLSEKSWTQASLPIRYGGVGIRKISSICVPAFLSSTYKNENLIKRILSRSSLNVDISFVEEGRKAWQMAWPGLTPSDPTIQKSWDVLCCSVTLKGLKETSTGPELARIEAVSRKESGYWLHAFPCANTGNYLDPNTLRVALGLRLGADVCTPHTCPCGAAVDRLGHHGLSCAKSAGRFSRHAALNDIIRRSLATANVPAILEPQGIVRDDGRRPDGVSLVPWSRGRALVWDATCVDTLAPSHLLGTSQRAGAAAEGAENLKRRKYRVIGSEYIFAPFGVETLGPWGPSAHNLVQDISKRLVDATGDPRAGHFLAQRVALAIQRGNAASILGTLPHGPNFVHFLNN

SEQ ID NO: 14053 - protein, 982 aa, Notodonta dromedarius
MCLCIYIFILILVYCFYKLGKRHSVCVRETPCMASPVVITPCPSQGNLSHSCSQCSKSFNSIRGLRIHAGKIHKLTSIIQPVFHPTPAVDTSNNTTSLHLLLSSLKQSTPLVKRIPRGTRISVATRLTHLINKCVGTNTTADWQDLVIFSFSTLHAKIQHSHTSITQTIKNNCTDPSLAHTNSKLRPFNLFRKVEDKVSDGDLKGAARILFSSDVLFPDSPETLVALQDKHPSAQSAAPQSADPAAVPTAPCHQCNEKDITGAIFSFKTGSAAGLDGLSPQHFKDLIGTSVGDAGRHLVAALTKLVNLMLAGRVNPAVVPVLYGANLIALSKKDGGIRPIAVGSTIRRLASKIAVKQIVPKLREQFSPVQLGFGVSGGCEAAVHATRTFLHHSQDNEVLLKIDVKNAFNSVNRVTLLNEIEKNIPEFFGYLNQCYREPSKLMYKNHEILSAVGCQQGDPLGPAIFSLAISSIIQSLGSKLNVWYLDDGTLGDTPDKVLLDLKNIIDKFHYLGLELNFDKCELFLPEAIQNKINIINQFNNLASNIKIVDKKSLHLLGSPIFPDAIEPTIEKSLAKFNEHSHRLLGINSHSALFILKFCLFVPKLTYLLRASPVWLYQNSLVTIDNLIKITFEGIINVKLSEKSWTQASLPIRYGGVGIRKISSICVPAFLSSTYKNENLIKRILSRSSLNVDISFVEEGRKAWQMAWPGLTPSDPTIQKSWDVLCCSVTLKGLKETSTGPELARIEAVSRKESGYWLHAFPCANTGNYLDPNTLRVALGLRLGADVCTPHTCPCGAAVDRLGHHGLSCAKNAGRFSRHAALNDIIRRSLATANVPAILEPQGIVRDDGRRPDGVSLIPWSRGRALVWDATCVDTLAPSHLLGTSQRAGAAAEGAENLKRRKYRVIGSEYIFAPFGVETLGPWGPSAHNLVQEISKRLVDATGDPRAGHFLAQRVALAIQRGNAASILGTLPHGPNFVHFLNN

SEQ ID NO: 14054 - protein, 980 aa, Ptilodon capucinus
MSNLLCFCGCIFILVLVYCSFKFKIRPSVRACNVPWMASASVVPPGPTHSCSQCSKLFNSSRGLNIHVGRIHKNTPVYHSVHQSTSCSAPSTSNTFNFINQNLSSLKQSTPLVKRIPRGARISVANRLTHLVNKCVTANTTNDWQDLLTFSYSTLHAKIQDNRLSITQTIKNNCSNPLLTHTISNLKPFNLYKKVEDKVSDGDLKGAARILFSSDVLSPDSPETLAALQDKHPSAPSAAPQLVTSIPAAIPALQSNEKDVTAAIFSFKTGSAAGLDGLSPQHLKDLIGSPVGEAGRHLVTALTKLVNLMLAGGVNDAIMPVLYGANLIALSKKDGGVRPIAVGSTLRRLVSKIAVKRIVPKLHEQFSPIQLGFGVSGGCEAAVHATRSYLHSSHDNEVLLKIDVKNAFNSVNRVTLLNEAKQNVPEIFAYLNQCYREPSKLMYKHHEILSSVGCQQGDPLGPAIFSLAINSVVQNLSSNLNVWYLDDGTLGDTSDKVLLDLKNIITKFQLLGLELNFDKCELYLAENNPNKNLIIDQFNSLATHIIIVDKKSLHLLGSPIFPDAIEPTIAQSLIKFKEYSHRLLAINPHSALFILKFCLFIPKFTYLLRTSPVWLYQNSLITVDNLIRSSFESIVNLKLNEKSWNQASLPIRYGGVGIRKKSDICLPAFLSSTHKNDNLIKQILSRSSFNGAISFVNEGRKAWELAWPSQNPTNPTSQRSWDDLCCSATFRNLRDTSTGSELARIKAVSCKESGYWLHAFPCANTGNYLDPNTLRVALGLRLGADVCTPHTCPCGVVVDRLGRHGLSCARSAGRHSRHAALNDIIRRSLATANVPAILEPQGIVRDDGKRPDGMSLVPWSMGRAMVWDATCVDTLAPSHLSGTTQKAGSAAEAAETLKRRKYEVIGSEYIFIPFGVETLGPWGPSTQNLMNLLGKKLVDTTGDPRAGHFLAQRVALAIQRGNAASVLGTLPHGPNFLHIL

SEQ ID NO: 14055 - protein, 976 aa, Ptilodon capucinus
MFLWICIFILVLVYCSFKFKLRPSVRACNVPWMASASVVPPGPTHSCSQCSKLFNSSRGLNIHVGRIHKNTPVYHSVHQSTSCSAPSTSNTFNFINQNLSSLKQSTPLVKRIPRGARISVTNRLTHLINKCVTANTTNDWQDLLTFSYSTLHAKIQDNRLSITQTIKNNCYNPLLTHIISNLKPFNLYKKVEDKVSDGDLKGAARILFSSDVLSPDSPETLAALQDKHPSAPSAAPQLVTSISAAIPALQSNEKDVTAAIFSFKTGSAAGLDGLSPQHLKDLIGSPVGEAGRHLVTALTKLVNLMLAGGVNDAIMPVLYGANLIALSKKDGGVRPIAVGSTLRRLVSKIAVKRIVPKLHEQFSPIQLGFGVSGGCEAAVHATRSYLHNSHDNEVLLKIDVKNAFNSVNRVTLLNEVKQNVPEFFAYLNQCYREPSKLMYKHHEIFSSVGCQQGDPLGPAIFSLAINSVVQNLSSNLNVWYLDDGTLGDTSDKVLLDLKNIITKFQLLGLELNFDKCELYLAENNPNKNLIIDQFNSLATHIKIVDKKSLHLLGSPIFPDAIEPTIAQSLIKFKEYSHRLLAINPHSALFILKFCLFIPKFTYLLRTSPVWLYQNSLITVDNLIRSSFESIVNLKLNEKSWNQASLPIRYGGVGIRKNSDICLPAFLSSTHKNDSLIKQILSRSSFNGAISFVNEGRKAWELAWPSQNPTNPTSQRSWDDLCCSATFRNLRDTSTGSELARIKAVSCKESGYWLHAFPCANTGNYLDPNTLRVALGLRLGADVCTPHTCPCGVVVDRLGRHGLSCARSAGRHSRHAALNDIIRRSLATANVPAILEPQGIVRDDGKRPDGMSLVPWSLGRAMVWDPNCVDTLAPSHLSGTTQRAGSAAEAAETLKRRKYEVIGSEYIFIPFGVETLGPWGPSTQNLMNLLGKKLVDTTGDPRAGHFLAQRVALAIQRGNAASVLGTLPHGPNFLHIL

SEQ ID NO: 14056 - protein, 976 aa, Ptilodon capucinus
MFLWICIFILVLVYCSFKFKIRPSVRACNVPWMASASVVPPGPTHSCSQCSKLFNSSRGLNIHVGRIHKNTPVYHSVYQSTSCSVPSTSNTFNFINQNLSSLKQSTPLVKIIPRGAKISVANRLTHLINKCVTANTTNDWQDLLTFSYSTLHAKIQDNRLSITQTIKNNCSNPLLTHTISNLKPFNLYKKVEDKVSDGDLKGAARILFSSDVLSPDSPETLAALQDKHPSAPSAAPQLVTSIPAAIPALQSNEKDVTAAIFSFKTGSAAGLDGLSPQHLKDLIGSPVGEAGRHLVTALTKLVNLMLAGGVNDAIMPVLYGANLIALSKKDGGVRPIAVGSTLRRLVSKIAVKRIVPKLHEQFSPIQLGFGVSGGCETAVHATRSYLHSSHDNEVLLKIDVKNAFNSVNRVTLLNEAKQNVPEIFAYLNQCYREPSKLMYKHHEILSSVGCQQGDPLGPAIFSLAINSVVQNLSSNLNVWYLDDGTLGDTSDKVLLDLKNIITKFQLLGLELNFDKCELYLAENNPNKNLTIDQFNSLATHIKIVDKKSLHLLGSPIFPDAIEPTIAQSLIKFKEYSHRLLEINHHSALFILKFCLFIPKFTYLLRTSPVWLYQNSLITVDNLIRSSFESIVNLKLNKKSWNQASLPIRYGGVGIRKNSDICLPAFLSSTHKNDSLIKQILSRSSFSGAISFVNEGRKAWELAWPSQNPTNPTSQRSWDDLCCSATFRNLRDTSTGSELARIKAVSCKESGYWLHAFPCANTGNYLDLNTLRVALGLRLGAEVCTPHTCPCGVVVDRLGRHGLSCARSAGRHSRHAALNDIIRRSLATANVPAILEPQGIVRDNGKRPDGMSLVPWSMGRAMVWDATCVDTLAPSHLSGTTQKAGSAAEAAETLKRRKYGVIGSEYTFIPFGVETLGPWGPSTQNLMNLLGKKLVDTTGDPRAGHFLAQRVALAIQRGNAGSVLGTLPHGPNFLYIL

SEQ ID NO: 14057 - protein, 976 aa, Ptilodon capucinus
MFLWICIFILVLVYCSFKFKIRPSVRACNVPWMASASVVPPGPTHSCSQCSKLFNSSRGLNIHVGRIHKNTPVYHSVHQSTSCSAPSTSNTFNFINQNLSSLKQSTPLVKRIPRGARISVANRLTHLINKCVTANTTNDWQDLLTFSYSTLHAKIQDNRLSITQTIKNNCSNPLLTHTISNLKPFNLYKKVEDKVSDGDLKGAARILFSSDVLSPDSPETLAALQDKHPSAPSAAPQLVTSIPAAIPALQSSEKDVTAAIFSFKTGSAAGLDGLSPQHLKDLIGSPVGEAGRHLVTALTKLVNLMLAGGVNDAIMPVLYGANLIALSKKDGGVRPIAVGSTLRRLVSKIAVKRIVPKLHEQFSPIQLGFGVSGGCEAAVHATRSYLHSSHDNEVLLKIDVKNAFNSVNRVTLLNEAKQNVPEIFAYLNQCYREPSKLMYKHHEILSSVGCQQGDPLGPAIFSLAINSVVQNLNSNLNVWYLDDGTLGDTSDKVLLDLKNIITKFQLLGLELNFDKCELYLAENNPNKNLIINQFNSLATHIKIVDKKSLHLLGSPIFPDAIEPTIAQSLIKFKEYSHRLLAINPHSALFILKFCLFIPKFTYLLRTSPVWLYQNSLITVDNLIRSSFESIVNLKLNEKSWNQASLPIRYGGVGIRKNSDICLPAFLSSTHKNDSLIKQILSRSSFNGAISFVNEGRKAWELAWPSQNPTNPTSQRSWDDLCCSATFRNLRDTSTGSELARIKAVSCKESGYWLHAFPCANTGNYLDPNTLRVALGLRLGADVCTPHTCPCGVVVDRLGRHGLSCARSAGRHSRHAALNDIIRRSLATANVPAILEPQGIVRDDGKRPDGMSLVPWSMGRAMVWDATCVDTLAPSHLSGTTQKAGSAAEAAETLKRRKYEVIGSEYIFIPFGVETLGPWGPSTQNLMNLLGKKLVDTTGDPRAGHFLAQRVALAIQRGNAASVLGTLPHGPNFLHIL

SEQ ID NO: 14058 - protein, 976 aa, Ptilodon capucinus
MFLWICIFILVLVYCSFKFKIRPSVRACNVPWMASASVVPPGPTHSCSQCSKLFNSSRGLNIHVGRIHKNTPVYHSVHQSTSCSVPSTSNTFNFINQNLSSLKQSTPLVKRIPRGARISVANRLTHLINKCVTANTTNDWQDLLTFSYSTLHAKIQDNRLSITQTIKNNCSNPLLTHTISNLKPFNLYKKVEDKVSDGDLKGAARILFSSDVLSPDSPETLAALQNKHPSAPSAAPQLVTSIPAAIPALQSNEKDVTAAIFSFKTGSAAGLDGLSPQHLKDLIGSPVGEAGRHLVTALTKLVNLMLAGGVNDAIMPVLYGANLIALSKKDGGVRPIAVGSTLRRLVSKIAVKRIVPKLHEQFSPIQLGFGVSGGCEAAVHATRSYLHSSHDNEVLLKIDVKNAFNSVNRVTLLNEAKQNVPEIFPYLNQCYREPSKLMYKHHEILSSVGCQQGDPLGPAIFSLAINSVVQNLSSNLNVWYLDDGTLGDTSDKVLLDLKNIITKFQLLGLELNFDKCELYLAENNPNKNLIIDQFNSLATHIKIVDKKSLHLLGSPIFPDAIEPTIAQSLIKFKEHSHRLLAINPHSALFILKFCLFIPKFTYLLRTSPVWLYQNSLITVDNLIRSSFESIVNLKLNEKSWNQASLPIRYGGVGIRKNSDICLPAFLSSTHKNDSLIKQILSRSSFNGAISFVNEGRKAWELAWPSQNPINPTSQRSWDDLCCSATFRNLRDTSTGSELARIKAVSCKESGYWLHAFPCANTGNYLEPNTLRVALGLRLGAEVCTPHTCPCGVVVDRLGRHGLSCARSAGRHSRHAALNDIIRRSLATANVPAILEPQGIVRDDGKRPDGMSLVPWSMGRAMVWDATCVDTLAPSHLSGTTQKAGSAAEAAETLKRRKYEVIGSEYIFIPFGVETLGPWGPSTQNLMNLLGKKLVDTTGDPRAGHFLAQRVALAIQRGNAASVLGTLPHGPNFLHIL

SEQ ID NO: 14059 - protein, 982 aa, Notodonta dromedarius
MCLYIYIFILILVYCFYKLGKRHSVCVRETPCMASPVVITPCPSQGNLSHSCSQCSKSFNSIRGLRIHAGKIHKLTSIIQPVFHPTPAVDTSNNTTSLHLLLSSLKQSTPLVKRIPRGARISVATRLTHLINKCVGTNTTADWQDLFIFSFSTLHAKIQHSHTSITQTIKNNCTDPSLAHANSKLRPFNLFRKVEDKVSDGDLKGAARILFSSDVFSPDSPETLVALQDKHPSAQSAAPQSADPAAVSTAPCHQCNEKDITGAIFSFKTGSAAGLDGLSPQHFKDLIGTSVGDAGRHLVAALTKLVNLMLAGRVNPAVVPVLYGANLIALSKKDGGIRPIAVGSTIRRLASKIAVKQIVPKLREQFSPVQLGFGVSGGCEAAVHATRTFLHHSQDNEVLLKIDVKNAFNSVNRVTLLNEIEKNIPEFFGYLNQCYREPSKLMYKNHEILSAVGCQQGDPLGPAIFSLAISSIIQSLGSKLNVWYLDDGTLGDTPEKVLLDLKNIIDKFHSLGLELNFDKCELFLPETIQNKINIINQFNNLASNIKIVDKKSLHLLGSPIFPDAIEPTIEKSLAKFNEHSHRLLGINSHSALFILKFCLFVPKFTYLLRASPVWLYQNSLVTIDNLIKRTFEGIINVKLSEKSWTQASLPIRYGGVGIRKISSICVPAFLSSTYKNENLIKRILSRSSLNVDISFVEEGRKAWQMAWPGLTPSDPTIQKSWDVLCCSVTLKGLKETSTGPELARIEAVSRKESGYWLHAFPCANTGNYLDPNTLRVALGLRLGADVCTPHTCPCGAAVDRLGHHGLSCAKSAGRFSRHAALNDIIRRSLATANVPAILEPQGIVRDDGRRPDGVSLVPWSRGRALVWDATCVDTLAPSHLLGTSQRAGAAAEGAENLKRRKYRVIGSEYIFAPFGVETLGPWGPSAHNLVQDISKRLVDATGDPRAGHFLAQRVALAIQRGNAASILGTLPHGPNFVHFLNN

SEQ ID NO: 14060 - protein, 976 aa, Ptilodon capucinus
MFLWICIFILVLVYCSFKFKIRPSVRACNVPWMASASVVPPGPTHSCSQCSKLFNSSRGLNIHVGRIHKNTPVYHSVHQSTSCSVPSTSNTFNFINQNLSSLKQSTPLVKRIPRGARISVANRLTHLINKCVTANTTNDWQDLLTFSYSTLHAKIQDNRLSITQTIKNNCSNPLLTHTISNLKPFNLYKKVEDKVSDGDLKGAARILFSSDVLSPDSPETLAALQNKHPSAPSAAPQLVTSIPAAIPALQSNEKDVTAAIFSFKTSSAAGLDGLSPQHLKDLIGSPVGEAGRHLVTALTKLVNLMLAGGVNDAIMPVLYGANLIALSKKDGGVRPIAVGSTLRRLVSKIAVKRIVPKLHEQFSPIQLGFGVSGGCEAAVHATRSYLHSSHDNEVLLKIDVKNAFNSVNRVTLLNEAKQNVPEIFPYLNQCYREPSKLMYKHHEILSSVGCQQGDPLGPAIFSLAINSVVQNLSSNLNVWYLDDGTLGDTSDKVLLDLKNIITKFQLLGLELNFDKCELYLAENNPNKNLIIDQFNSLATHIKIVDKKSLHLLGSPIFPDAIEPTIAQSLIKFKEHSHRLLAINPHSALFILKFCLFIPKFTYLLRTSPVWLYQNSLITVDNLIRSSFESIVNLKLNEKSWNQASLPIRYGGVGIRKNSDICLPAFLSSTHKNDSLIKQILSRSSFNGAISFVNEGRKAWELAWPSQNPTNPTSQRSWDDLCCSATFRNLRDTSTGSELARIKAVSCKESGYWLHAFPCANTGNYLDPNTLRVALGLRLGAEVCTPHTCPCGVVVDRLGRHGLSCARSAGRHSRHAALNDIIRRSLATANVPAILEPQGIVRDDGKRPDGMSLVPWSMGRAMVWDATCVDTLAPSHLSGTTQKAGSAAEAAETLKRRKYEVIGSEYIFIPFGVETLGPWGPSTQNLMNLLGKKLVDTTGDPRAGHFLAQRVALAIQRGNAASVLGTLPHGPNFLHIL

SEQ ID NO: 14061 - protein, 915 aa, Ptilodon capucinus
MFLWICIFILVLVYCSFKFKIRPSVRACNVPWMASASVVPPGPTHSCSQCSKLFNSSRGLNIHVCRIHKNTPVYHSVHQSTSCSAPSTSNTFNFINQNLSSLKQSTPLVKRIPRGARISVANRLTHLINKCVTANTTNDWQDLLTFSYSTLHAKIQDNRLSITQTIKNNCSNPLLTHTISNLKPFNLYKKVEDKVSDGDLKGVARILFSSDVLSPDSPETLAALQDKHPSAPSAAPQLVTSIPAAIPALQSNEKDVTAAIFSFKTGSAAGLDGLSPQHLKDLIGSPVGEAGRHLVTALTKLVNLMLAGGVNDAIMPVLYGANLIALSKKDGGVRPIAVGSTLRRLVSKIAVKRIVPKLHEQFSPIQLGFGVSGGCEAAVHATRSYLHSSHDNEVLLKIDVKNAFNSVNRVTLLFEAKQNVPEIFAYLNQCYREPSKLMYKHHEILSSVGCQQGDPLGPAIFSLAINSVVQNLSSNLNVWYLDDGTLGDTSDKVLLDLKNIITKFQLLGLELNFDKCELYLAENNPNKNLIINQFNSLATHIKIVDKKSLHLLGSPIFPDAIEPTIAQSLIKFKEYSHRLLAINPHSALFILKFCLFIPKFTYLLRTSPVWLYQNSLITVDNLIRSSFESIVNLKLNEKSWNQASLPIRYGGVGIRKNSDICLPAFLSSTHKNDSLIKQILSRSSFNGAISFVNEGRKAWELAWPSQNPTNPTSQRSWDDLCCSATFRNLRDTSTGSELARIKAVSCKESGYWLHAFPCANTGNYLDPNTLRVALGLRLGADVCSPNTCPCGVVVDRLGRHGLSCARSAGRHSRHAALNDIIRRSLATANVPAILEPQVRDDGKRPDGMSLVPWSMGRAMVWDATCVDTLAPSHLSGTTQKAGSAAEAAETLKRRKYEVMGSEYIFIPFGVETLGP

SEQ ID NO: 14062 - protein, 982 aa, Notodonta dromedarius
MCLYIYIFILILVYCFYKLGKRHSVCVRETPCMASPVVITPCQSQGNLSHSCSQCSKSFNSIRGLRIHAGKIHKHTSIIQPVFHPTPAVDTSNNTTSLHLLLSSLKQSTPLVKRIPRGARISVATRLTHLINKCVGTNTTADWQDLFIFSFSTLHAKIQHSHTSITQTIKNNCTDPSLSHTNSKLRPFNIFRKVEDKVSDGDLKGAARILFSSDVLSPDSPETLVALQDKHPSAQSAAPQSADPAAVPTAPCHQCNEKDITGAIFSFKTGSAAGLDGLSPQHFKDLIGTSVGDAGRHLVAALTKLVNLMLAGRVNPAVVPVLYGANLIALSKKDGGIRPIAVGSTIRRLASKIAVKQIVPKLREQFSPVQLGFGVSGGCEAAVHATRTFLHHSQDNEVLLKIDVKNAFNSVNRVTLLNEIEKNIPEFFGYLNQCYREPSKLMYKNHEILSAVGCQQGDPLGPAIFSLAISSTIQSLGSKLNVWYLDDGTLGDTPDKVLLDLKNIIDKFHSLGLELNFDKCELFLPEAIQNKINIINQFNNLASNIKIVDKKSLHLLGSPIFPDAIEPTIEKSLAKFNEHSHRLLGINSHSALFILKFCLFVPKFTYLLRASPVWLYQNSLVTIDNLIKRTFEGIINVKLSEKSWTQASLPIRYGGVGIRKISSICVPAFLSSTYKNGNLIRRILSRSSLNVDISFVDEGRKAWQLAWPDLTPSDPTIQKSWDVFCCSVTLKGLKETSTGPELARIEAVSRKESGYWLHAFPCANTGNYLDPNTLRVALGLRLGADVCTPHTCPCGAAVDRLGHHGLSCAKSAGRFSRHAALNDIIRRSLATANVPAILEPQGIVRDDGRRPDGMSLVPWSRGRALVWDATCVDTLAPSHLLGTSQRAGAAAEGAENLKRRKYRVIGSEYIFAPFGVETLGPWGPSAHNLVQEISKRLVDATGDPRAGHFLAQRVALAIQRGNAASILGTLPHGPNFVHFLNN

SEQ ID NO: 14063 - protein, 976 aa, Furcula furcula
MFYFIIFILVIVLLLLCGCNVPSMASPGDDLPSSSCHTCIHCSKSFSSSRGLNIHIGKLHKGAPGNSSHPSSICSNNFTTSFSDIHFHLSYCKRNIPLVKRIPRGARIAVAYKLTHIINNCTDSNTIKDWQELFTFAYNTLHANSPDNHLSLTQSIKNNCTNNSSLLHSTPGSNARERFSHKPFSLAKKVESKISDGDLKGAARILFSSDILSPDSPATLAALQDKHPFRTYATPLSSDISTVTASSLICKEFDVTNAIFSFKAGSAAGLDGLSPQHLKDLTAATVGEAGRLLVIAITKLVNLMLAGRVNPAAVPIFYGANLIALSKKDGGVRPIAVGSTFRRLCSKLAVKHVLPSLKDHFAPFQLGFGISGGCEAAVHATRTFLNARQQNEVLLKIDVKNAFNSLNRVSMLNELKNMFPELFPYLHQCYSEPTKLIYQNYEILSAVGCQQGDPLGPAMFSLAINSIIQSLDSKLNLWYLDDGTLGDTADKVFADLKLIISKFHLLGLELNFDKCELFLEDNFPNKKGTIAQFNSLAPNIKIVNKESLYLLGSPIFPDSVESLFEKSIAKFNEHSHRLSDINSHSAFFILKCCLFLPKYTYLLRSSPVWLFQNSLCAIDNLIKNSFEKIINVNLSEKAWTQASLPIRFGGVGIRKISSVSLPAYLSSSHKNKQLVKQILSNARLSDIDISYVDEAWKAWQSAWPSLIPTDPTSQNCWDNLSCSATFQSLISNSSGSELARLQAVSCKESGYWLQAYPCPNTGNCLDPNTLRIAISLRLGADVCTPHKCPCGTDVDRLGHHGLSCARSAGRFSRHAALNDIIRRALATINVPAILEPQGIVRDDGKRPDGMTLVPWSMGRVLVWDATCVDTLAPSHVQDTSKRPGAAARAAEIIKKHKYRVIGSEYIFMPFGVETLGPWGPSAHCFFNLISKRLVDVTGDPGAGHFLAQRVSISIQRGNAASILGTMPHGPNFLHLL

SEQ ID NO: 14064 - protein, 976 aa, Furcula furcula
MFYFIIFILVIVLLLLCGCNVPSMASPGDDLPSSSCHTCIHCSKSFSSSRGLNIHIGKLHKGAPGNSSHPSSICSNNFTTSFSDIHFHLSYCKRNIPLVKRIPRGARIAVAYKLTHIINNCTDSNTIKDWQELFTFAYNTLHANSPDNHLSLTQSIKNNCTNNSSLLHSTPGSNARERFSHKPFSLAKKVESKISDGDLKGAARILFSSDILSPDSPATLAALQDKHPFRTYATPLSSDISTVTASSLICKEFDVTNAIFSFKAGSAAGLDGLSPQHLKDLTAATVGEAGRLLVIAITKLVNLMLAGRVNPAAVPIFYGANLIALSKKDGGVRPIAVGSTFRRLCSKLAVKHVLPSLKDHFAPFQLGFGISGGCEAAVHATRTFLNARQQNEVLLKIDVKNAFNSLNRVSMLNELKNMFPELFPYLHQCYSEPTKLIYQNYEILSAVGCQQGDPLDPAMFSLAINSIIQSLDSKLNLWYLDDGTLGDTADKVFADLKLIISKFHLLALELNFDKCELFLEDNFPNKKGTIAQFNSLAPNIKIVNKESLYLLGSPIFPDSVESLFEKSIAKFNEHSHRLSDINSHSAFFILKCCLFLPKYTYLLRSSPVWLFQNSLCAIDNLIKNSFEKIINVNLSEKAWTQASLPIRFGGVGIRKISSVSLPAYLSSSHKNKQLVKQILSNARLSDIDISYVDEAWKAWQSAWPSLIPTDPTSQNCWDNLSCSATFQSLISNSSGSELARLQAVSCKESGYWLQAYPCPNTGNCLDPNTLRIAISLRLGADVCTPHKCPCGTDVDRLGHHGLSCARSAGRFSRHAALNDIIRRALATINVPAILEPQGIVRDDGKRPDGMTLVPWSMGRVLVWDATCVDTLAPSHVQDTSKRAGAAARAAEIIKKHKYRVIGSEYIFMPFGVETLGPWGPSAHCFFNLISKRLVDVTGDPGAGHFLAQRVSISIQRGNAASILGTMPHGPNFLHLL

SEQ ID NO: 14065 - protein, 973 aa, Furcula furcula
MFYFILFILVIVLLLLCGCNVPSMASPGDDLPSFSCHTCVHCSKSFSSNRGLNIHIGKLHKGASGNSLLNCSNNFTAPFSDIHFHLSYYKRNIPLVKRIPRGARIAVAYKLTNIINNCTDSNTIKDWQELFTFAYNTLHANSPDNHLSLTQSIKNNCTNNSSLLHSTPGSNARERLSHRAFNLAKKVESKISDGDLKGAARILFSSDILSPDSPVTLAALQEKHPSRTYATPLSSDISTVTASSLICKEFDVTNAIFSFKAGSAAGLDGLSPQHLKDLTAATVGEAGRLLVIAITKLVNLMLAGRVNPVAVPIFYGANLIALSKKDGGVRPIAVGSTFRRLCSKLAVKHVLPSLKDHFAPFQLGFGISGGCEAAVHATRTFLNARQQNEVLLKIDVKNAFNSLNRVTMLNELKNMFPELFPYLHQCYSEPTKLIYQNYEILSAVGCQQGDPLGPAMFSLAINSIIQSLDSKLNLWYLDDGTLGDTADKVLADLKLIISKFHLLGLELNFDKCELFLEDNFPNKKGTIAQFNSLAPNIKIVNKESLYLLGSPIFPDSVESLFEKSIAKFNEHSHRLSDINSHSAFFILKCCLFLPKYTYLLRSSPVWLFQNSLCAIDNLIKNSFEKIINVNLSEKAWTQASLPIRFGGVGIRKISSVSLPAFLSSSHKNIQLVKQILSNARLSDIDISYVDDAWKAWQSAWPSLIPIDPTSQKCWDDLSCSATFQSLISNSSGSELARLQAVSCKESGYWLQAYPCPNTGNCLDPNTLRIAISLRLGADVCTPHKCPCGTDVDRLGHHGLSCARSAGRFSRHAALNDIIRRALATINVPAILEPQGIVRDDGKRPDGMTLVPWSMGRVLVWDATCVDTLAPSHVQDTSKRAGAAARAAEIIKKHKYRVIGSEYIFMPFGVETLGPWGPSAHCLFNLLSKRLVDITGDPGAGHFLAQRVSISIQRGNAASILGTMPHGPNFLHLL

SEQ ID NO: 14066 - protein, 953 aa, Pheosia tremula
MASPRDDAPCPSHSCSQCSKSFSSSKGLNIHFGKIHKTISTQPSTSPYLGTNVFPSTSALDTSSSASSFHLHLSSLKHTIPLVKRIPRGARISVANRLTFIINKCVTSNAIADWHDLFIFAYSTLHANIDNKRTSITQCIKNNCFNPPVSQLHTNSKLKPFNIYKRVEDKVSDGDLKGAARILFSSDVLSPDSPETLVALQDKHPSGQPAALHPVDPAAMPAPCHQCNEKDIAGAIFSFKTGSAAGLDGLSPQHLKDLTGTPVGEAGRHLLTALNKLVNLMFAGAVNPAVVPVLYGANLIALSKKDGGVRPIAVGCTIRRLVSKISVKLIVPKLREKFSPFQLGFGVSGGCEAAVHATRTFLDNSHQNDVLLKIDVKNAFNSVNRVTMLNEIQQNIPELFAYLNQCYREPSKLMYQDHEILSAVGCQQGDPLGPAIFSLAINSIIQNLDSKLNVWYLDDGTLGDTPDKVFLDLKNIISKFNSLGLVLNFDKCELFLSENIQNKIQIIEQFNSLARNIKIVDQKSLHLLGSPIFPDAIEPFIEKSLTKFKEHSHRLLEINAHSALFILKFCLFVPKFIYLLRSSPIWLYQNSLISVDNLIRSSFESIINVKLTAKSWTQASLPIRHGGVGIRKISSVCLPAFLSSTYKNEYLIKQILSRASILNLETSFADEGRKAWQMAWPGLKPSDPTSQKSWDDLCCSAHFRDLVNNSSGSEIARLEAVSRKESGYWLHAYPCANTGNYLDPNTLRVALGLRLGAEVCTPHTCPCGAVVDSLGHHGLSCVKSAGRFSRHAALNDIIRRSLATANVPAILEPQGIVRDDGKRPDGMSLIPWSMGRALVWDATCVDTLAPSHLQVTCRRAGAAAEGAENLKRRKYSVIGSEYIFVPFGVETLGPWGPSSINFIENLSRRLVDATGDPRAGYFLAQRVALAIQRGNAASILGTLPHGPNFLHIL

SEQ ID NO: 14067 - protein, 986 aa, Pheosia tremula
MFLYIFIVILVLVYYYYYKTRIKLRVCGCNAHCMASPRDDAPCPSHSCSQCSKSFSSSKGLNIHFGKIHKTISTQPSTSPYLGTNVFPSTSALDTSSSASSIHLHLSSLKHTIPLVKRIPRGARISVANRLTFIINKCVTSNAIADWHDLFIFAYSTLHANIDNKRTSITQCIKNNCFNPPVSQLHTNSKLKPFNIYKRVEDKVSDGDLKGAARILFSSDVLSPDSPETLVALQDKHPSGQPAALHPVDPAAMPAPCHQCNEKDIAGAIFSFKTGSAAGLDGLSPQHLKDLTGTPVGEAGRHLLTALNKLVNLMFAGAVNPAVVPVLYGANLIALSKKDGGVRPIAVGCTIRRLVSKISVKLIVPKLREKFSPFQLGFGVSGGCEAAVHATRTFLDNSHQNDVLLKIDVKNAFNSVNRVTMLNEIQQNIPELFAYLNQCYREPSKLMYQDHEILSAVGCQQGDPLGPAIFSLAINSIIQNLDSKLNVWYLDDGTLGDTPDKVFLDLKNIISKFNSLGLVLNFDKCELFLSENIQNKIQIIEQFNSLARNIKIVDQKSLHLLGSPIFPDAIEPFIEKSLTKFKEHSHRLLEINAHSALFILKFCLFVPKFIYLLRSSPVWLYQNSLISVDNLIRSSFESIINVKLTAKSWTQASLPIRHGGVGIRKISSVCLPAFLSSTYKNEYLIKQILSRASILNLETSFADEGRKAWQMAWPGLKPSDPTSQKSWDDLCCSAHFRDLVNNSSGSEIARLEAVSRKESGYWLHAYPCANTGNYLDPNTLRVALGLRLGAEVCTPHTCPCGAVVDSLGHHGLSCVKSAGRFSRHAALNDTIRRSLATANVPAILEPQGIVRDDGKRPDGMSLIPWSMGRALVWDATCVDTLAPSHLQVTCRRAGAAAEGAENLKRRKYSVIGSEYIFVPFGVETLGPWGPSSINFIENLSRRLVDATGDPRAGYFLAQRVALAIQRGNAASILGTLPHGPNFLHIL

SEQ ID NO: 14068 - protein, 986 aa, Pheosia tremula
MFLYIFIVILVLVYYYYYKTRIKLRVCGCNAHCMASPRDDAPCPSHSCSQCSKSFSSSKGLNIHFGKIHKTISTQPSTSPYLGTNVFPSTSALDTSSSASSIHLHLSSLKHTIPLVKRIPRGARISVANRLTFIINKCVTSNAIADWHDLFIFAYSTLHANIDNKRTSITQCIKNNCFNPPVSQLHTNSKLKPFNIYKRVEDKVSDGDLKGAARILFSSDVLSPDSPETLAALQDKHPSGQPAALHPVDPAAMPAPCHQCNEKDIAGAIFSFKTGSAAGLDGLSPQHLKDLTGTPVGEAGRHLLTALNKLVNLMFAGAVNPAVVPVLYGANLIALSKKDGGVRPIAVGCTIRRLVSKISVKLIVPKLREKFSPFQLGFGVSGGCEAAVHATRTFLDNSHQNDVLLKIDVKNAFNSVNRVTMLNEIQQNIPELFAYLNQCYREPSKLMYQDHEILSAVGCQQGDPLGPAIFSLAINSIIQNLDSKLNVWYLDDGTLGDTPDKVFLDLKNIISKFNSLGLVLNFDKCELFLSENIQNKIQIIEQFNSLARNIKIVDQKSLHLLGSPIFPDAIEPFIEKSLTKFKEHSHRLLEINAHSALFILKFCLFVPKFIYLLRSSPVWLYQNSLISVDNLIRSSFESIINVKLTAKSWTQASLPIRHGGVGIRKISSVCLPAFLSSTYKNEYLIKQILSRASILNLETSFADEGRKAWQMAWPGLKPSDPTSQKSWDDLCCSAHFRDLVNNSSGSEIARLEAVSRKESGYWLHAYPCANTGNYLDPNTLRVALGLRLGAEVCTPHTCPCGAVVDSLGHHGLSCVKSAGRFSRHAALNDIIRRSLATANVPAILEPQGIVRDDGKRPDGMSLIPWSMGRALVWDATCVDTLAPSHLQVTCRRAGAAAEGAENLKRRKYSVIGSEYIFVPFGVETLGPWGPSSINFIENLSRRLVDATGDPRAGYFLAQRVALAIQRGNAASILGTLPHGPNFLHIL

SEQ ID NO: 14069 - protein, 948 aa, Cosmia trapezina
MRWTRAINENVMRSYYGATEGGNNLTAYRVRMHSLFQVLEPALNVSAQRLSDQVRVIQRNYMLDDTVLDRLRNEMQSSRVIAPLSQTIVAPPPPQCNTSQADEGSDGTAANVSTQCNEELRSALEGAIQEYRFVSPELRPRLPRLPMHNKNRALVAALDSQLSNYFDDCEDLTDTHSILYCAAVAACRVAHVKFANDSRVTRPKPAVPAWQCRIERRIGGARALIGKLICFREGNTRPRVMRFVRRAFSGTDVSPQDYMSRVTERIDFLRQKVYAWANRIRRYKRRVDRYTQNRTFQSDERWVYRGWERPDQGVTDTRLPDDDAMCSFWRSIWSVPVGHNEGDWAREVRRACDPIPEMGAITICPQDVARAVRPLPNWKSPGPDGLHNFWIKWFLGSHARLAAQYQSALQSGSLPQFLTTGITHLLHKSGSTTDPKNYRPITCLPTVYKVLTSILRAKINEHIDTNSIMSASQNGSRNGSRGTKELLLIDMAISQQVRRSRRDLSTCWIDYKKAYDSVPHTWLMRVLELYKVDATLRTFLMSCMGQWRTVLRYPGCRNIQRNSEPIRIERGIFQGDSLSPLWFCLALNPLSTLLEDSGLGYRLRRGGQVISHLLYMDDLKLFAPSNLQLMELLKVTETFSSAIRMEFGVDKCAVMHVKRGEIVESVGTQLSDSINLRTLSAAETYKYLGMSEALGINVADMKQSLKERFFGRLKKVFNSLLPNTDKTEGFVYAIMDEVIMTNNYRRFIVKDGTVDICRACHRPGESIRHIISGCSRLANEEYLHRHNLVARIIHQQLALKYSLVESEVPYYRYVPDPVLENGHITLYWDRSIITDRTIVANKPDIVVVDRTERRAMIVDIVPHDGNLVKAEKDKQIKYIDLAREVVDMWDVDSAVIVPIVVSANGLIAKSLDQHLRRLSLGSWIKGLIQKAVLLDTARIVRRFLSLEP

SEQ ID NO: 14070 - protein, 1025 aa, Hyles vespertilio
MTTRASRRNAQMRSPSSSSSASWASASDVFEVTPDIDVSSQRDELQSSPPPPRPARRRGRPPPAVGLGPTGPSVPPTVLATGGVVRRMRWTHQMNENVMRAYFGATKGGTNLTAYRAQMLSMFQVLEPTVNVSSQRLSDQVRFIQRRKLLDDEALERLRTEACVALDVITPITQRAAETPSIPAADIELVDNLDNTVSPQDQQRLRRTLESAILEYKSIPASCRPRVPRLPTHRRNLALMGALDSIVSTYMESSRDLVDTHSILYCAAVAACRVANVKFPINNVTTTRDVATVPAWQRRIEDRINRARTLIGKLIAFRNGNNRQRVMRFVAQAFSGTNISPRDYGLWVTERIDYYKQKVYAWANRIRRYRKRWDRFQQNRTFQSDQKRVYRCWERSPQCVVDGRLPSVHDMRTYWTNIWSSSISHTEADWFGVVERACESIPIMEAISISPEDVLVAIRPTQNWKSPGPDGLHNFWLKWLPCSHARLAAQFQDALDGGSLPTFMTTGVTHLLYKSGSATDPKNYRPITCLPTTYKLFTSILRAKIANHFTSNNILFPGQTGCKSGSRGTKELLLIDMTICQQARQNRRNLSAAWIDYKKAFDSVPHTWLMRVLSLYKIDTNLCTFLGSCMGQWTTVLRYPGGMVSPDCDEPIRIKRGIFQGDSLSPLWFCMALNPLSTLLVDSGLGYRLRRGTEPISHLLYMDDLKLFASKQTELIELLKITEKFSNSINMEFCVDKCAIIHVKRGEVAVSDGVQISDAVRLRALSETETYKYLGMPEALGILSADVKQSVKERFFGRLAKVLNSFVFAIMDEVIKTNNYRKYILKDGTVDICRACHRPGESIRHVISGCSYLANGEYLHRHNLVAKIIHQQIALRYGLVTLEMPYYQYVPQPVLENGHATLYWDRSIITDRTIVANKPDIVIIDRLARRAILVDVTIPHDVNLVKAEKDKLSKYLDLAHEVTDMWDVDSTVIVPIVVSAHGLMPKSFDQHLQRLSIGRWVKSQIQKAVLLDTARIVRRFLTLDP

SEQ ID NO: 14071 - protein, 1659 aa, Poecilobdella manillensis
MSRLVQAESPDQSLEGASTDTLALLNIPEHRRTAGPEIPAATDDENTVFPPEYVFSEEFELRYSPPPGDGLPEDEDFADALPFLQEVLMEDLMEDLILAPSLEEALGLREDVVDTRNFSFHYSSPEGQPPSPSRQPRKRKAPRRLVRSPTKFSRTAGELTTLARPTAKSEEITATVRNSPPLRSSSRTQPLVIFNTPTTAPHRLSPRTLASATPPLPATPMKPGLSPRNTTTPSASSPATTISYHSPPPAISPSPPPSAAASPTSQKRSPSKAPHSQTKPPPGIASPKPPAAVAPLPAPPAATAQKSPGTPNNTPPASSTPAHTNTSPKPIAAVTSPPPPHAAIASKSPRQSPGKTHQPPASPPPATASHSANTTPPATASPPAGVSYANITASPPRPVSSTSQVQQRTGSPPVPRLLDIKFPKMPNFPTRTPTPAKTKTTPAPSGPPQTKKRTATEGPTTPDSRTNEDGWTLVEKRRGADNPTTSTRPPAAEAHVFMVPMEANDLRCPWKCHIKRYATHNGLLRHIRKDHGAKTILFECRTCHQQHDTLKGVNRHRDSHNGTRTQKRSTAKKQPTPPTQKGTRSNHTPPPPSTQQPPSHKSPQAPPAPTPQPPPAPAQQPPPQRSTHSHPKPSTRPHTRPQEPVEQNAPQPETAQETPTTTQERSAQPTPQEKQGGPNAKQSAWIEKIQEIGSQEDLDNAANGLIEDIRTIIEEATAEFQAKRSKTTPEGKKEQAANPATNKKPAPRPSDPRSAGRLQREFRENMRAAYRKVTEDRSPVCPISHDTIINHFAPAGDGTRTEDVELDEPDATLHDILDTPFATGEVWQKLKRTSNSSPGPDRIRYLHWKKFDQGCHILTALFNRCRDLHLIPRPWKTARTILLHKKGDTEEPSNWRPIALINSIARLFTSCLASRMVRSIVSGQILCQEQKGFLPAEGCLEHNFVLQSIITDAKRQRKQLAVAWLDLRNAFGSVPHHVIHAALLRRKFNYRTRKLILELYKDSSTNFITAEGPSEQTPIQSGVKQGCPLSPLIFNVAIDDMIACASKKALTHGYPIHQQHHSILAYADDIVLMSDSVDGLQHLLDEVGEAATSIQLKFNAAKCATLHLDGAKNKTLDTGFTIQGDSPPSLEEKDHYKYLGRPTGYKPFISAAKSVKDLKVELEKIDASDLAPWQKHEATNVFILSRLSFLLRSGFVLKEDLEALDKSIRSLGKKWAALPQHASVEPLYLQYKEGGFNLFPLRSLADTCTVVQGLKYLHSEDPKIKELAQETLQAATAHRVRRPATAEELPGYLNHSMDGDLGNLSNDKANLWSRARVSLGLMKKTLSIKWTASGPSPNLTLEGLTLLPHAAERRIKTAYRDHFLKQLQSKRSQGVVSRSCANSSISNHFMHRGDYMSFADWRFIHSARLNVLGRNGTPWNTQDKRCRKCGKDNETIPHILNSCRPNLVAETRRHNNVVEKIVKALGTETLNNTRLNLTIPTITSTTRPDIVVFDLVNRSAVIIDITCPFDNDANGIPDARKKKIDKYTPEADALRAKGFAVYLGAVVIGSLGTFDDSNMKSFKALGITGRAATNLAKRLVCQVIRDSREIYNEHINSNRKNKNEANGEEEELIVIDAIGEDTPREDEQEEHLLMDFTEEEDTRPAPPTSHLDELRAVFA

SEQ ID NO: 14072 - protein, 1354 aa, Poecilobdella manillensis
MKCHHTTYASHNGLMRHLKHHHQVKVSLFQCRLCGHMAKSIKDMKLHAKVHAVPKKQKRDTALQAPKRGPGSTTSPPSPTPPPTKARTQAPASQPAAIPPPATKVRPPATSPKTATKPPKRPAAAPQLVLKMPPPAKPVCPPASSPKAASQPPKQQAVPSKPVLKMPPPATPVCPPASPPKVASQPPKRQAAASKPAPKIPPPATPVCPPTSPPKAASQPPKRQAVASKPAPKLPQPATPECPPASPPKAANQPPKRQAAESNPVVKKRPKKAPKPPQPETPPQPIASAAPPQDAPQAAAQDEATPECPPTSPPKAANQPPKRQAAASKPVTKKRPKKASKPPQPEAPPQPEAPPQDAPQAAAQDEAPPQLDGPSAEQTAWIDKIQTVSTQEELDDAANGLVEAIRAIIVVKTAEYQANKATATPGGKKEAATPAPRQQSNARPSDPRSAGRLQREFRENMRAAYRKVTEERSPVCPIAHDQIISHFAPAGDGPRTDDVEQDEPETTLHDIFDTPFATGEVWQKLKRTSNSSPGPDRIRYLHWKKFDQGCHILTALFNRCRDLHLIPRPWKTAKTILLHKKGDMEDPSNWRPIALINSVARLFTSCLATRMVRSIVSNQILCQEQKGFLPAEGCLEHNFVLQAIITDAKRRRKQLAVAWLDLRNAFGSVPHHVIHEALLRRKFNYRTRKLILELYKDTTTNFVTAEGPSEQTPIQSGVKQGCPLSPLIFNVAIDDLIACASKKAFTHGYTLHNQHHSILAYADDIVLMSESVDGLQHLLNEVGEAASAIQLKFNAAKCATLHLDGAKSKTLDTGFTIQGDTPPSLEEKDHYKYLGRPTGYKPFISAANSVKDLMEELEKIDASDLAPWQKNEAVNVFILSRLSFLLRSGFVLKEDLEALDKSIRTLGKKWAALPQHASVEPLYLPYKEGGFNLFPLRSLADTCTLVQGLKFLHSEDPKIKELAQETLQAATAHRVRRPATAEELPGYLNQSMEGDLGNLSNDKASLWSRTRVSTGLMKKTLPIEWSESGSSPNLTLEGLTLLPHAAERRIKVAYRDHYLKQLQGKRSQGAVSRSCANSSISNHFMHRGDYMSFAAWRFIHSARLNVLGRNGTPWNMQDTRCRKCGHDVETTPHILNSCRPNLVAETKRHNNVVDKIVDALRPEVLKNTRLNLTVPLLTSTARPDIVVFDLANRKAVIVDITCPYDNDADAIPDARKKKIEKYTPEADALRAKGFNVYLGAVVIGSLGTFDDSHNLKSFKALGITGHAALNLAKRLVCQVIRDSREIYEEHIHFNRDNEETTGEEDAPETTTNIGEDTAGEENQEEPLLMDFTEEEEVQPPRTASHLEELRTIFH

SEQ ID NO: 14073 - protein, 746 aa, Aphidius ervi
MVPFWKKVMETQGNSSPGIGNKEDVIEELWQPINEEEIKKSFPSKGTAAGPDGISARQLRSVPIETLLRLLNIFMCMERLPNHLLESRTTLIPKKEDASDPGEFRPITVSSVVTRLFHKVLASRIMKHINIDQRQKAFMKIDGCSENIFILDLVLKSYRENFKSVYMASIDVAKAFDSVTHQTIEDTMVNKGFPGSMIKYIMSTYRSSATRLKCEGWESEIIRPSCGVKQGDPLSPPLFILVIDRMMKALPPEVGVNIGDLSVNAEAFADDIVFFASTPEGLQQTIDQSVEFLAKCGLRINTNKSFTLAIKGLGKEKKSAVDVKTKFICMNREMPVLKRTDEWKYLGVSFTAAGRVTTNVVPMIKNQLEVITRAPLKPQQRLFALRTVLLPGLFHTITLGRTQLSILNKVDRIVRAAVKKWLDLPKDTITSYFHADVKDGGLSIPSMRWNMPLLRLTRLKNIKSCRTDNPSLASDYLAKELEISVRRLRDQGTVLDSSTKIRNKWKRHLQSSIDGGPLKDSHHVPQQHNWVVEGNRLLSGRDFLNLVKMRINAMPVRARTSRGRRTDRICRAGCYASETLNHVLQNCHRTAGARTRRHNAVATYLARNLKKSWQEVWEEPHLTTSEGLRKPDILAVRETVAVVIDVGIPSEQSDLRKAHRDKIKKYEGLERIIKDKYKVERVIFTAAIISSRGKWSRESAEDMFKIEALRKSELKILSTRVLIGGINALRMFNRMTTVQTDKRGVG

SEQ ID NO: 14074 - protein, 809 aa, Sinella curviseta
MKGDALPNATIIQAKSTSLPRRVKSKIAEGDIAGSVKILSSEDTIAPQDTSTFKELLSKHPAPNKPLSFPSAPLDEEILTVTEKEIKQAIYSFPNGSSSGIDGLRPQHLKDLISSGNGEAATRLIKSLTAFCNFVLSGKINDVIAPIFYGANLCALKKKDGGLRPIAVGQTFRRLVAKLACSSVRDKIGNHLRPTQLGFATKGGCEAVIHATRTFIDLHQSSRKVILKIDFKNAFNTINRDAMLTAVKLMTPGIFGFLWQAYFLPSILFFGEYKIDSVSGCQQGDPAGPLLFCLSIQPIIDKLISELVCFYLDDGMIAGEPEIVLEDFALLIKECEQIGLSINPSKCELFFCQDTDDCVVAQFQNLSPGIKIVTELTLLGAPITTNTISTIFKNKMEELSTLFRRITELNNCHIAYYLLRHCFAVPKMTYLLRTTPLWNYNELLSLVDQKIKLTLEKIMNVQLNPNQYLKASLPIKLGGLGIRRVTDISLPAFLSSVYGISKLVNMMLYRTDSDKPEISCHDEAMMEWNTRTGESNAPPAAFFQRNWDNIMLKLLLKNYTPASDSDKAIMLAVEKPEANAWLSALPSYTIGTLLENNSFRIAIGLRLGCTLCKPHVCVCGMEVDSLGHHGLACVKSTGRYSRHQDINNIIYRSLVSAKIPCRLEPVGMSRDDGKRVDGTTLIPWEKGKCLVWDATCTDTLAPSHLQASCEMAGSAAKQAAALKIRKYSSVIDANYTFLPFAVETLGPWCTEAIDFVNKVGALLALHTGETRSRSFLAQRIGIAIQRGNAVSVMGTFPSSESLSEIFYIL

SEQ ID NO: 14075 - protein, 1034 aa, Sinella curviseta
MEFIQQRMQVGFYKSLMVKPSDRVKDQSRNLIMEGNEVLCPCGKSDNPSSEIWILCDNCKTWLHSACANLSDEEAKQLEIDGTQWFCSSCTPHLTTQNDASSTESNKAQCPYCDRSFNSSVGLNIHVGKKHPEEKSQQQPPLKSREEHDITSQIAEMKRRVKVLKRIPKGARFAAATKLSSILDKCVSKNDSESWLTLMTFAFTCLCVPQKSNKNKSLASLVKSNINGTTGSNPSSVKFKATSLSRRVMSKVAEGDIAGSVKLLSSEDSIAPQDAANYQELLSKHPPPNKKLSFPVCPLDEETLMVTDNEVKLAIFSFPNGSSSGIDGLRPQHLKDLVSSGNGEAATRLLKSLTNFVNFVFSGNINAEILPVFYGANLCALKKKEGGLRPIAVGQTLRRLASKLACRSVRDEIGDYLRPTQLGFATKGGCEAIIHATRTFVEQNQSSKKVILKIDFKNAFNTINRDSMLHAVKSMTPGIFAFLWQAYFLPSILFFGDYNIPSISGCQQGDPAGPLLFCLSLQPIIDRLSSQLICFYLDDGLIAGEPETVLEDFTLLIKECEEIGLKINPAKCEIYFCQNPDDDIISQFHILSPGIKVVSDLALLGAPVTLNATHAVMNSKIEELSTLFKRIMTLDNYHIAYYLLRNCFAVPKMTYLLRTTPLWANKDILLVVDQKIKATLEQILNTQLNTSQYMKASLPIRVGGLGVRRVEDISLPAFLSSMYGVSQLVNKMFNRNDSDKPEISHHDEAFMEWNALTNNNNAPPAPCFQKNWDNILIQLTLDNVTPTSDCDKAIRLATEKQEANAWLTALPSNTIGTLLDNNSFRIAIGLRLGCLLCKPHTCICGMEVDSFGIHGLSCVKSTGRYSRHQDLNNIICRALVSAKIPCRLEPVGMSRDDGKRADGATLIPWEKGMCLVWDATCTDTLAPSHLPNSSKTAGSAAKQAATLKIRKYSSVLEANYSFLPFAVETMGPWCDEAMDFVNKLGGLIALHSGEPRSRSFLVQRIGIAIQRGNAVSVMGTFPLSESLSEVFYIL

SEQ ID NO: 14076 - protein, 1018 aa, Sinella curviseta
MVKPSDRVKDQSRNLIMEGNEVLCPCGKSDNPSSEIWILCDNCKTWLHSACANLSDEEAKQLEIDGTQWFCSSCTPHLTTQNDASSTESNKAQCPYCDRSFNSSVGLNIHVGKKHPEEKSQQQPPLKSREEHDITSQIAEMKRRVKVLKRIPKGARFAAATKLSSILDKCVSKNDSESWLTLMTFAFTCLCVPQKSNKNKSLASLVKSNINGTTGSNPSSVKFKATSLSRRVMSKVAEGDIAGSVKLLSSEDSIAPQDAANYQELLSKHPPPNKKLSFPVCPLDEETLMVTDNEVKLAIFSFPNGSSSGIDGLRPQHLKDLVSSGNGEAATRLLKSLTNFVNFVFSGNINAEILPVFYGANLCALKKKEGGLRPIAVGQTLRRLASKLACRSVRDEIGDYLRPTQLGFATKGGCEAIIHATRTFVEQNQSSKKVILKIDFKNAFNTINRDSMLHAVKSMTPGIFAFLWQAYFLPSILFFGDYNIPSISGCQQGDPAGPLLFCLSLQPIIDRLSSQLICFYLDDGLIAGEPETVLEDFTLLIKECEEIGLKINPAKCEIFFCQNPDDDIISQFHILSPGIKVVSDLALLGAPVTLNATHAVMNSKIEELSTLFKRIMTLDNYHIAYYLLRNCFAVPKMTYLLRTTPLWANKDILLVVDQKIKATLEQILNTQLNTSQYMKASLPIRVGGLGVRRVEDISLPAFLSSMYGVSQLVNKMFNRNDSDKPEISHHDEAFMEWNALTNNNNAPPAPCFQKNWDNILIQLTLDNVTPTSDCDKAIRLATEKQEANAWLTALPSNTIGTLLDNNSFRIAIGLRLGCLLCKPHTCICGMEVDSFGIHGLSCVKSTGRYSRHQDLNNIICRALVSAKIPCRLEPVGMSRDDGKRADGATLIPWEKGMCLVWDATCTDTLAPSHLPNSSKTAGSAAKQAATLKIRKYSSVLEANYSFLPFAVETMGPWCDEAMDFVNKLGGLIALHSGEPRSRSFLVQRIGIAIQRGNAVSVMGTFPLSESLSEVFYIL

SEQ ID NO: 14077 - protein, 1002 aa, Sinella curviseta
MDGNEVLCPCGKLDNPSSEIWILCDNCHVWFHSACANLSDEEAKRFETDGIQWLCNSCDLLFNTQNIKTADPSNKNQCPICHQTFTSVKGLSIHIGRKHPDLKHQHQPHPTPNVTIEDLASQLTDCKKKVKVLKRIPKGARFAAAIKLSSVLDECVSKNNLQSWLALFTFAFSCLCVPLKNDKKKSLATLVKSNINGNPTGISKLSNIQTSLSRRVKSKIAEGDVSGAVKILCSNDTLAPRDSTTYHELLSKHPPPCKQMSFPTPLDFQDSLAISDKEVKQAILSFPNGSSSGVDGLRPQHLKDLISIGNGEAGTRLLKSLTRFCNFVLSGKLNKDILPVFFGANLCALRKKEGSVRPIAVGNTLRRLVAKIACFSIRIPIGDYLRPVQFGFSTKGGCEAIVHATRSFINLNKSTNKVILKIDFRNAFNTIHRDSMLEEVKKRTPELFAFLSQAYSETSYLFFDDKIIPSVSGCQQGDPAGPLLFCLTIQPIIDNLISEFVSFYLDDGVIGGDPRTVLQDFSSLIKRCEDIGLHINPSKCELFFCNDVIEDVLQDFQLLSPGIKPIFKLSLLGAPITENFIEEHCQQKIEEMSLLFKRITELDNYHIAFFLLRSCFAVPKLIYLIRTTPLWQFKQILCYFDTEIKSTLEQILNCQLDSPQYFKASLPTRIGGLGIRKIQDLALPAFLSSVYSVSKLVNMMFNRDDSDKPEITYHDESMLEWTSVSKESSAPPAPSFQRNWDNILMKRFLEDFKPSTESEKAIALATERPESNSWLNVIPSFTVGTLLDNNTFRIAIGLRLGCKVCRPHTCVCGQEVDSFGHHGLSCAKSYGRYSRHQDLNNIIARALTSAKIPCRLEPVGLSRDDGKRVDGVTLIPWEKGKCLVWDSTCTDTLAPSHLPNSSKAAGSAAKLAASNKIRKYASVMEANYTFIPFAVETMGPWCEEAVELVNKLGGLLTLHSGEPRSRYFLVQRIGIAIQRGNAVSVMGTFPNSDSLSEIFYIL

SEQ ID NO: 14078 - protein, 1002 aa, Sinella curviseta
MDGNEVLCPCGKLDNPSSEIWILCDNCHVWFHSACANLSDEEAKRFETDGIQWLCNSCDLLFNTQNIKTADPSNKNQCPFCHQTFTSVKGLSIHIGRKHPDLKHQHQPHPTPNVTIEDLASQLTDCKKKVKVLKRIPKGARFAAAIKLSSVLDECVSKNNLQSWLALFTFAFSCLCVPLKNDKKKSLATLVKSNINGNPTGISKLSNIQTSLSRRVKSKIAEGDVSGAVKILCSNDTLAPRDSTTYNELLSKHPPPCKQMSFPTPLDFQDSLAISDKEVKQAILSFPNGSSSGVDGLRPQHLKDLISIGNGEAGTRLLKSLTRFCNFVLSGKLNKDILPVFFGANLCALRKKEGSVRPIAVGNTLRRLVAKIACFSIRIPIGDYLRPVQFGFSTKGGCEAIVHATRSFINLNKSTNKVILKIDFRNAFNTIHRDSMLEEVKKRTPELFAFLSQAYSETSYLFFDDKIIPSVSGCQQGDPAGPLLFCLTIQPIIDNLISEFVSFYLDDGVIGGDPRTVLQDFSSLIKRCEDIGLHINPSKCELFFCNDVIEDVLQDFQLLSPGIKPIFKLSLLGAPITENFIEEHCQQKIEEMSLLFKRITELDNYHIAFFLLRSCFAVPKLIYLIRTTPLWQFKQILCYFDTEIKSTLEQILNCQLDSPQYFKASLPTRIGGLGIRKIQDLALPAFLSSVYSVSKLVNMMFNRDDSDKPEITYHDESMLEWTSVSKESSAPPAPSFQRNWDNILMKRFLEDFKPSTESEKAIALATERPESNSWLNVIPSFTVGTLLDNNTFRIAIGLRLGCKVCRPHTCVCGQEVDSFGHHGLSCAKSYGRYSRHQDLNNIIARALTSAKIPCRLEPVGLSRDDGKRVDGVTLIPWEKGKCLVWDSTCTDTLAPSHLPNSSKAAGSAAKLAASNKIRKYASVMEANYTFIPFAVETMGPWCEEAVELVNKLGGLLTLHSGEPRSRYFLVQRIGIAIQRGNAVSVMGTFPNSDSLSEIFYIL

SEQ ID NO: 14079 - protein, 925 aa, Sinella curviseta
MPICHQTFTSVKGLSIHIGRKHPDLKHQHQPHPTPNVTIEDLASQLTDCKKKVKVLKRIPKGARFAAAIKLSSVLDECVSKNNLQSWLALFTFAFSCLCVPLKNDKKKSLATLVKSNINGNPTGISKLSNIQTSLSRRVKSKIAEGDVSGAVKILCSNDTLAPRDSTTYHELLSKHPPPCKQMSFPTPLDFQDSLAISDKEVKQAILSFPNGSSSGVDGLRPQHLKDLISIGNGEAGTRLLKSLTRFCNFVLSGKLNKDILPVFFGANLCALRKKEGSVRPIAVGNTLRRLVAKIACFSIRIPIGDYLRPVQFGFSTKGGCEAIVHATRSFINLNKSTNKVILKIDFRNAFNTIHRDSMLEEVKKRTPELFAFLSQAYSETSYLFFDDKIIPSVSGCQQGDPAGPLLFCLTIQPIIDNLISEFVSFYLDDGVIGGDPRTVLQDFSSLIKRCEDIGLHINPSKCELFFCNDVIEDVLQDFQLLSPGIKPIFKLSLLGAPITENFIEEHCQQKIEEMSLLFKRITELDNYHIAFFLLRSCFAVPKLIYLIRTTPLWQFKQILCYFDTEIKSTLEQILNCQLDSPQYFKASLPTRIGGLGIRKIQDLALPAFLSSVYSVSKLVNMMFNRDDSDKPEITYHDESMLEWTSVSKESSAPPAPSFQRNWDNILMKRFLEDFKPSTESEKAIALATERPESNSWLNVIPSFTVGTLLDNNTFRIAIGLRLGCKVCRPHTCVCGQEVDSFGHHGLSCAKSYGRYSRHQDLNNIIARALTSAKIPCRLEPVGLSRDDGKRVDGVTLIPWEKGKCLVWDSTCTDTLAPSHLPNSSKAAGSAAKLAASNKIRKYASVMEANYTFIPFAVETMGPWCEEAVELVNKLGGLLTLHSGEPRSRYFLVQRIGIAIQRGNAVSVMGTFPNSDSLSEIFYIL

SEQ ID NO: 14080 - protein, 1002 aa, Sinella curviseta
MDGNEVLCPCGKLDNPSSEIWILCDNCHVWFHSACANLSDEEAKRFETDGIQWLCNSCDLLFNTQNIKTADPSNKNQCPFCHQTFTSVKGLSIHIGRKHPDLKHQHQPHPTPNVTIEDLASQLTDCKKKVKVLKRIPKGARFAAAIKLSSVLDECVSKNNLQSWLALFTFAFSCLCVPLKNDKKKSLATLVKSNINGNPTGISKLSNIQTSLSRRVKSKIAEGDVSGAVKILCSNDTLAPRDSTTYHELLSKHPPPCKQMSFPTPLDFQDSLAISDKEVKQAILSFPNGSSSGVDGLRPQHLKDLISIGNGEAGTRLLKSLTRFCNFVLSGKLNKDILPVFFGANLCALRKKEGSVRPIAVGNTLRRLVAKIACFSIRIPIGDYLRPVQFGFSTKGGCEAIVHATRSFINLNKSTNKVILKIDFRNAFNTIHRDSMLEEVKKRTPELFAFLSQAYSETSYLFFDDKIIPSVSGCQQGDPAGPLLFCLTIQPIIDNLISEFVSFYLDDGVIGGDPRTVLQDFSSLIKRCEDIGLHINPSKCELFFCNDVIEDVLQDFQLLSPGIKPIFKLSLLGAPITENFIEEHCQQKIEEMSLLFKRITELDNYHIAFFLLRSCFAVPKLIYLIRTTPLWQFKQILCYFDTEIKSTLEQILNSQLDSPQYFKASLPTRIGGLGIRKIQDLALPAFLSSVYSVSKLVNMMFNRDDSDKPEITYHDESMLEWTSVSKESSAPPAPSFQRNWDNILMKRFLEDFKPSTESEKAIALATERPESNSWLNVIPSFTVGTLLDNNTFRIAIGLRLGCKVCRPHTCVCGQEVDSFGHHGLSCAKSYGRYSRHQDLNNIIARALTSAKIPCRLEPVGLSRDDGKRVDGVTLIPWEKGKCLVWDSTCTDTLAPSHLPNSSKAAGSAAKLAASNKIRKYASVMEANYTFIPFAVETMGPWCEEAVELVNKLGGLLTLHSGEPRSRYFLVQRIGIAIQRGNAVSVMGTFPNSDSLSEIFYIL

SEQ ID NO: 14081 - protein, 1001 aa, Sinella curviseta
MDGNEVLCPCGKPENPSSEIWIQCDLCQTWFHSGCVNLSDQEAKLLELAGSDWVCNSCDPLFRTQPDSNSSSSNKNQCPVCDQRFSTVKGLNIHIGRKHPDRKSQVLSSPDVNGLAIQLTENKRQVKVLKRIPKGARFAAATKLSSVLDQCVTKNDIASWMTLFTFAFTCLCVPQKNKKKSLATLVKSNISGTSFNFTSIQRSKTNTVTSLSRRVKSKVAEGDIKGSVRLLSSEDSIAPINEETYNDLLSKHPPSSRPPDFPEPPLDDTTLTVTEQDVKQAVFSFPNGSSSGIDGIRPQHLKDLVSSGNGEAATRLLKSLTIFVNFVISGKINSAIQPIFYGANLCALKKKEGGLRPIAIGQTLRRLVAKLACSSVRDSLGDFLRPKQLGFATKGGCEAAVHATRTFTNLHRASRKVVLKIDFRNAFNTVHRDAMLKTVKVMAAQLYAFIWQAYYIPSLLFFGEQTILSQSGCQQGDPAGPLLFCLSIQPVIEKLISELVCFYLDDGTIAGEPEAVLEDFKVIIKECEEIGLFINPTKCELYFCHQEEESVVSEFQKLSPGIKVVSELTLLGSPITRNSIRSVMQKKMDELGFLFKRISDLDNCHIAFYLLRSCFAIPKLTFLLRTAPLWYYKDLLRSIDAKLKNTLEEILNVNLDNTQHWKASLPIRLGGLGIRKVEDIALPCFLSSVYGISKLVNMMLYRTDSDEPLITHHDEAMDEWNILSNDNGTPIAPFSQKNWDNVLLGSTYKAFTPSSDSERAIMLATERRESNSWLAALPSVSIGTLLDNNTFRIAIGLRLSCQLCQPHTCICGEEVDADGHHGLSCIKSIGRYSRHQDINNIISRALVSAKIPCHLEPVGMSRNDGKRPDGATLIPWEKGQCLVWDATCTDTLAPSNIKNSCKDAGSAAKQAAVLKTRKYSAIIDANYNFVPFAVETMGPWCDEAVDFVNKLGGLIALQSGEPRSRSYLVQRIGIAIQRGNAASVMGTFPPSESFSEIFHIL

SEQ ID NO: 14082 - protein, 842 aa, Sinella curviseta
MALFTFAFTCLCVPQKKNKKSLATLVKANINGTAFNFTSIQRNKTNTVTSLSRRVKSKVAEGDIKGSVRLLSSEDSIAPINEETYNDLLSKHPPSSKPPDFPEPPMDDSTLAVTEKDVKQAVFSFPNGSSSGIDGIRPQHLKDLISSGNGEAATRLLKSLTIFVNFVLSGKVNSAIQPIFYGANLCALKKKGGGLRPIAIGQTLRRLAAKLACSSVRDSLGDFLRPKQLGFATKGGCESAVHATRTFTNLHRTSRKVVLKIDFRNAFNTIHRDAMLKTVKVMAIQLYAFIWQAYYIPSLPFFGEQTILSQSGCQQGDPAGPLLFCLSIQPVIEKLISELVCFYLDDGLIAGDPEAVLEDFKVIIKECEEIGLFINPTKCELYFCQQEEDSVVSEFQKLSPGIKVVTHLTLLGSPITKNSFYNIMQKKTEELAFLFKRISELDNCHIAFYLLRSCFAIPKLTFLLRTTPLWNCKDLLRTIDAEIKNTLEGILNVKLDSTQHWKSSLPIRLGGLGIRKVEDIALPCFLSSVYGISKLVNMMLYQKDSDEPLISDHDVAMQEWNILSNDNGTPPAPFSQKNWDNVLLGSTFKAYTPSSECETAIMLASEKPETNSWLSVLPSFTVGTLLDNNTFRIAIGLRLGCRLCQPHTCICGEEVDDKGHHGLSCTKSIGRYSRHQDINNLISRALVSAKIPCHLKPVGMSRNDGKRADGATLIPWEEKGQCLVWDATCTDTLAPSNIKNSSKNAGSAAKHAAVTKTRKYSSVINANYVFVPFAVETMGPWCDEAIDFVNKLGGLIALQSGEPRSRSFLVQRIGIAVQRGNAASVMGTFPSSESLSEIFHIL

SEQ ID NO: 14083 - protein, 1156 aa, Osmia bicornis
MGKEGGLDNPPVPERVLQNISPIQTGRNLPSCDTQLRCPNAPFGAISTENDLITNITNHGGISMPPFSGPSSSNSQLLPSSSGSSQSTTRNNVQLDYNVPIKFICPYCPKEFNSYRGLGVHKTSAHREKTNENIDINRKKPRWQSEDIKRIAMAERTAPAKVKKKINEYLLEKVQLHPARTVEAIKSLRKSTKYKEALRKLQDNLQNNNRNELEETIQETYTSTNINTYHDDLNEGRETNRIDDLEGNAYLERHVEEINEQNENTQKEAQNENTDTNTYRMETSHQDLSWCSDALRFLRSTACEDPGRYALGLAVEDARQERDPTNHLMEWCKLNLEVPENRNRRNNDEPREERQWSNKQRRKMEYARIQQLWRKNIGNVARTILEGAVETGSQISLQEQVKFWKPIFEETNNNSITMEDQGLVLPNQALIRPITCEEVARFQPKADTAKGADGVSPSDWIKKISNTVKAIIMNILMYTGKVPKEWARARTVLIPKAGDAQEPANYRPISIASIIIRHFHKILVNRLYTSLKPDDRQRGFIRADGVAEIIFTLTAILNKAWNEKKQVHVAFLDIKKAFDSVSHKSIIWVLKKKKIQEKLIEYIEQLYRKSELYIEINGSKSELIRPGQGVRQGDPLSPLIFNAIMDEILSTLPDTIGFEILGEIINGLAFADDLVLMASTKEGLQTLINEVSEEMLKHGLTLAPNKCQCLSLIPSGKDKKMKVIEQAWFKVGGKTIPQIGVLETWKHLGIKFSVRGPIKEKPSIEDFLEKISKAPLKPQQRIVILRSYLIPKFLHTLVLGKTNYVTLRQMDRLIRKYVRGWMHLPHDVPIAYFHARIRDGGLGILAFYTKIPHLTMKRIEGMKNSCLSLARKIAEADGIKKKYTWAKIHGKEDLKWDVQLYKQTDGFELRESSHATPSSSWVSDDRVTIPPRDWIKYHAVRINAIPSLMRTNRGRRRDMQSSLCRAGCRTVETTAHIIQECHRTHGGRILRHDSIAKNLAQYLLNKGYRTISEPKIPTREGLRKPDIITYKDGQALIIDIQIVSGYRNLNEAHMRKKRYYEENNDVISYVGNFFQVNRNRVRTSTVTISWRGIWSSQSYQLLRDIGVSKAVMRGLTTRVLLGSYLNFARFSKMTTIRMHHLWPFRRRQPAFREVPL

SEQ ID NO: 14084 - protein, 1130 aa, Argopecten irradians
MERYILRHPRGRTRVGEDERPIGQILETTPERNTDMRPINGRRGSICSCGKTCKNERGLKIHRTKMGCAPILNLAQRTEQSGETEEEEVPGNNHSNHSLHAPEGGEEQGGEVDSQRESAEDQIGQGEERRKRVKWPGSFNTVVWQQFDEDVDNILEAMFAGNIDRKVKGMATCIYSMGIERFGTEEKEIRGGNNRENRREKEIGNIRRELRALKKQFREASDVQKQPIIELTHGLRERLKTLRRAETNRRNRKERSRKRTSFVTNPFQFVKKLFGSKGSGKLVSSKEEVEEHLRKTHSDPRRAEDLAENTKIREVEEPTEAFDESEPKLSEVREIIKKARAGSAPGPNGVPYRVYKNCPRLLRRLWLLLRKVWRRGRLAESWNKAEGCFIPKEDNSKDISQFRTISLLNVEGKVMLAVLARRLTKYMLDNKYIDISVQKGGIPGVSGCLEHTSVLTQIIREARENKGKVAVLWLDLANAYGSIPHKLVEMTMEKYHVPEKFRILLKDYFDSFQMRFTVGDYTTAWQRLEVGIVTGCTISVILFAAAMNLIIKAVEKMSRGPYLSAGSRQPPTRAFMDDMTVTTKTVVEGRWTLRDLEEQITWARMRFKPAKSRSLVLKAGKVKEERFQIGGVDIPTVTEKPVKSLGKWFNGSLNDKNSVVEMKKQAEEWMKAVEKSGLPGKFKAWIYQHGVLPRLLWPLLVYEVPLTSVEAMERMISGHLRRWLNIPRSFSSVGLYSSGTKLQLPLKSLTEEFKVTKVRQVIMLRDSADDKVREARVVTRTGRKWDAKQALKEAEARLRHGDIVGSVASGRLGLGTITRPRWGSANQRTRRDMAQAEIRSMDEEARQVKAVSMRQQGSWTHWEGVRQRKVSWNDIWKMEGHRLSFLLKSTYDLLPSPTNLFTWGIKDNAECVLCRKPANLAHVLTSCQVALSDGRYTWRHDQVLKEVAASLDRARRKKRTISKGPKFVTFVKSGTRATGNVEAGGILATARDWEMRADIQQRMGFPAEVASTPLRPDVVLWSRSSKQVVLVELTVPWEDRMEEANERKQQKYQQLVEECQHRGWKTWCLPIEVGCRGFPGQSLWRALRLLGVTGADRRNLIAAVSRQAEVASSWIWRKREEKWIGHQQQC

SEQ ID NO: 14085 - protein, 904 aa, Alatina alata
MKEVKIVTQSKLESHAEILRTKEMWLDNLRALRVKLEKVEVRDMKIKNNSRFRRDEGGFYRSCGNITEYTGKTPTMDKFVEFWAGIWEDETTTPKRRWMEEVQKRLQAKVRTVEKFKIEEKALGKTIMKRKNWTAPGIDGIQNFWWKSFKSTWKPLSRIMQAWIDETSNIPEWIATGRTVLLPKTNNLTPEKDYRPITCLNTSYKMFTGVLAKYMKGHADKNEIWDVNQLGTCEKVLGTVDQLLIDNCITEEVRNHQRNLAVAFYDYQKAYDMVHHDYMLDVYRWMGIPANVCKVIEEIMNKWRTRLEICVEGVKKVSRWIKFKKGFLQGDSYSPVAFCLSEVPVAMLLEETDGYRMGKPRQRNVKRTHSLFIDDLKVYQENHQKLTIANEIIVQASHDTGACYGVNKCAEIIYEKGKMVHGEGLQILEERCRTLDPERNEVYKFLGCEQGEEIDTERVMDRVKKEVTKRMNQLVKANLYERNLIKAINCRVIPVAGYIMNVCRLRKKDIDSIEGIVKTILRKSHMHGKQSSDERLYLHRREGGRGLKKIGDVYQETKVRIACYMAKSENDWIRIAWDRELAKEGPSICEEAENALESLEMNVKFKENKIIMCGEEVEGEWKDVWQNLKKKMKSNRERKRKNEYHQKKMQSEVHRTLDDRSHIWLNTNIDPTKVAAIISMQEQMVETRVWKRIRGLEVVTDLCRLCGEQKETVHHLLSGCKILAGCEYLRRHNNVLSLMAMEWCKLKGLVNEKENSFNVHWKKGTVIEKDHYKMCWDFEFKLRKTTTARRPDLTLEDTERKKIWIVDMACPSEKNIDQKRREKLQKYQQLAFEVRERRPGYHVEIVPIVIGCLGGGVKEMEKGVCKLIDDKDRVNRICEQMQKTVLFESETILRTVLSGLIQGE

SEQ ID NO: 14086 - protein, 881 aa, Alatina alata
MPEITDAIYAMGKVVEKEILGNTKGIGKIANGRVKENRRIRKLKTRIKECRQIVARISNEIYRRKIRRKATSKEKKLMKEVKFVTQSKLESHAEILRTKEMWLDNLRALRVKLEKVEVRDMKIKNNSRFRRDEGGFYRSCGNITEYTGKTPTMDKFVKFWAGIWEDETTTPKRRWMEEVQERLQAKVRTVEQFKIEEKALGETIMKRKNWTAPGIDGIQNFWWKSFKSTWKPLSRIMQAWIDETSNIPEWIATGRTVLLPKTNNLTPEKDYRPITCLNTSYKMFTGVLAKYMKGHADKNEIWDVNQLGTCEKVLGTVDQLLIDNCITEEVRIHQRNLAVAFYDYQKAYDMVHHDYMLDVYRWMGIPANVCKVIEEIMNKWRTRLEICVEGVKKVSRWIKFKKGFLQGDSYSPVAFCLSEVPVAMLLEETDGYRMGKPRQRNVKRTHSLFIDDLKVYQENHKKLIIANEIIVQASHDTGACYGVNKCAEIIYEKGKMVHGEGLQILEERCRTLDPERNEVYKFLGCEQGEEIDTERVMDRVKKEVTKRMDQLVKANLYEKNLIKAINCRVIPVVGYIMNVCRLRKKDIDSIEGIIKTILRKSHMHGKQSSDERLYLHRREGGRGLKKIGDVYQETKVRIACYMAKSENDWIRIAWDRELAKEGPSICEEAENALESLEMNVKFKENKIIMCGEEVEGEWKDVWQNLKKKMKSNRERKRRNEYHQKKMQSEVHRTLDDRSHIWLNTNIDPTKVAAIISMQEQMVETRVWKRIRGLEVVTDLCRLCGEQKETVHHLLSGCKILAGCEYLRRHNNVLSLMAMEWCKLKGLVNEKENSFNVHWKKGTVIEKDHYKMCWDFEFKLRKQQRPDDQTSPWKIQRGRKYG

SEQ ID NO: 14087 - protein, 981 aa, Alatina alata
MPEITDAIYAMGKVVDKEILGNTKGIGKIANGRVKENRRIRKLKARIKECRQIVARISNEIYRRKIRRKATSKEKKLMKEVKIVTQSKLESHAEIMRTKEMWLDNLRALRVKLEKVEVRDMKIKNNSRFRRDEGGFYRSCGNITEYAGKTPTMDKFVKFWAGIWEDETTTPKRRCMEEIQKRLQAKVRTVEQFKIEEKALGETTMKRKNWTAPGIDGIPNFWWKSFKSTWKPLSRIMQAWIDETSNIPEWIATGRTVLLPKTNNLTPEKDYRPITCLNTSYKMFTGVLAKYMKGHADKNEIWDVNQLGTCEKVLGTVDQLLIDNCITEEVRNHQRNLAVAFYDYQKAYDMVHHDYMLDVYRWMGIPANVCKVIEEIMNKWRTRLEICVEGVKKVSRWIKFKKGFLQGDSYSPVAFCLSEVPVAMLLEETDGYRMGKPRQRNVKRTHSLFIDDLKVYQEKHKKLTIANEISVQTSHNTGACYGVNKCAEIIYEKGKMVHGEGLQILEERCRTLDPERNEVYKFLGCEQGEEIDTERVMDRVKKEVTKRMNQLVKANLYEKNLIKAINCRVIPVVGYIMNVCRLRKKDIDSIEGIVKTILRKSHMHGKQSSDERLYLHRREGGRGLKKIGDVYQETKVRIACYMAKSENDWIRIAWDRELAKEGPSICEEAENALESLEMNVKFKENKIIMCGEEVEGEWKDVWQNLKKKMKSNRERKRRNEYHQKKMQSEVHRTLDDRSHIWLNTNIDPTKVAAIISMQEQMVETRVWKRIRGLEVVTDLCRLCGEQEESVHHLLSGCKILAGCEYLRRHNNVLSLMAMEWCKLKGLVNEKENSFNVHWKKGTVIEKDHYKMCWDFEFKLRKTTTARRPDLTLEDTESKKILIVDMACPSEKNIDQKKREKLQKYQQLAFEVRERRPGYHVEIVPIVIGCLGGGVKEMEKGVCKLIDDKDRVDRICEQMQNTVLFESETILRKLLSGLIQGE

SEQ ID NO: 14088 - protein, 1190 aa, Alatina alata
MDETDKNHFITNQQHAKEQLRNPNHTVVTEYTGSMDNPQTCSENQFQKINSTWTVQQKIRLVIIDNEERRKGNGFMARVKIRFDTEFPEKKASKQNLRDNANRFRKEKEVLEALHQTQPIEGLLPRPIDSTSQTVWTTEMKIKLMQIDVEERSKGRGFMNRVKQRWDDEYPQHNIPAQTLRDNASRFKKEKGLKNLVMVRNREIISTLENQSVESENYEMGGGTQQVNEEASNNQEEGQERYVENIVEDDSSEYKRLRKQFQETLQQLTQSTRKETEQRGRLLKVRIGKELKKICDNILNDHLQKTKTMPEITDAIYAMGKVVEKEILGNTKGIGKIANGRVKENRRIRKLKARIKECRQIVARISNEIYRRKIRRKATSKEKKLMKEVKIVTQSKLESHAEILRTKEMWLDNLRALRVKLEKVEVRDMKIKNNSRFRRDEGGFYRSCGNITEYTGKTPTMDKFVEFWAGIWEDETTTPNRRWMEEVQKRLQAKVRTVEQFKIEEKALGETIMKRKNWTAPGIDGIQNFWWKSFKSTWKPLSRIMQAWIDETSNIPEWIATGRTVLLPKTNNLTPEKDYRPITCLNTSYKMFTGVLAKYMKGHADKNEIWDVNQLGTCEKVLGTVDQLLIDNCITEEVRNHQRNLAVAFYDYQKAYDMVHHDYMLDVYRWMGIPANVCKVIEEIMNKWRTRLEICVEGVKKVSRWIKFKKGFLQGDSYSPVAFCLSEVPVAMLLEETDGYRMGKPRQRNVKRTHSLFIDDLKVYQENHQKLTIANEIIVQASHDTGACYGVNKCAEIIYEKGKMVHGEGLQILEERCRTLDPERNEVYKFLGCEQGEEIDTERVMDRVKKEVTKRMNQLVKTNLYERNLIKAINCRVIPVAGYIMNVCRLRKKDIDSIEGIIKTILRKSHMHGKQSSDERLYLHRREGGRGLKKIGDLYQETKVRMACYMTKSENDWIRIAWDRELAKEGPSICEEAENALESLEMNVKFKENKIIMCGEELEGEWKDVWQNLKKKMKSNRERKRKNEYHQKKMQSEVHRTLDDRSHIWLNTNIDPTKVAAIISMQEQMVETRVWKRIRGLEVVTDLCRLCGEQKETVHHLLSGCKILAGCEYLRRHNNVLSLMAMEWCKLKGLVNEKENSFNVHWKKGTVIEKDHYKMCWDFEFKLRKTTTARRPDLTLEDTERKKIYS

SEQ ID NO: 14089 - protein, 987 aa, Alatina alata
MRERDSLPKIRKDRKAKQMIRLANQINKEIKQTQEMSITELNEIMYATAVVLTERKGINIKKKKSRSQRKQPAWKERIERDIRKKRGDLSVLSEMTRGNEVNQKKTRQMKRKYTIKDDQDIINVMEKLKQEILAKAQRVRRFEKRSKQYHQNKLFVEDGKKFYRELGKNQIKVEDPPDMVEIEQFWERIWENEKHHNEVAEWIKNEEERHKQQEEQEWKDIEKHEVTSAIKKASNWKSSGIDKVPNFWLKNLEELHGDIACQLTTIVNHPEKCPEWLTEGLTYLLPKTNDTRNPQNYRPITCLPTTYKLLTSVINDRTYRYLETHNLFPAEQKGCKRGSYGCKDQLLINKMILEDCHRKKKNLSTAWIDYKKAYDSVPHSWIIKVMQIYKVSPILIRFMKTSMEQWRTTMILNHAAGTLTSRQIKIKNGIFQGDSLSPLLFCLSLAPLSTMLNNTSCGYEIQGEKISHLLYMDDLKTYARNDVEQESLLTTVKIFSDDIKMEFGLDKCAKAAFRKGKLTHTSSLELDINTTIKQLEQEESYKYLGVNEGDGIQHSQMKEKIRKEYYRRVRLVLKSELNAANRIQAINTLAVPVVVYSFNIINWLLSDLKKIDAKTRKLLTCERMHHPKSDIDRLYLPRNEGGRGLTQLEATYKTTTIGLNTYLENTDDTLLKLVYHHETIKRLYSVSKESKKFRTELGMTEDTRKQNEPITSYAKRVKLNAKQNALLNLKHKWEGKVMHGQYPERINKPDVNQEDTHQWLRNSGLKAETEGFIIAAQDQSLPTRLYQHKIIKNGSEAKCRMCHSHDESVDHIVSGCPVLAKDEYLHRHDKAAAYIHWNICKEYNLPTAEKWYEHNPNTVTENAKCTILWDMPIHTDREIKANRPDIIVKDKTAKQCLLIDMTVPSERNVSTKEIEKLSKYKDLEIEITRMWEMKTTTIPVVIGALGLVKKGLDKYVNKIPGHNSISELQKIVLLGTSHILRKVLSLK

SEQ ID NO: 14090 - protein, 1216 aa, Alatina alata
MSVANGALTNYLMMSQTTRNSYRIARLAGQKGARHLVENQADGEKCTTGTNSAQSQTLEGNHTEEQPQQGPLNEQNVPTTRKREKWQRDEYKQIMKAYYTATYHPSNESNTKQTYTLWRAENQNRRLYIDENKLANVRRDIIRNKRLTDAEIEQIKQQIQRSRSEEDPDPQQLTREDQVVQQQTNNEEITIQFEENPQVLEQDKTDDDSEYKKLKDEILVKLAEVKHQDMRERDSLPKIRKDRKAKQMIRLANQINKEIKQTQEMSITELNEIMYATAVVLTERKGINIKKKKSRSQRKQPAWKERIERDIRKKRGDLSVLSEMTRGNEVNQKKTRQMKRKYTIKDDQDIINVMEKLKQEILAKAQRVRRFEKRSKQYHQNKLFVEDGKKFYRELGKNQIKVEDPPDMVEIEQFWERIWENEKHHNEVAEWIKNEEERHKQQEEQEWKDIEKHEVTSALKKASNWKSSGIDKVPNFWLKNLEELHGDIACQLTTIVNHPEKCPEWLTEGLTYLLPKTNDTRNPKNYRPITCLPTTYKLLTSVINDRTYRYLETHNLFPAEQKGCKRGSYGCKDQLLINKMILEDCHRKKKNLSTAWIDYKKAYDSVPHSWIIKVMQIYKVSPILIRFMKTSMEQWRTTMILNHAAGTLTSRQIKIKNGIFQGDSLSPLLFCLSLAPLSTMLNNTSCGYEIQGEKISHLLYMDDLKTYARNDVEQESLLTTVKIFSDDIKMEFGLDKCAKAAFRKGKLTHTSSLELDINTTIKQLEQEESYKYLGVNEGDGIQHSQMKEKIRKEYYRRVRLVLKSELNAANRIQAINTLAVPVVVYSFNIINWLLSDLKKIDAKTRKLLTCERMHHPKSDIDRLYLPRNEGGRGLTQLEATYKTTTIGLNTYLENTDDTLLKLVYHHETIKRLYSVSKESKKFRTELGMTEDTRKQNEPITSYAKRVKLNAKQNALLNLKHKWEGKVMHGQYPERINKPDVNQEDTHQWLRNSGLKAETEGFIIAAQDQSLPTRLYQHKIIKNGSEAKCRMCHSHDESVDHIVSGCPVLAKDEYLHRHDKAAAYIHWNICKEYNLPTAEKWYEHNPNTVTENAKCTILWDMPIHTDREIKANRPDIIVKDKTAKQCLLIDMTVPSERNVSTKEIEKLSKYKDLEIEITRMWEMKTTTIPVVIGALGLVKKGLDKYVNKIPGHNSISELQKIVLLGTSHILRKVLSLK

SEQ ID NO: 14091 - protein, 987 aa, Alatina alata
MRERDSLPKIRKDRKVKQMIRLANQINKEIKQTQEMSITELNEIMYATAVVLTERKGIKIKKKKSRSQRKQPAWKERIERDIRKKRGDLSVLSEMTRGNEVNQKKTRQMKRKYTIKDDQDIINVMEKLKQEILAKAQRVRRFEKRSKQYHQNKLFVEDGKKFYRELGKNQIKVEDPPDMVEIEQFWERIWENEKHHNEVAEWIKNEEERHKQQEEQEWKDIEKHEVTSALKKASNWKSSGIDKVPNFWLKNLEELHGDIVCQLTNIVNHPEKCPEWLTEGLTYLLPKTNDTRNPKNYRPITCLPTTFKLLTSVINDRTYRYLETHNLFPAEQKGCKRGSYGCKDQLLINKMILEDCHRKKKNLSTAWIDYKKAYDSVPHSWIIKVMQIYKVSPILIRFMKTSMEQWRTTMILNHAAGTLTSRQIKIKNGIFQGDSLSPLLFCLSLAPLSTMLNNTSCGYEIQGEKISHLLYMDDLKTYARNDVEQESLLTTVKIFSDDIKMEFGLDKCAKAAFRKGKLTHTSSLELDINTTIKQLEQEESYKYLGVNEGDGIQHSQMKEKIRKEYYRRVRLVLKSELNAANRIQAINTLAVPVVVYSFNIINWLLSDLKKIDAKTRKLLTCERMHHPKSDIDRLYLPRNEGGRGLTQLEATYKTTTIGLNTYLENTDDTLLKLVYHHETIKRLYSVSKESKKFRTELGMTEDTRKQNEPITSYAKRVKLNAKQNALLNLKHKWEGKVMHGQYPERINKPDVNQEDTHQWLRNSGLKAETEGFIIAAQDQSLPTRLYQHKIIKNGSEAKCRMCHSHDESVDHIVSGCPVLAKDEYLHRHDKAAAYIHWNICKEYNLPTAEKWYEHNPNTVTENAKCTILWDMPIHTDREIKANRPDIIVKDKTAKQCLLIDMTVPSERNVSTKEIEKLSKYKDLEIEITRMWEMKTTTIPVVIGALGLVKKGLDKYVNKIPGHNSISELQKIVLLGTSHILRKVLSLK

SEQ ID NO: 14092 - protein, 1336 aa, Strongyloides papillosus
MSIKNFTINNKNITKNITNDNSKITWTNQQISAVLKVLPKCKLDENHKTTLDISTKQLKQLINSVNKTEEQILEYLDFEFKNRLFLQLPITSLPIPSSEMNSQRLKIQNRLNIKHKDIPKSIKQGSVSENTLSKSLSADQFRACLTQSQSNTIQTPVKFSRKRHSNDFDSTIIEQSPIKRLNSETFNESSSLTFVDKILETINEKPKITFADVVSKNISNNKDISNYKNKFKQNTNFKDKNKFKPNFKNKNSTQDNSLNKPKERKLLKDMSFEERFKLFENAKGPLFRFEITKKTPLLEANIFLADKLKDLNKVWLKDKIDEKESMKTWQKANKILRTIHRVLKSYHYQKIDLEGLRVENQVRIKRSINKTSRFIEQTTALVKVTKSSNDRKTKNAANAKLRKIVSINKKKFHNVEQILKFNNDKISILRKRLTTVVNSYNKFKIRKKFQIKPSIKSIIDQEPKKYPISNDTITTYLEGLFSYEKPAEPKLISEWIESTKFEKQKVFGELFNEVLFDEILKYSRPFKAAGLNSVYVVIFKKLKSAKNFLISWIKGVLDNRIPLTKTDITGKCFSIFKSGDQNKPENYRFINILNSHYKLLNKYINNLISSHLYKILPLEQFANKAGRDGLLDATLINRILQKATFENSTQVKQSWIDFSKAFDSINHGSLKLILNHLNFDERLIKLLIDSMKYYSLSLGNSFNDKNNTKNNLKTKKLQTIKLQKGIFQGDSVAPTLFCMTLIPLSYHLNKKPRIELTTNLKLNHILFYDDIKLFASDINTLTEITNLVEVYGLEVGLKTNKKKCAYTTDDPIPIDANNPSILIDYTELKNTYKHLGILENQFGADAKENLDKLKEAVDKALDITLSSPLSVGEMVKCINTCITPKILYCFSHIGDENIRRKVATEFDCFIRAKLNNHKIKLTSLTNSRLYLSRDNLGLGLKNMELELDKINLKNYIHVHFTNLFRGLRDRFTIMHEQFKFLSQKYQLNVILNDTSIQINNEDIDNERTAKYRITHYLDKFSETYWLNHYKKSRQFPITYIEKELITPWSASTDFKPNQFKKIVMFQENLHPALNNAVNPDKNSRCVLVDKDNKRCNRFDSINHILSDCPNNNPNKIIRHDKTLYELVNLISVSKARKFIDFSDLKKTHIFRDIKLEVDQPHKILTTLHHNRPDLIIHTPDLIYVCDLTICNISNLDDAATLKRQRYDLDGSKELIKPIPHNQEIGHANKPNFCKHLRNSQEKPVCFIPLCFANFGEINEKNKNYWYTIFEALKMDCKKSLEKISRRVALESEFMAFKYVNYKHKASQKATTLDTQPPLQPQGDNSQIMDVDMSTET

SEQ ID NO: 14093 - protein, 1336 aa, Strongyloides papillosus
MSIKNFTINNKNITKNITNDNSKITWTNQQISAVLKVLPKCKLDENHKTTLDISTKQLKQLVNSVNKTEEQILEYLDFEFKNRLFLQLPITSLPIPSSEMNSQRLKIQNRLNIKHKDIPKSIKQGSVSENTLSKSLSADQFRACLTQSQSNTIQTPVKFSRKRHSNDFDSTIIEQSPIKRLNSETFNESSSLTFVDKILETINEKPKITFADVVSKNISNNKDISNYKNKFKQNTNFKDKNKFKSKFKNKNSTQDNSLNKPKERKLLKDMSFEERFKLFENAKGPLFRFEITKKTPLLEANIFLADKLKDLNKVWLKDKIDEKESMKTWQKANKILRTIHRVLKSYHYQKIDLEGLRVENQVRIKRSINKTSRFIEQTTALVKVTKSSNDRKTKNAANAKLRKIVSINKKKFHNVEQILKFNNDKISILRKRLTTVVNSYNKFKIRKKFQIKPSIKSIIDQEPKKYPISNDTITTYLEGLFSYEKPAEPKLISEWIESTKFEKQKVFGELFNEVLFDEILKYSRPFKAAGLNSVYVVIFKKLKSAKNFLISWIKGVLDNRIPLTKTDITGKCFSIFKSGDQNKPENYRFINILNSHYKLLTKYINNLISSHLYKILPLEQFANKAGRDGLLDATLINRILQKATFENSTQVKQSWIDFSKAFDSINHGSLKLILNHLNFDERLIKLLIDSMKYYSLSLGNSFNDKNNTKNNLKTKKLQTIKLQKGIFQGDSVAPTLFCMTLIPLSYHLNKKPRIELTTNLKLNHILFYDDIKLFASDINTLTEITNLVEVYGLEVGLKTNKKKCAYTTDDPIPIDANNPSILIDYTELKNTYKHLGILENQFGADAKENLDKLKEAVDKALDITLSSPLSVGEMVKCINTCITPKILYCFSHIGDENIRRKVATEFDCFIRAKLNNHKIKLTSLTNSRLYLSRDNLGLGLKNMELELDKINLKNYIHIHFTNLFRGLRDRFNIMHEQFKFLSQKYQLNVILNDTSIQINNEDIDNERTAKYRITHYLDKFSETYWLNHYKKSRQFPITYIEKELITPWSASTDFKPNQFKKIVMFQENLHPALNNAVNPDKNSRCVLVDKDNKRCNRFDNINHILSDCPNNNPNKIIRHDKTLYELVNLISVSKARKFIDFSDLKKTHIFRDIKLEVDQPHKILTTLHHNRPDLIIHTPDLIYVCDLTICNISNLDDAATLKRQRYDLDGSKELIKPIPHNQEIGHANKPNFCKHLRNSQEKPVCFIPLCFANFGEINEKNKNYWYTIFEALKMDCKKSLEKISRRVALESEFMAFKYVNYKHKTSQKATTLDTQPPLQSQGDNSQIMDVDMSTET

SEQ ID NO: 14094 - protein, 1336 aa, Strongyloides papillosus
MSIKNFTINNKNITKNITNDNSKITWTNQQISAVLKVLPKCKLDENHKTTLDISTKQLKQLVNSVNKTEEQILEYLDFEFKNRLFLQLPITSLPIPSSEMNSQRLKIQNRLNIKHKDIPKSIKQGSVSENTLSKSLSADQFRACLTQSQSNTIQTPVKFSRKRHSNDFDSTIIEQSPIKRLNSETFNESSSLTFVDKILETINEKPKITFADVVSKNISNNKDISNYKNKFKQNTNFKDKNKFKPNFKNKNSTQDNSLNKPKERKLLKDMSFEERFKLFENAKGPLFRFEITKKTPLLEANIFLADKLKDLNKVWLKDKIDEKESMKTWQKANKILRTIHRVLKSYHYQKIDLEGLRVENQVRIKRSINKTNRFIEQTTALVKVTKSSNDRKTKNAANAKLRKIVSINKKKFHNVEQILKFNNDKISILRKRLTNVVNSYNKFKIRKKFQIKPSIKSITDQEPKKYPISNDTITTYLEGLFSYEKPAEPKLISEWIESTKFEKQKVFGELFNEVLFDEILKYSRPFKAAGLNSVYVVIFKKLKSAKNFLISWIKGVLDNRIPLTKTDITGKCFSIFKSGDQNKPENYRFINILNSHYKLLTKYINNLISSHLYKILPLEQFANKAGRDGLLDATLINRILQKATFENSTQVKQSWIDFSKAFDSINHGSLKLILNHLNFDERLIKLLIDSMKYYSLSLGNSFNDKNNTKNNLKTKKLQTIKLQKGIFQGDSVAPTLFCMTLIPLSYHLNKKPRIELTTNLKLNHILFYDDIKLFASDINTLTEITNLVEVYGLEVGLKTNKKKCAYTTDDPIPIDANNPSILIDYTELKNTYKHLGILENQFGADAKENLDKLKEAVDKALDITLSSPLSVGEMVKCINTCITPKILYCFSHIGDENIRRKVATEFDCFIRAKLNNHKIKLTSLTNSRLYLSRDNLGLGLKNMELELDKINLKNYIHVHFTNLFRGLRDRFTIMHEQFKFLSQKYQLNVILNDTSIQINNEDIDNERTAKYRITHYLDKFSETYWLNHYKKSRQFPITYIEKELITPWSASTDFKPNQFKKIVMFQENLHPALNNAVNPDKNSRCVLVDKDNKRCNRFDNINHILSDCPNNNPNKIIRHDKTLYELVNLISVSKARKFIDFSDLKKTHIFRDIKLEVDQPHKILTTLHHNRPDLIIHTPDLIYVCDLTICNISNLDDAATLKRQRYDLDGSKELIKPIPHNQEIGHANKPNFCKHLRNSQEKPVCFIPLCFANFGEINEKNKNYWYTIFEALKMDCKKSLEKISRRVALESEFMAFKYVNYKHKASQKATTLETQPPLQSQGDNSQIMDVDMSTET

SEQ ID NO: 14095 - protein, 1336 aa, Strongyloides papillosus
MSIKNFTINNKNITKNITNDNSKITWTNQQISAVLKVLPKCKLDENHKTTLDISTKQLKQLVNSVNKTEEQILEYLDFEFKNRLFLQLPITSLPIPSSEMNSQRLKIQNRLNIKHKDIPKSIKQGSVSENTLSKSLSADQFRACLTQSQNNTIETPVRISRKRHSNDFDSTIIEQSPIKRLNNETFNESSSLTFVDKILETINEKPKITFADVVSKNISNNKDISNYKNKFKQNTNFKDKNKFKPNFKNKNSTQDNSLNKPKERKLLKDMTFEERYKLFENAKGPLFRFEITKKTPLLEANIFLADKLKDLNKVWLKDKIDEKESMKTWQKANKILRTIHRVLKSYHYQKIDLEGLRVENQVRIKRSINKTSRFIEQTTALVKVTKSSNDRKTKNAANAKLRKIVSINKKKFHNVEQILKFNNDKISILRKRLTTVVNSYNKFKIRKKFQIKPSIKSIIDQEPKKYPISNDTITTYLEGLFSYEKPAEPKLISEWIESTKFEKQKVFGELFNEVLFDEILKYSRPFKAAGLNSVYVVIFKKLKSAKNFLISWIKGVLDNRIPLTKTDITGKCFSIFKSGDQNKPENYRFINILNSHYKLLTKYINNLISSHLYKILPLEQFANKAGRDGLLDATLINRILQKATFENSTQVKQSWIDFSKAFDSINHGSLKLILNHLNFDERLIKLLIDSMKYYSLSLGNSFNDKNNTKNNLKTKKLQTIKLQKGIFQGDSVAPTLFCMTLIPLSYHLNKKPKIELTTNLKLNHILFYDDIKLFASDINTLTEITNLVEVYGLEVGLKTNKKKCAYTTDDPIPIDANNPSILIDYTELKNTYKHLGILENQFGADAKENLDKLKEAVDKALDITLSSPLSVGEMVKCINTCITPKILYCFSHIGDENIRRKVATEFDCFIRAKLNNHKIKLTSLTNSRLYLSRDNLGLGLKNMELELDKINLKNYIHVHFTNLFRGLRDRFTIMHEQFKFLSQKYQLNVILNDTSIQINNEDIDNERTAKYRITHYLDKFSETYWLNHYKKSRQFPITYIEKELITPWSASTDFKPNQFKKIVMFQENLHPALNNAVNPDKNSRCVLVDKDNKRCNRFDNINHILSDCPNNNPNKIIRHDKTLYELVNLISVSKARKFIDFSDLKKTHIFRDIKLEVDQPHKILTTLHHNRPDLIIHTPDLIYVCDLTICNISNLDDAATLKRQRYDLDGSKELIKPIPHNQEIGHANKPNFCKHLRNSQEKPVCFIPLCFANFGEINEKNKNYWYTIFEALKMDCKKSLEKISRRVALESEFMAFKYVNYKHKASQKATTLETQPPLQSQGDNSQIMDVDMSTET

SEQ ID NO: 14096 - protein, 1337 aa, Strongyloides ratti
MSIKNFTINNKNITKNITNDNIKIPWTSNQISTVLKVLTKCRLDENHKILLDISTKQFKQLVNSVNKTEEQILEYLDFEFKNRLFLQLPITSLPIPPSELNSQRLKIQNRFNIKHKDIPKSIKQGSVSENTLSKSLSADQFKTCLTQNQSNITQTPSRNPRKRCSNDLNSITEQSPIKRLNNENESFNDSSNLTFIDKILETINEKPKITFANIVKKNISKNNDIINYKDKFKNKFKQNFKNKNNFKFKNTISKQDNSLTTLKEKKLLKDMSFEERYKTFENTKGPLFRFEITKKTPLVEANIFLENKLKDLNKIWLKDKIDEKESMKTWQKANKILRTIHKVLKSYHYQKIDLEGLRVENQIRIKRSINKTNRFIEQTSALVKVTKSSYDKKTKNAANAKLRKIVNTNKKKFHNVEQILKFNNDKISILKKRLTTVVNSYNKFKIRKRFQIKPSLKSIIDQEPKKYPISNDTITTYLEGLFSYEKPTEQKLIGEWIESTKFEKQNIIDELFDEVLFDEILKYSRPFKAAGLNSVYVVIFKKLKSAKNFLISWIKGVLDNRIPLTKTDITGKCFSIFKSGDQNKPENYRFINILNSHYKLLTKYINNLISSHLYKILPLEQFANKAGRDGLLDATLINRVLQKATFENSTQVKQSWIDFSKAFDSINHESLKLILKHLNFDDRLIKLLTDSMKYYSLSLGNSFNDKNNTKNNVKTKKLQTIKLQKGIFQGDSVAPTLFCMTLIPLSYHLNKKTKIELTNNLKLNHILFYDDIKLFASDINTLTEITNLVETYGLEVGLKTNKKKCAYTTDDPIPIDINNPSILLDYTELKTTYKHLGILENQFGADTRENLDKLKEVIDKALDITLSSPLSVGEMVKCINTCITPKILYCFSHIGDENIRRKVATQFDCLIRAKFNNHKIKLTSLTNSRLYLSRDNLGLGLKNMELELDKINLKNYIHIHFTKLFQDLKNRFTTMHEQFKYLAQKYQLDIILNDSSIQINNEDIYNEKTAKYRITHYLDKFSEIYWLNHYKKTRQFPITYIEKELITPWSASTDFKPNQFKKIVIFQENLHPALNNATNPDKNSRCVLVDNDNKRCNRFDNINHILSDCPNNNPNKIIRHDKTLYELVNLISISKARKFLDFSDLKKTHIFKDIKLEVDQPHKILTTLHHNRPDLIIHTPNIIFVCDITICNISNLDDAATLKRQRYDLDGTKELTKPIPHNQEIGHANKPNFCKHLRNSQEKPVCFIPLCFANFGEINKKNKNNWYTIFEALNMDCKKSLEKISRRVALESEFMAFKYVNYKQKTSQQTITLDAQPSPQTQEDKRQVMDVDMSTET

SEQ ID NO: 14097 - protein, 679 aa, Adoxophyes honmai
MLSGNVCTDIAPVLYGANLIALRKKDGGIRPIAVGSTLRRLVSKICCRTFRTCLTEKFKVKQIGFGVRGGCEAAVHATRTFLNSENYEVLLKIDVKNAFNSVNRSTLLTEIEKELPEIYHYMWQCYATPSKLMFGDSEILSCVGCQQGDPLGPVIFSLAINPIITQLTSDLNIWYLDDGTIGGKAATVLEDLKTIITRFSDIGLTLNPNKCEIFIADSLSEIDRIQIITSFNSLVPNISILEKDSLTLLGAPIFDDAVVPTFKSKIMNFNNSSDQLFQINPHIAMYILRLCLFSPKIMYLLRCCPVFKFNSLKETIDSILQETVCKILNISPSSTSWTQATLPIKFGGLGLRTTCDLALPAFLSSIYSTITLIGGILNIPNPSDVTVSCLVDAEAAWSINDHGGTVPVEKSSQAAWTNICNDATYNRLLNGCSDIVERARLLAISEPESGHWLHALPSRNLGKILDPASLRTAVCLRLGLKVCEPHTCCRCGNSVDALGRHGLHCQLSAGRVFRHASLNDLIRRALSTIAIPATLEPSGLSASDGKRPDGCTLVPWGMGKPLAWDVTCSDTLAPSYVRGSANKPGTAADHAQTIKCRKYAFLTNDYIFAALAFETLGPWSSDTKKFVREVSDKLISVSGDLRAGTFFAQRLSIAVQRGNAASILGSIPRAGEIQEFNFL

SEQ ID NO: 14098 - protein, 965 aa, Adoxophyes honmai
MSYSSSQLTECVICNDRKLYKGSRGLNIHCGKTHIPRIDPLVPITNNSRCLSSTQPGASSPCSSADSLSARLAQLKAETKIVKRIPKGARASAARSLSECVASVVAKNDFNSWECLLTFAYKNLHIPHEKTNTTLTNLIKQNVLNPSFQSYRSYSANNSILPCNNRPGNKIKLIENKVSEGNVKGAANLLFSSDTLALNSPSVLATLREKHPAASASLQLPPAPSATQGSLQVSETATLQAIRSFPNGSAGGLDGITPQHLKDLTNPILGDVGESLLKELTALVNLMLSGNICTDIAPVLYGANLIALKKKDGGIRPIAVGSTLRRLVSKICCRAFRTCLTEKFKVKQIGFGVRGGCEAAVHATRTFLNRQNYEILLKIDVKNAFNSVNRSTLLAEIEKEIPEIYHYMWQCYATPSKLMFGDSEILSCVGCQQGDPLGPVIFSLAINPIITQLTSELNIWYLDDGTIGGKAATVLEDLKTIITKFSDIGLTLNPNKCEIFIADSLSEINRIQIINSFNSLVPNISILVKDSLTLLGAPIFDDAVIPTFKSKIANFNTSSDLLFQINPHIAIYILRLCLFSPKIMYLLRCCPIFKFNSLKDNIDSILQETVCKILNICPSSSSWTQATLPIKFGGLGLRTTCDLALPAFLSSIYSTITLIGGILNIPNPSDVTVSCLVDAEAAWSLDNHGEEAPVEKSSQAAWTTIHNNATYNRILNGCGDIAERARLLAVSEPESGHWLHALPSRNLGTILDPASLRTAVCLRLGMKVCEPHACCRCGNNVDALGRHGLHCQLSAGRAFRHASLNDFIRRALSTIAIPATLEPSGLSASDGKRPDGCTLVPWGMGKPLAWDVTCSDTLAPSYVRGSAIKPGTAADQAQTIKCRKYAFLTNDYIFAALAFETLGPWSSDTKKFVREVSDKLISASGDLRAGTFFAQRLSIAVQRGNAASILGSLPRAGEIQGFHFL

SEQ ID NO: 14099 - protein, 2055 aa, Steinernema diaprepesi
MASGLRYRPISAPIQKGNWSENGQRVVRTPPMKSPGFPLMRECMGTKEEIPPMPANPGFGPTTPAGDLGGSAAVSKPSCHCPRVDDRPSVSRLGCYPPKGCPAKGVVGSAAASRLTCSPLVGRRPMGVSSAGEDGNIQRSLAYGDAPIRSSCECQSHSSHRIETTIRVSDDKIVVQTGSGPEEVTIRISSPPSRSGRGHPPHLSPRVHGELPGWSRCDCEHCGHTPPEGSCFSPYGEHCRGFSCHFAIDETPVKTALNSGYHGARDKSEERILGKKAPFDLCQSAPPPDSRQDSRIHSLIRPEDSCCRMVKVRYPGGKWTEEGRKVLPGTHHRCGEGLTAQRSAYCCSERFNTRGEGPKTQRPKGDSIGSINPVPTRYTEGPQRGEVLTDQRSLVATKYRLMKSDVGDRERWPDLQSAWKSGGGKPRCADSKPQSTKSGGGRMKASPKVGKKGVQTRTRDGECDSRTLKTPTRIDDETLSAEKTPVTCASSTKTRKAVAAKTRAMAVAEKSRRCDTTKTRFAEAAPVPDSSLRHQEVSRCSDAVWKTADEEGGGPSITFPYPVGHSLSCPLSCDKKYAGINAVSSILRHLKVSHDVCPVLTRYQCRYCEFAVPDSKTKRPTMLVNSHIKKVHGQLLKGVKPVTPELEFPCLRCGKQYPSKRGLSNHMQRCGKVKAERWDKSVSIDQPDTKARSEDITAPIISTHSDAPSPIILSDSPVASPRDPFLPLRHSSGTQAWLTSDLIRRYLDLRLPNNLVVDPAVFEMTSLTDRSCVFSNRMNDLGTGDIFIPINVGNHWVLASVGQSEKSVRYYDTMGGSPPPSIANRLMELCSALNIKGDRIVVMPTSYFHHQTDSYNCGPYVCMLAERLAHSKSTLFGKDDADRWRKAALRFLIKPTSKIFRLPLGYSSPSDSKGCLVEDHKAFACHDATASTPREDEVRTLKVEATRPMPSPKFVDNNAPSLSGTVTTGRESKVNQSEERIVTRGVPNNDGGKAVPDSLKPCVDVVQEDATRVDHARLPEQKLSNHLRSLCADCTIWDHANSCLTSIPRMIDALRRGKDPLNKDEWKQVVMTTTPEDETGVATQTNLRRGFVSRTAEIPRQGFVSRTAEIPEADLSQKDLIRLYKEDRAKCIAKLLPNTNVRCTIPKSDCEAFFKNVFASPPAVEFPTLLQQVGERLPRVQDGYGEMLMSMIRPDEVLRALKRPSTAPGPDRVTYRELLDIDPTGEILSSLLSHCLTAQKIPATWKQAKTILLYKKGDQKDLSNWRPITLSNVMYKVYTAILAKRVSSMSDLISPSQKGFTDFDGCGDHTATLSTLIERSVNTKSSLYVSWLDLRNAFGSVPHNVILNTLAHMDFPSGFVEIVRDLYTDSCTTIQTALGQTRSIPILSGVKQGDPISPILFNLCIEVLLRSLESYDVTLLAFADDLALAAPSHAQLQKALDALVENARLMGLTFNPKKCAALLVEKGKLSNTKSVTVAGTQIRILDDEGTYSYLGIQLGVHSRTKMDGLLRQSLEDAKLLCNSKLAPWQILDALKTFIYSRFSFFIRNGDPLLKDLKIFDNHLSRLVKKLINVPNKGTARHYLYGAASKGGLGLPSLTDEYHISSVAAIARLLFSKDTVVQSLMTEEFSRLVAKWLKTPVSTLADRVDFLNCSDRFDGRLQGNESHSVWTRMRRSTRFLRSFLGTFEFVLLDGNRLGIKTDSTERTIDLSRPSASSLLRRIVSLRHISIMTETYKSQGKVLAVTCKTDLSNRFLRDGQYVSFSAYRWIHRARLNLHLVNGNNRLQTDQRCRRCGQLETLPHILNHCKHGMTRITDRHNAVQNRLVKAIPRRNGVKVLVNQCIPGIDSNNRPDIVVLNENKKEALIIDITVPFENGHDALQIAFDRKVEKYRTEQQQLQHIGYRVTAGAFIIGSLGTWFSGNATCLKLLGIRRAYTRKMIPLMLSETVERSKDVFWHHILAKKFQPRRGYFDTGKLKVAKASNAGTKETPRQSAAPKTQLSPADKSITAPPNHLKRPSMLLETPKDAPKKKLRGRPDRKRTRTSPLTSPPTAKRRI

SEQ ID NO: 14100 - protein, 1254 aa, Hypothenemus hampei
MSQETALTGQGRSNGGGQLSNLSGGARASVASPSPNTVPSYFCGVCGAGYRTRSGLSKHRKTCGTNTRTECNYCARTFSTYLALRCHERAAHPLDYAKECEAKLKRPESEIFLTLAKIEAARPGQNFIMEMVKKTGLTKDQIRHRREKPEYKKFLQLEKNSLKLGRRTSLEAATPSGPTRRNTAPDLSVSTPADPTQGTAASNNIEVTPPLSGGTSDKTLAPPKEMDVTPGSSGLQNRAPAPDSDSEADDVFSTPLGIDTHTQSPPNKRKAEESPEDPEATPKAPPPTRGDGGLRRGKRARQLRVDECTPSTSALPTRDPTSLQEKEPRINIIQNIRIMSAKSSNITGDPAETSAAPAIAGIDRQVVNSLPTCHGLGPDELKTYLQQLMIEKTAEQVRDEADIRLIKSSLTDRVEQFDSTLTAWIAENFKKGKKEKNPQSESQPSQSNTKVTQGKTGKKTTNYRQAYTGSGPRASNFKRAQDLYNKNRAGLAANILSGKPLTTLGTYPTVQATEDLYATIFEEGTAIDEEHITDQRTSHKNLDVPILPDEIAAATAGWTPSAAGPDGLSVNAVKATNTGKLSLLFNAIYYRAHIPDIWRNTRTTLIPKDGDPANPNNWRPISVSSALLRLFHRVMAGRIRGAVDLNMNQRGFTDADGTLANTLILQHYIQARREAKKPYNLLLIDLQKAFDTVAHSSVLRAMRRAGLGDHVVRYVADTFKGATTTIKLGSAYTRPINIKRGVRQGDPLSPVLFNLVIDELLCRLDRGGGGGSLDSEGAITVKAIAYADDIVLVEDQEPNITIGLAQTRDFFQRRAMSLNLKKTAILSAALVPREGKLAVRTKPFLRFDGQMIPVISDICPARYLGHQLGSTGLMKPSINNLSVWISNIAGAPLKPDQKLSLLKTYAIPKMLYGLQTTTTKAKTLREADRLIRLAVKHILHLNVHTPDAALYARVRDGGLGILSLRYMIPRILMNRMQRLLDRGEDRSISYVLQHPTQQKTFARLGNAAGPLPPELHWAEQLKASPLLCGLEAAKNDKASRLWIDQKPSGWTGRDYVRAIQLRTSNLPTKGIPSNPPEERQCRAGCAKTESISHVLQSCPAVHWERVRRHNEISKKVFNHAKARWTASVEEPHIRHRDGTLYKPDMIIVRDSSAVVVDIQVSWEGNIQLATSHANKKAKYGEDQKFLEAATTMFPGKELIFAPLTIGARGIWPLCNRPTEELLKITPNLKASCVHSTLKWASTIHAAFSGRIWRR

SEQ ID NO: 14101 - protein, 1136 aa, Araneus ventricosus
MATSHPFGCPHCSASFSTKTGLGVHKKRKHAAETNDEVRTDRMKVRWTSEELSLMAFKEAELLDSGWTAEINSSLMLLFPNKSREAIKGQRKSKKYKDLLEGHRRNSAPQSSGLTPSSAQGSLPSSSVVSSTSVVVSSSVRRSTRNLVKNSNPSSGELAINPSLSGTLPQIVEVPETVSSPIRRLRSHVKKTVPIQSSSSVDSDEDTDSLWIEPVELVSPEMAQTHFISEDLELLQEIRADLDATSSSILELLVNEPLGVPVPAFSLTNDESRLADHLECLFDSDVSSTFSHEFKEIWTDFRKRPCKDTLFIRTNLFLQVLLPDKSETSRPKQVPRNDPQRGGVSKRRQRRQDYARTQEAFRRNPSRCANKILDPVDSRTVATPFDDDFRSYWETVLSISADHRPSFPNMSAGNIEHRESVTSTLLDAISLKEVQKCFPRNQSAPGPDLVTVKELRNIPIWDIVKMLNIFLFCRKLPERLCKSRTIFIPKMSGACKPGDFRPISLTPVLGRLFSKILAKRLKFANLANEQRVFIPDDGVAQNIFLLDFVLRHAHEKCRATYIASIDHAKAFDSVSFDSVFAAITEKGIHPEFISLIRTIYDQSYTSFVPFANHRFTPSCGVRQGDPLSPILFNLVMDFVIRSIRGSVGIQLGDGSSTNISAYADDLILFASSTAGLQHLLDRTAELLAGCNLQINLGKSFTISILADGRNKKTKIDPTPRFRVRSSFIRPLTIDENFKYLGVKFTAQGLLAANCAPTLKNYLSKLASAPLKPQQRLFILRTILLPKLFHLLVLSSVRAGHLVKLDSCVRAFVRRVLYLPTDCPNTYLYAAISDGGLGVPSLRYLVPVWRSEKLASLSTSMSPACLAGPPGDYLQRLRERAARGLLTCDVTKYFASKLYNSVDGLALGESGKVPKQHSWVGSSNRFLSRKDFINLIKTRINCLPTASRCARGRLQKDKMCRAGCNRKETLNHISQGCPRTHQRRIARHNAVSNYIKRGLENRGYIVFDEPIYKTSVGNRKPDLVALKNKIAFVVDSQIVGESVDLKRENQRKISYYKDNDEMIDQIRRLHKVDEVSVLAATLNLRGCWSSRSVDDLITKNKMFTQNDLAVISTRVLIGTYSAFTLFNKSTWRAGVGA

SEQ ID NO: 14102 - protein, 1584 aa, Ephydatia muelleri
MYTRTTRLHPPSYGFVKSAKKRLPQDARWLNTIELTPRNRRRCQQAQPLRRRRPQRAQPPPAQQCRYCEARLPSVKGLRNHERAFHQTQVSADLAQLPTSTTTRANAWSKEEVSLFLGAVSRFGLKHNSLIARDIGTKSATQVAYFKRKYAKEHPLWAIQAALPVSTRLRDCGTQSSPSRSPTTSVTSAYSRCTGSTLQPSTPSSTQSDVPPSLSSPSGPTASLPEQTGTAPNLSLGARTALLLADKTLATLRGKPPSPTVATVMGTCTPSVSLPTTPLLDLSLGEPTTSRQGADPVERDFRYNLEITSHHSTVNAPTTGLPQRGRIRRLQGHLSSPSTADDCSPPPTQMESPKTISQSINTLVSTIRQEVENTPIRRMPVQLPSSSAANDHSQLSATASPPPAQQPTHSGEPDNTHHHSQSSNTERGSSGPHHWYNSSWGGWRGWRTEAGGRGRGINAGAGRGDRGYGGGQPWLPHPTQASRHQTQGWEEWGEGPRGKGRGKGKTSSRANPNTFPGPPTKFQRGSPWVGGWREGESDYRDRESEPNGPINQVRGRGRGRGLRGTERRPMQHLRQPTPSTLGEQEDDISTWDRAGRANHLIRPRTPRNGEVHPNTQPGPPAPYPRNGPRVVGDGGEWREGFRGGVGEPNDPSRFTNQSRGRGWGMSYRGKERGPTGCPQPPIHHQEHEADQLVMDPDDNSAPEKYFDRLLPLSNKRLATTEWRRWCGLLDRWTQSYARWTAERSNGPHPPTTTAWRRRQQTKTNGPRNLYSNQQSRNRAIGRKVAVQKEYRQNAKRCMSKLRNTPPPQKCSIPVAIVTEYFTTKQSAVDSILPPGAPPTPLWPDVAPTDLLETPFTADEVRRTLRRMNNNSCPGPDRLQYSAWKRLDPSRLILTTIFNTCRLNAKIPPSWKTSTTILIHKGDDPSKIENWRPIALQNTLYKIYAAAIAKRISNWALTNNILSPSQKGFLPFDGCLENGFILRSVLQDSRRNKKEVGVAWLDLKDAFGSVPHSSLLDILQRAGLRSTTLAIIEDIYKDSSTCIQTTAGLSAPIPCSRGVKQGCTLSPILFDVVMEVVIRAMEEVPGAGYQLSNINIKTLTYADDLCALTSSPEKIQLMLSKAEAAAKWAGLTFNPRKCAALTIFRKQGKRQHAVNSQPTLGGEPIPALPWDGTYKYLGCRLGADPKTDLSQVSADYIADCEAILRSDLTDWQKLDAIHRFAKPRLVYLLQNTSPTIGWARNIDKTIRALAKTCLKLPGHTVSAFLYTDTTSGGLGLPNIEDELHIFRVSSAFKLLSTPGDHRVRDIAYSALSRTAEIRSGNRKSPQEFLNSLPDPGEGNKGDLSSLWSDSRVSFHHCNAKIDTDNCAIICDNHTVHWPKRSQVPSLLRSSIQNRHKTQWSSCSDQGRTVSCISKHAASNHWIRTGKYTSFGEYRFALKARLNLLPTRTARYRAGEVIPDRSCRKCNTEQETLAHILNHCPNHVGLLRLRHNKILSRLANAIPAKMGRQYKEQVVPGDRLGLKPDLVVLDDTKKEAFVIDVTTPFEGTESFSTARLEKERKYGYLKALLGSKGYQRVEVDALLLAP

SEQ ID NO: 14103 - protein, 1044 aa, Sacculina carcini
MTQELHHLSCAVCDSTNGVRQTHNDVALCRACDIFWRRHQDSGVRGRQCDRGGSCRLTPHDRSCAPCRLARCQAVGIQAERAPSADTGSDPAQPCHHCGTANSRRRVISCAQCERLFHLTCVGITRAQADVLPVWHCGACMQSRGADGDVDPPADGNDTTTPTDLAAALAELRQQRRVRQHVPRALRHRVAADLAQHITAALEQRSLSAWWKLLSYALTGPISSDAAARKKRGTQNRVRSQHDENEARSRGVRAKCADGDIGAALRLLTSSDCLAGDDEAVTAELERKHPPALPDEQLQMHDAGTLPIFEEHEIRSVVHSMPKGSSGGLDGIRPLHLRQLIAPQTAEAGAQLLKALTQLCNSCAQGRIPDFVLGAFYSARLIALRKKSGGLRPVAVGSVLRRLASKLIAGKMTSAVAQQLRPVQLGVGCKLGCEAAVHATRAFVNEANGRHGHILLKLDVTNAFNTISRRALLDEVARRLPAALPLVQQAYGQPTPLYHGTTRIWSCRGVQQGDPLGPILFALAVDPVAQSLQSPLNLWYLDDATLAGPREVVLADVSRLIPALGSIGLELNAGKCEVVSLGPATDTRPAETDDSNEAATSLLASATLTPLSDLHLLGAPVQTGGISEALNKIQHQTSLLIQRSVNIGSHPALFFLSRYASVPRAIYLLRAAPVYQAREQMGDIDEQLRSAISDCCNVAMSDAQWLQASLPVRHGGIGARRLSDVALPAHIASLEATRDLVCLINHRTSGDRPCSLVAAIEEFVDTMCPDFSTSEPLQQRHLDDRSSSVRQQHLLGSANQLCRARLLAAAAPHSGAWLSALPVASLGLLLPDEAVRVGVALRLGAAVQEPHRCRCGATTDRWGHHSLSCSRNAGRLPRHTALNNIIRRSLASAGIAAVLEPRGLDRGDGRRPDGITVFPVRHGKSLLWDVTCVNTFCDTHLLDGAVTPGAAAQAAEVRKRRRYSELCQRYDFVPLAIETTGVMGAPLDDFVKLLGGRISERSGEPRETAWLRQRISLAEHYLCNSKKKKKKKTLTHTHTHKHTH

SEQ ID NO: 14104 - protein, 1028 aa, Sacculina carcini
MTQELHHLSCAVCDSTNGVRQTHNDVALCRACDIFWRRHQDSGVRGRQCDRGGSCRLTPHDRSCAPSRLARCQAVGIQAERAPSADTGSDPTQPCHHCGTANSRRRLISCAQCERLFHLTCVGITRAQADVLPVWHCGACMQSRGADGDVDPPADGNTTTPTDLAAALAELRQQRRVRQHVPRALRHRVAADLAQHITAALEQRFLSAWWKLLSYALTGPISSDAAARKKRGTQNRVRSQHDENEARSRGVRAKYADGDIGAALRLLTSSDCLAGDDEAVTAELERKHPPALPDEQLQMHDAGTLPIFEEHEIRSVVHSMPKGSSGGLDGIRPLHLRQLIAPQTAEAGAQLLKALTQLCNCCAQGRIPDFVLGAFYSARIIALRKKSGGLRPVAVGSVLRRLASKLIAGKMTSAVAQQLRPVQLGVGCKLGCEAAVHATRAFVNEANGRHGHILLKLNVTNAFNTISRRALLDEVARRLPAALPLVQQAYGQPTPLYHGTTRIWSCRGVQQGEPLGPILFALAVVPVAQSLQSPLNLWYLDDATLAGPREVVLADVSRLIPALGSIGLELNAGKCEVVRLGPATDTRPAETDDSNEAATSLLASATVTPLSDLHLLGAPVQTDGLSEALNKIQHQTSLLIQRSVNIGSHPALFFLSRYASVPRAIYLLRAAPVYQAREQMGDIDEQLRSAISDCCNVAMSDAQWLQASLPVRHGGIGARRLSDVALPAHIALLEATRDLVCLINHRTSGDRPCSLVAAIEEFVDTMCPDFSASEPLQQRHLDDRSSSVRQQHLLGSANQLCRARFLAAAAPHSGAWLSALPVASLGLLLPDEAVRVGVALRLGAAVQEPHRCRCGATTDRWGHHSLSCSRNAGCLPRHTAVNNIIRRSLASAGIAAVLEPRGLDRGDGRRPDGITVFPVRHGKSLLWDVTCVNTFCDTHLLDGAVTPGAAAQAAEVRKRRRYSELCQRYDFVPLAIETTGVMGAPLDDFVKLLGGRISERSGEPRETAWLRQRISLAVIRGNAASIVL

SEQ ID NO: 14105 - protein, 1029 aa, Sacculina carcini
MTQELHNLSCAVCDSTNGVRQTHNDVALCRACDIFWRRHQDSGVRGRQCDRGGSCRLTPHDRSCAPCRLARCQAVGIQAERAPSADTGSDPTQPCHHCGTANSRRRVISCAQCERLFHLTCVGITRAQADVLPVWHCGACMQSRGADGDVDPPADGNDTTTPTDLAAALAELRQQRRVRQHVPRALRHRVAADLAQHITAALEQRSLSAWWKLLSYALTGPISSDAAARKKRGTQNRVRSQHDENEARSRGVRAKCADGDIGAALRLLTSSDCLAGDDEAVTAELERKHPPALPDEQLQMHDAGTLPIFEEHELRSVVHSMPKGSSGGLDGIRPLHLRQLIAPQTAEAGAQLLKALTQLCNCCAQGRIPDFVLGAFYSARLIALRKKSGGLRPVAVGSVLRRLASKLIAGKMTSAVAQQLRPVQLGVGCKLGCEAAVHATRAFVNEANGRHGHILLKLDVTNAFNTISRRALLDEVARRLPAALPLVQQAYGQPTPLYHGTTRIWSCRGVQQGDPLGPILFALAVDPVAQSLQSPLNLWYLDDATLAGPREVVLADVSRLIPALGSIGLELNAGKCEVVSLGPATDTRPAETDDSNEAATSLLASATVTPLSDLHLLGAPVQTGGISEALNKIQHQTSLLIQRSVNIGSHPALFVLSRYASVPRAIYLLRAAPVYQAREQMGDIDEQLRSAISDCCNVAMSDAQWLQASLPVRHGGIGARRLSDVALPAHIASLEATRDLVCLINHRTSGDRPCSLVAAIEEFVDTMCPDFSASEPLQQRHLDDRSSSVRQQHLLGSANQLCRARLLAAAAPHSGAWLSALPVASLGLLLPDEAVRVGVALRLGAAVQEPHRCRCGATTDRWGHHSLSCSRNAGRLPRHTALNNIIRRSLASAGIAAVLEPRGLDRGDGRRPDGITVFPVRHGKSLLWDVTCVNTFCDTHLLDGAVTPGAAAQAAEVRKRRRYSELCQRYDFVPLAIEITGVMGAPLDDFVKLLGGRISERSGEPRETAWLRQRISLAVIRGNAASIVL

SEQ ID NO: 14106 - protein, 1012 aa, Sacculina carcini
MTQELHHLSCAVCDSTNGVRQTHNDVALCKACDIFWRRHQGSGVRGRQCDRGGSCRLTPHDRSCAPCRLARCQAVGIQAERAPSADTGSDPTQPCHHCGTANSRRRVISCAQCERLFHLTCVGITRAQADVLPVWHCGACMQSRGADGDVDPPADGNDTTTPTDLAAALAEFRQQRRVHQHVPRALRHRVAADLAQHITAALEQRSLSAWWKLLSYALTGPISSDAAARKKRGTQNRVRSQHDENEARSRGVRAKCADGDIGAALRLLTSSDCLAGDDEAVTAELERKHPPALPDEQLQMHDAGTLPIFEEHEIRSVEHSMPKGSSGGLEGIRPLHLRQLIAPQTAEAGAQLLKALTQLCNCCAQGRIPDFVLGAFYSARLIALRKKYGGLRPVAVGSVLRRLASKLIAGKMTSAVAQQLRPVQLGVGCKLGCEAAVHATRAFVNEANGRHGHILLKLDVTNAFNTISRRALLDEVARRLPAALPLVQQAYGQPTPLYHGTTRIWSCRGVQQGDPLGPILFALAVDPVAQSLQSPLNLWYLDDATLAGPRKVVLADVRRLIPALGSIGLELNAGKCEVVSLGPATDTRPAETDDSNEAATSLLASATVTPLSDLHLLGAPVQTGGISEALNKIQHQTSLLIQRSVNIGSHPALFFLSRYASVPRAIYLLRAAPVYQAREQMGDIDEQLRSAISDCCNVAMSDAQWLQASLPVRHGGIGARRLSDVALPAHIASLEATRDLVCLINHRTSGDRPCSLVAAIEEFVDTMCPDFSASEPLQQRHLDDRSSSVRQQHLLGSANQLCRARLLAAAAPHSGAWLSALPVASLGLLLPDEAVRVGVALRLGAAVQEPHRCRCGATTDRWGHHSLSCSRNADRLPRHTALNNIICRSLASAGIAAVLEPRGLDRGDGRRPDGITVFPVRHGKSLLWDVTCVNTFCDTHLLDGAVTPGAEAQAAEVRKRRRYSELCQRYDFVPLAIETTGVMGAPLDDFVKLLGGRISERSGEPRETAWLR

SEQ ID NO: 14107 - protein, 888 aa, Sacculina carcini
MQSRGADGDVDPPADVNTTTPTDLAAALAELRLKRRVRQHVPRALRHRVAANLAQHITAALEQRSLSAWWKLLSYALTGPISSDAAARKKRGTQNRVRSQHDEDEARSRGVRAKCADGDIGAALRLLTSSDCLAGDDEAVTAELERKHPPALPDEQLQMHDAGTLPIFEEHEIRSVVHSMPKGSSGGLDGIRPLHLRQLIAPQTAEAGAQLLKALTQLCNCCVQGRIPDFVLGAFYSARLIALRKKSGGLRPVAVGSVLRRLASKLIAGKMTSAVAQQLRPVQLGVGCKLGCEAAVHATRAFVNEANGRHGHILLKLDVTNAFNTLSRRALLDEVARRFPAALPLVQQAYGQPTPLYHGTTRIWSCRGVQQGDPLGPILFALAVDPVAQSLQSPLNLWYLDDATLAGPREVVLADVSHLIPALGSMGLELNAGKCEVFSLGPATDTRPADTEDSNAAATSLLASATVTPLSDLHLLGAPVQTGGIAEALNKIEHQTSLLIQRSVNIGSHPALFFLSRYASVPRAIYLLRAAPVYQAREQMGDIDEQLRSAISDCCNVAMSDAQWLQASLPVRHGGIGARRLSDVALPAHIASLEATRDLVCLINHRTSGDRPGSLVAAIEEFVDTMCPDFSASEPLHQRHLDDRSSSVRQQHLLGSANQLCRARLLAASAPHSGAWLSALPVASLGLLLPDEAVRVGVALRLGAAVQEPHRCRCGATTDRWGHHSLSCSRNAGRLPRHTALNNIIRRSLASAGIAAVMEPRGLDRGDGRRPDGITVFPVRHGKSLLWDVTCVNTFCDTHLLDGAVTPGVAAQAAEVRKRRRYSELCQRYDFVPLAIETTGVMGASLDDFVKLLGGRISERSGEPRETAWLRQRISLAVIRGNAASIVL

SEQ ID NO: 14108 - protein, 730 aa, Sacculina carcini
MHDAGTLPIFEEHEIRSVVHSMPKGSSGGLDGIRPLHLRQLIAPQTAEAGAQLLKALTQLCNCCAQGRIPDFVLGAFYSARLIALRKKSGGLRPVAVGSVLRRLASKLIAGKMTSAVAQQLHPVQLGVGCKLGCEAAVHATRAFVNEANGRHGHILLKLDVTNAFNTISRRALLDEVARRLPAALPLVQQAYGQPTPLYHGTTRIWSCRGVQQGDPLGPILFALAVDPVAQSLQSPLNLWYLDDATLAGPREVVLADVSRLIPALGSIGLELNAGKCEVVSLGPATDTRPAETDDSNEAATSLLASATVTPLSDLHLLGAPVQTGGISEALNKIQHQTSLLIQRSVNIGSHPALFFLSRYASVPRAIYLLRAAPVYQAREQMGDIDEQLRSAISDCCNIAMSDAQWLQASLPVRHGGIGARRLSDVALPAHIASLEATRDLVCLINHRTSGDRPCSLVAAIEEFVDTMCPDFSASEPLQQRHLDDRSSSVRQQHLLGSANQLCRARLLAAAAPHSGAWLSALPVASLGLLLPDEAVRVGVALRLGAAVQEPHRCRCGATTDRWGHHSLSCSRNAGRLPRHTALSNIIRRSLASAGIAAVLEPRGLDRGDGRRPDGITVFPVRHGKSLLWDVTCVNTFCDTHLLDGAVTPGAAAQATEVRKRRRYSELCQRYDFVPLAIETTGVMGAPLDDFVKLLGGRISERSGEPRETAWLRQRISLAVIRGNAASIVL
